United States Patent Application Publication US 2023/0087228 A1 - sequence listing, part 4

SEQ ID NO: 502 - DNA, 1889278 bp, Artificial Sequence
  Synthetic Oligonucleotide
gtatttcgaaaaagcccacgaccagagttgaactggtgaccccgtccttaccaaggacgtgctctaccaactgagctacgtgggcggccacgaaaaatgccttaagagcgggaaacgggattcgaacccgcgacagatggcttggaaggccaccgctctaccaactgagctattcccgcgtcgttattctgggcagggaaggattcgaaccttcgaagcgtttccgcaacgggtttacagcccgtcccatttaaccactttggtacctgcccggctttcatgctttatccgcctcagcagatgctcctaagccagcgaagggaatcgaacccccgacccgctgattacaaatcagccgctctaccagctgagctacgctggcaaaaaaacctctcccaaaaggaaaaaagacgcaccgccagcggcgcatctttccgaaaaaagtcctgctttccagacttttttcttaatgtagaagcaaaaggatacgaagcagcggaagtatcctagcgaaaagcaaacctgatgtcaaggggctttccccattgaccccacgccggcggaaacgtatagtctttttccgaaaaatcatgatcgtccaaatctatgaaatccagacgcccgaggaagcggagcgctgcctcgccctgggcgtggaccgtctcggaagcgtgatcctttcggaaacggaccggggacggagccggatccgggaggtcgtcgagctcgtccgcggaacagacgcgaaaagctccctgattccgcttttttccaatgaaaacaagcttttttcggtgatggatattctccggcccgattatgttcatttctgcgaggccttgaccgacgagcaaggccggccgcacgacctgcggcccgccgccgaaaagcaacatcgtttcagggaaagattccctggaatcggaatcgtccggacccttccggttccggaagcgggccggcttccgggctttcccgccctggaaatcgcggccgccctggaggattcgagcgatggtttcctgatcgacacctggctgggccgggagccggtcgagggcttcgtgggcatcaccggccggcgttcggacctggaccgggccgcgaaaatcgtccgggcaagccggattcccgtcatcctggccggcggcttgtcgccggagaacgtctatgaatccatgcgaagcgttcgtccggccggggccgacagctgcaccctgaccaacgccctggaccgggaagggaaacccgtccggttcaaaaaggacttcgataaggtcgccgcctttgtcgccgaggtccggcgggcggaaaaagatttcgacggaccgccgtccgcccggttttgatgggtcgtttccgctccgccccgttgcagaaaatttccccgcggacgtcaggacgggaggcggagatcgatgccggaatccttcaggagatttctcagcttcgaaaaatcctcggtccgggtatggtagacatacaggacgtccggcttgaaggcccgggccgcgtcggacagcatctcctcggtcatcgtgtagggcgtcatcaggggcagaacggcgacatcgatgttcttcagggccttgacctcgggaacgttctccgtatcgccggccacataaacccgcaagccgccgaaggtcagcacatagccgttgcccgcgcccttggggtggaacggcacgccgggactccgcatcccggcgaggttgtaagccgggacggcttcgatggagacgccgagaaccgccgttttcccgccgttggccaggatttcgccgccgggcagcgggccggcgcacacggccggacagatgatcctcgtccctgttttcttgacggcctcgatcccctcgagatcaagatgatcgccgtgctcatgagaaaccaggatcacgtcggccttgggcggatggtcgggaacaaagacgtacggcttagtcggatccacccagacggttgtccccccgaactcgaaaaaaacggtcgcgtggccgggaagagagattttcaaatccccttccgccgtcttgaaaacatccgaaaaaccatggcctccggccgccccgtaaaccaaaaggccggcggcggccgccccgatccggaaaatcttcttcatggccgttcctccgcaattccgccgatttttgcttttctcgaatatagaaccccaggggggccttgtcaaacggaaccgcccgtccgccgcttcaaatttccgccggggtccccgcggagcggccgcggggcaaaacatcccgtgttccggtcctttccatacgaacctttttccagccgcaatcgtatataatcaagatcaacgttcgcgtccggatgatgttcccttccgacgcttgaacgactattccacccgccagaaggaggcatgatggccaagaggagattacccccggcctccctgttcctgtgcctgggtctctggctcgcgagcgttccgctcctcgcgtccgaagagtccctgcacgaagtctgggccgtcaaggattgccgcgtggtgacgccgggcggacccgtcctgcccaaggcgaccgtgatcatccgcggcgggctcatcgagtccatcggcgcggaaaccgcgattccgcccgacgccgaggtcatcgacgggagcgctctcaccctgcacccgggcctcatcgacggcctgggccagtcgctgctcaagctccccgaggaaaaattcgacccggcgaagttctattcgggcgagttcacggacaaggaccgcggcctgacgccggagcttcgggcgttcgacttcgccgtcctgggcaagtcgaccctcgaaaaatatcataaactcggcttgaccgccgtccaagccattccgtccaagggcgttttgtccgggcgggcctcgctcttctccctcagctcggaggacaagaataaagccctcctgctcaaggacacctggctcggcctgggttatgcccccgcctccttcatggtctatccgaactcgctcatgggagtggtggccttctttcgccaggaattcgccgacatcgggcattacggcctgaacgccgatctctgggcgaagatgcccgcgggcatccgccggcccgtctataacggccggtgggacattctccgggagtacgcctctggcaagaaacccgtcgttttcttctgcaacaaccagcatgacatccggcggtcgctggccctggccgaggagctgaagctggactattttctctgcgacctgggcggcgaagcccaaagagtcgtccccgaattaaagaaggccaaggcccggattctctgcacggtcgccttcaaggcgccggcgacgagccgcttcagccagctgggcaaggctgaaaaggaaaaagccgaaaaggagttctatccgcggaatccggccgccctggcctcagccggcatcccgttcgctttctcctccctcggcacggacgatcccaagagcttcatggagggcgtccaaaaagcggtcgaggccgggctgtccccggacaaggccctggaagccctgacgtcctctccggccgccttcctgggtttggataaggccctgggcgcggtcgaggccggccggatcgccaacctcgttctggtcgagggggatcccctggtcaaggagcccaaggtcaaatacgttttcgccgacggccggctgttcgacttcacgaaacccaaagccaaggaaggcgaaaagccgacggtcaacgtctccggccgctgggagctgtccctccccgaagccgggctgaccctgaccgtggatttcgcccaggaggaagcctccctgtcggggaagatgaccacgccgttcggggcgttcgatttcaccggcggatcggtttcggccgaccaggtctatttcgaggtgaacgccagcgtcggcggacaggacatcgatctctatttctcggccacggtgaccggagacacgatgcgggggacggccgttcaagggacatccggctcgaccgagttcacgggaaagcggaatcccgcctgaggccttggagaaagccatgaaaaagaaattctttattctcgccctgatcgggcttctagcggccgccgccgcgctcccggccgccgaagcgcggctcctgctcaaaaacgcccacgttcttcccatcgccggggagaatttcgacggcgacatcctgatcatcgggaccaagatcgccaagctgggcaaggatcttccggcggaggccggaacggaagtcatcgacctcaaggggcggtggatcatgcccgggatcatcgactcccattcccatatcgccatcgagggcggagtcaatgaaacgggcgatctcatcacggccgaagtcgacatccgggacgttctcaatcccgaggacctgaatattttctacgccttaacgggcggcgtgacctcgattcatacgacccacggctcggccaatcccatcggcggccgaggcgtctgcctgaagctgcggtggggagcggacgccgagggcctcctgttcaagggcgcgcccctgacgagcaagtgggccctgggcgaaaaccccaagcaaacgaacttttcgggcgcgggcaaaccccgctatccccggtcccgcatgggcgtggaggaatccatccgcctggaattcgaccaagcccgcgcgtatatgaaaacctgggaaacctatgaaaagaagatcaaggagacccggggccggaagggcgcggccgtccccctgccgccgcggaaggactatcgcctggaggcggtggccgacatcctccggggcaagttgtgggtccgctgccacgcctaccagggcccggaaatggcctcgatcatccgcctctgccgggagtacggggtgaagctggctgccttcgagcacggcctggagggctaccgaatcaccaacgagctcgtcgaaaacaacgtggccgtttcgactttcgccgatttttgggcttataaatgggaggccttcaacacgatgccccattcggcggccctgatggccaagcggggcgtcctggtagccctcaattccgacgatgcggaacggatgcgccacctcttcctggacgcggccaagaccgtccgcttcggggggctgagcgagctcgaggctctcaaaacgatcaccctcaatccggcgatcatcatgggagtggacaagctcaccggaacgctcgaggccggcaaggacgcggacatcgccgttttcaaccgccatccccttgatccctacaccgtctgccagatgacgatcgtcgacgggaaagtctacttcgaccgggccaagtatctcgacgaccgccggaaagccgaggaggcgaaaaaagcggcggccgaggcccccaaggaaaaaaagtcctgaggagacgaccatgaaaaagatatttcttctcgttgtcttcgtcatcaccgccctggcggttctcgtcttttccggaccggccggagcggaggacggccggacgatcctgatcaagaacgcgaccctcgtgccggtcaccggcgcgccgatcgccgcgggtcagcttctcatccgggacggcaagatcgccgccctcggaacgagcgtggacgcgccggccgaggccctggtcatcgacgcggccggccagttcgtttatcccgggttcatcgacgcctacactcatttcggcttggtcgagatttcggccgtctccggcacggtcgatgtccgggaaatgggcaaggaaaatcccgaggttctcgccgcccgggccatcaatcccgcgtccatccacttcggaacgagccggatcaacggtaccacggcggcgctggtcgctccggccggcggaacgttccccggccagtcgtctctcgtccgcatggacggctggaccgtggccgagatggccctcaaggaaaccgccacctccctggtcaacttccccatgtctccccggccggccgggggcgagggcggcgggacggcacaggagagcaaggtcgacgtcacgtccaaactggtggagaaaatatcggaatacctcaaggaagcccgccgttatctcgacctcaagaaggcggccgcggccgattcgcggctcgaggcgccggccctcaaccgcaagttcgaggccctggcccctgtcctggacggaacgcttccggtcatcctctccgtggaaaaggaaaaggacatcgagctggccctcaagttcatcaaggaggagaagctcaaggccgtcttccggggctgcagccagggattcaaagtcgcctcgaaaatcaaggaggccgggatcccggtcatcatcgattccctgtacgtcggccccgtcgagccggaagacggctacgacgcgcccttccgaaacgtgatcgagctggtcaaggccggggttccgatctgtttctcctcgggagacgacccggccgcgggcaaggaccttccctatcacgccgcccgggccgtggcctacgggctcgaccacgaggaggcgatcaaggctttgaccatcaacccggcccggatcttcggagtcgaagaccggctggggagcctggagaccggcaaggacgccgacctctttatcaccacgggcgatccgctcgacacgcgctccgaagtccggcacctgttcatcggcggccgtcacatcgacatgaagaactactgggacggcctttacgaaaaataccagatgagaccgatcaagtaagagccggtttccgccggccgccggatccccggccctccgggggtccggcggcaaggcttttcccttctcctggcgcctccggctccccgtctgcccgaacctgagaaaacgggcgggactgaacaggagaccggagcgcctcccgccgcccttgtccgaagacaatcaacgcgcttccctatcggaaaaaaggatccgcccgctatcctccgagcctccgttcgtacaaccggtgattgtcctcgtcgaagcagacgaagatcaccttgtccatctccggatgcccgtccaggaaattcgagaccgtccggatcgcgacagccgcggctttatccttcgggtatccataaacgcccgtgctgatgttgggaaaggcgacggaccggattccgttctccgcggccaaatccaaggcgctccggtacgccccggccaggagcgcctcttcgccgccggttccgcccctccagacggggccgacggcgtggatgacatagggcgccggcaagttgtatcccttggtgagcttcgccttccccgtctcgcagccgccgagcgtccggcactcggccaggaggcccggcccggccgcccggtggatcgccccgtccacgcctccgccccctaaaagcgaaccgttggcggcgttgacgatcgccccggccgcaatcttcgtgatgtcgccgcggagaagcttgattctcgggttcatcggcgctcgacgccttcgccggccgcgtagaccgtctttcccctgaacagggtgagaaccaccctggccgcgtggatctcggaggcggggatctcgctgctccaggaatcaagggaagcctcatggacggtcgtgagcccgaaggccgcggccatcccctggtaggcctcgatcccctgcttcaattgatcgacggtgtaagacgggaacagtccggcgacaagatcctgagcgctttcccggagcgtccccgtcggctcccccgtcgccgggtcgcgctcgataaagccgccgggcggatttttcgtctcctttgtgatcccggccagggccatggccttggagttgacccaacggctgtgtccgtcctcggaggctaggcagacggggatgtccgggacgacggcatcgatgatcctccggtcgggccccgttttcgggaacgccgtgttgctccatccccggccgctgatccgttcggccccgggacgggccgcggcgtagtctcggatcgctttctggacctcctccgccgtcgtccggccgaagatgttcagctcgaagaaatgccggaaggagctgatgatgtgggcgtggctgtcgatgaaccccggcaggacgagcttgccctccaggtcgacgacctttgtcgccttaccgatgaaggcggaggcgccggagtcgctcccgacatagacgaatctcccgtccttgacggccgcggcctcggcccggctcgaagaggcgtcgacggtgtaaaagacgccgtttttcaggacaaggtcggcgggaaccgaggccgggccgggcgcgcagtccacggccagaaccaggcatccggcgatcaaggcgatcaaaagaagggcggacggacggcgacgggatgagggggtcatggaattcctttctggccggtcatgggcggatgcgatggccagagggtacacgaggctggccgcgcctgtcaaaagcaggatgtcctccgtcccggcttgacggaccgccgccccgaacctatattgaatcatgcagaaacggtgttgaaaaaaattcatccgagataaagcgttttcgacggcgtccgcggcgttgacggcgccggagggattcgaccggaccgaaaatccgccgcctcaaatgccggcgcttcgtccgcggcggcgcgggaagcggagatttccatttcgataaggagggcgacatgaagccgaccgaagatctgaaaaacgagcacgcggccgtcaagctggccctgaaaatcctggaggagacggcccggcgcctggaggaaggggtcagcgtcgaggaagatcacctcggcgggctcctggaatttctgagggtcttcgtcgaccggtgccaccacggaaaggaagaggatcttctgtttccggccatggagcgggcgggggttccccgcgaaggcgggccgctcggcgtaatgttagccgagcacaaggaaggacggatgtatgtgaaagggatgggcgccgcctttctcgagtatcggaagggcggaagaacgtccggccgggaatacgcccaaaacgcgcgcgagtacgcctccctcctggcccgccatatcgaaaaggaggacaacgtcctctatcccctggccgagagccggttgccggccggggtctggaagaagctggaagcgggctttgagaagatcgaggacgaggtcgtcggagcgggccgccacgaggaattccacgccttccttcaccgcttgaaggaagaatacctgtcttaaaaaggaagattaaaatgaaaaggaaaagcgtcatccgatttctcctgactctcggcctctttctcccgatcatcgcggctccgcttctccgggcccattgcgacgggatggacggtccggtcgtcaaggccgcccaaaaagccctggaaaccggagaggtccgtctcgttttgatctgggtacataagcaggacgaggaggccgtgataaaggcctttgagaaaacgctgtccgtccggaaattgagcgaacaggccgcggagttggccgacatgtatttcttcgagacgctcgtccgtcttcaccgggccggggagggagcgccttacaccgggttgaaacccgccggtcgagacctcgggccggccatcccggccgccgaccgggccgttgagagcggttcggcccaggatcttctgaatctcctgtcggatctcgtccgggagggagccgggggacaattcaaggaagtcctcgaaaggaaagcgtacgaagagaacgatgtcgagaaggggcgggcctacgttcaagcctatgtcgccttcgtccattacgtcgaacggatctacgaggcggcgaagagcccggctcacgcccatttcccagactccgaaagcggcaaagcgactcaataaccgaggcccccgcggcgttccgacgccgccgcgtttgcatcccccgcgcccggcgggtatagtgactccggaatggccgaaatcggaaaacgaaactcgctggcgatcatcaagacggtcgccttcggcgtctatctcgacgggggaggcctcggcgaaatcctcctcccccgccgctacgtcccggccggagcggcccccggcgaccgcctggacgtcttcctctatttcgattccgaggaccgcctgatcgccacgacggaaaagcccctggcccaggtcggggatttcgcctttctcgaggcggtcgcggtcaatcccacaggcgcgttcctgaactggggcctccccaaggaccttctcgtcccctggagcgagcaacggccgccgatgaaggccgggaaaaaatacgtcgtccatgtctacctggacgaggccagccggcggatcgccgcctcggccaagatcgacaagcatctggccaagacgcccccgcccttcgaggccggccgggaagtcgacctgttgatttacggccggacggagctgggctacaaggcggtcatcgataattcccacggcggcattctctataaaaacgaggtcttccgggagctccggccgggcgaccgggtcaagggatacgtccggaagatccgggacgacgggaagatcgacctccgcttgggcaagccgggccccgagggcgtcgacgagctggccggccggatcctggacgcgcttcgggccaacgacggcttcctggaggtcaccgacaaatcgccggccgaattcgtcggccgccttttcggagtgagcaagaacgctttcaaaacggccgtcgggcgcctttacaaaaaacgcctggtcaccctggacgatttcggaatcacgctggtcgaccgcggctgaaattgactcccccgccccctgttggtatgatgctcccgcccatccccccgcaaggaacgtgacccatgatcgaacgctacacgaatcccgaaatgggggcggtttggaccgaggagaaccgctaccggacctggcttgcggtcgagatcgccgtctgcgaggcctggaacaagctggggaagatcccggcctcgtccctccggacgatcaaggccaaggcggccttcgacatcaagcggatcgatgagatcgagcgtgtcgtcaagcacgacatcatcgctttcctgacggcggtcaatgaaaaagtcgggccggacggccgctatatccatctcggcctgacctcctacgacgtcgtcgacacggccctctcgctcctggtccgccggtcgctcctccaggtccgcgcccgcctcctcaccctcaagaaggtcctccggaaggaagccctcaagcataagaagaccgtctgcatgggccggacccacggcgtccacgccgagccggtgactttcggcttcaaggtcctggtctggtacgaggagatcaagcgtcatctcgaccggatcgaccgggcggtcgaggtcatgagcgtcggccggatctccggcgcggtggggacctacatccatctcgatccccgcgtcgaggtcctggccctcaagaagctcggcctcaagcccgctccggtctccacccaggtcctccagcgcgaccgccatgccgaggcgatcggcgcgctcgccctgatcgccgcgtcgctggaaaaattcaccgtcgagatccgccacctccagagaagcgaggttctggagctcgaggagccgttcaccaagggccagaagggctcctcctcgatgccccacaagaagaatcccgtccggtgcgagcggatggccggcctggcccgcctcgtccgggcgaacgtccagacggccctggagaacatccctctctggcacgagcgggacatttcccattcctcggccgagcggatcatcttcccggactcgttcatcctgacggatttcatgctcgccgaggcgatcgatatcatctcccactgggtcgtccgaaaggaccggatgaaggccaatatcaacgcgacccgcggcctgaccttctcccagagcgtcctgctggccctgacccggaaaggcttgacccgcgaggaggcctacgccctcgttcagagaaacagccttaaaacctgggaggaaaacctcgatttcaaagccctcgtcctggccgacccccggatccgggagcggctctccccggccgaaatcgaaacgtgcttcagcctcgacccctacctcgagaagatcgattacatcttcaagcgggtgctctcccgtgaaagctagaatcctggtttcctacaaggattcggtcctcgacccgcagggccaggccgtccgcaacgctctgcacaccctcggctacgaagccgtccgggacgtccgccagggcaaggtcttcgagatcgagctccggggcgtctcccgggccgaagccgagcgcctgctgccggagatcgccggcaaagtcctggccaacgtggtcattgagaaatcctcctgggagatcctcgaagactgaggaggcatccgtgaaattcggcgtggtcgtcttccccggatccaactgcgactccgacgcctttcacgcctgccgggacgtcctgggacaaccgacgacatacctctggcacaaggatcacgacctccaaggcgtcgactgcgtcatcctcccgggcgggttctcctacggcgattacctccggagcggggcgatcgcccggttctcgccgctcatgcgggaagtccgcgccttcgccgccaagggcggcctggtcctgggtatctgcaacggcttccaagtcctcctcgagctcaatctcctccccggggccatgcttcggaacaagaagctgaaattcctctgccggcaggtgacgatccgggtcgaaaacgaatggacgccgttcacccggaacgcccgcccggggcagattctccgcatcccgatcgcccatttcgacggcaactggtacgctccgcccgagacgctcaaggaggtcgaggacaacggccaagtcgtcttccggtactgcgccccctcgggcgctctgaccgagggggccgacgtcaacggctcgcttcacgccgtcgccggactcatcaacaaggagggaaacgtctgcgggctgatgccccaccccgaacgggccgttgagccggttctcggcagcgtcgacggtctcgtcgtcctgacgtcccttctcgagaacaggccatgaaaacgcgcctccacgacgacacggttttggcccggcacaacctgaccgccgacgagtacggcctcatcgtcaagctggtcggccgggaacccaacctgaccgagctcggcctcttctcggccatgtggtcggagcactgctcgtacaagagctccaaggtctttctcaagacgctgccgacgcgggcccccaacgtcgtccagggccccggggagaacgccggggtcatcgacatcggcgaaggccgggtcatcgtcttcaagatcgaatcgcacaaccatccctccttcatcgagcctttccagggcgcggccacgggcgtcggcggcattctccgggatatcttcaccatgggcgcccggccggtcgccctgatggattccctccgcttcgggccgctcgataatcccaagaaccgctcgatcatggaaggggtcgtctccggcatctcctcctacggcaattccatcggcgtgccgaccgtcggcggcgaggcctgtttcgacgagggctattctctgaatcccctggtcaacatcttctgcctgggcttggccgaaaaggacaagattttctacgcccggaccgaagacgccggcaacgtccttctctacgtcggggccaagaccggccgcgacggcatccacggagcctcgatggcctcccaggaattcggcggggacactgaagccaagcggcccaacgtccaggtcggcgatccgttcaaggaaaagctcttgatggaagcctgcctcgaggtcatggagcggcgaatcatcgtcgggatccaggacatgggcgccgccgggctgacctgcgcggccaccgaaatgccggctaaatcgggcaagggcgcggccatcgacctcgatcgggtcccccagcgggaagaaggcatgacgccttatgagatcctcttgtccgaatcccaggaacggatgctgatcgccgcccggcccgaccaggttccggcggtcaaggcggccttcgccaagtgggatctcgacgccgtcgagatcggcgcggtcaccggcgacggccggctcacgtgccgcttccacggggatgtcgtcgtcgacgttcccgtctcggccgtcgtcgacctttgtccggcctacaagcggccttggaaacggccgtccgccccggagccccgggcggccgggcccgtccccccgcccgccgattacgccgacgtcctccgccggctcctttcctcccccaccatcgccggcaaggaatggatctacggccagtatgaccacatggttctgacgaacaccgttcttctcccgggcgcgggggcggccgtcctccgcatccgcggctcgaagaaaggcttggccatgaccctggacggcaacggccggtatgcggccctcgatccccggaccggcggaaaagccgccgtcgccgaggcctgccggaacctggcctgcgtcggggcccggccgatcggggtgaccaactgcctgaacttcggcaatcccgagaaaccgggagtcatggggcagttcaaggagaccgtcgaggggctgagcgaagcctgccgggccttcggcctcgccgtgaccggcggcaacgtcagcttctataacgagaccggcgccgcggccgtcgatccgacgcccgtcctgggaatcgtcggcctcatcgaggatatcgaccggctcgtcaccccgggattcaaggccgagggggacgcggtcatcctgctgggggaaaacaaggaggagttcggcggatcggaatatctcaagctcatccatggaaaacgaggcgcggcgccgccggccgtcgatctcgagcgggaaatcgccgtccacgagacgctcctggaagcgatcggcgccgggctcgtccgttccgccgccgatccctcggaaggcggattggccgtctgcgcggccgaatgcgccttccacagcccggaaggaaccggctgcgacctgtcctttgagacggatctccggcccgatgccgttctcttcggagaaagccaagcccggatcctgttgacctcccgcccggaaaacgcccggcgcgtcctggagatcgccgaaaaacggggcgtccccgcccggatcgtcgggacaacgggcggacgcgccctccgcttccgggtctccggccgccttcttgtcgatcttccggtcgccgaggcccgccggctttggatgaacgccatccccgatttcttcgcgcccgcaaagaggccctcctgagaccggccgtgggcacgctgtatcgagtcgcgaaacgatacgaaacgccgtattccgacccgatccgcctcgcccgcggagcccgggtgacgattctgccccggacgagcgaatggccgggctgggtatggggccgcggcgatgacgggaaaacaggctgggtcccggacgcctatctccgccgggaaggcgaagaggctttcttaacccgggattacgacgcgacggagctttcggtcgaagccggagataccatccgtcccctcggcgagctggccggatgggtttggggaacggacgaccgggggaaaacaggctgggttccgaaagaccatttggagatcgacccccccgggggaaggagggtcccatgagcgaggaagtcttccgcagtcccaagaaacacggccggatcatggtgcttctttcgggccgcggctcgaatttcacggccatcgccgacgcggccgcggccggaaagatcaacgccgagatcgccctcgtcttcagcaacaaggaggacgcgcccggcctggccgcggcccgcgggcgggggctcccgacgatgtccttgagccccaaggcgttcgccgacaaggcggcttacgaccgggcgatcctccgcgaggttgaagcccggggcatcgacctgatctgcctggccggctacatgaaggtcctgacgccggagttctgcgccgcctgcaagaaccgcatcctgaacatccatccggctcttctgccgtcgtttcccggcctcaacgtccagcagcaggcgatcgactggggcgtccgttattccggctgcacggtccacttcgtctcggcggaggtcgacatgggagcgatcgttctgcaggccgtcgtccccgttctccaaaacgacacggctgaaaccttggccgcccgcatcctggtcgaggagcacaagatctatcccgaagcggcgcgcctgtatttcgaaggccggctcgaaatccgcgggcgccgggtcacgatcctgtaatcggacgaatcgctttccatccctttctccctggtggaaacgcaggcttaaaacatcatcacctcgtcgccgccggcgacccaagccgtcgattccggcaggctcgacgtctccactcccttgaagtacggctgattcttgtgaaagccgcctcttgccgggcggaatcggcgaaccttcaccgggacgccccgggcgatcaggtccttgagcgggaaaccggtttccggcggccggccgagggagcgcctcgggccggctctcttttcccggcgggcctttcgcgccgcgggcgtcacctcggagcgtcgaagagcctttcttttttcgcccggggcagggacttgaccgcgcactcccgggccaaggcctgggaccggctgccgcactcctcgcggtagacgagctccaccggccggcgggtccgggtgtagcgcgaggccttcccctcccggtgcatcatgagccggcggtcgatatcggtggtgacgccggtgtagagcgagccgtcgctgcatttcaagatataaagaaaccaggcgggccccggggcgtcgggggttccctcttccttgaccatcatcccccggagcatccggcggtagcgtttttccatgagcggtccgactcccgcccccactctatcatcggcaacacggccgggcaaggccggccgccggccggagcgtttcgggggaacgggcgtttgtccgtccggccggtcctgtgctataaaagagacgttcgaaagagaggactcccgtgacggaatcgatttttaatgaattgaaggctcgcggcttcatcgcccaggtgtccgacgaagcggccgtgaggaaaatgctcgacgagaaaaagacgacgttctatatcggcttcgacggcacggccgccagccttcacgccggaagcctggttccgatcatggccatgatccacctccggcgggccggccaccgggccatcgccctcatcggaggcggcaccaccatggtcggcgacccgagcggccggaccgagatgcgccagatcctggacgagacgaccatccggtcttttggagaatccatccgggctcagctcgaccggtacctgaaattcgacggcgccggggcgctggcggtcaataacgccgactggctcctgccgttgaagtacatcgaattcctccgggacatcggccgccatttcagcgtcaaccgcatgctggccgccgaagcctacaagatccgtctggaacggggcttatccttcatcgagttcaattaccagctcctccaggcctatgactacctgaccttgttccggacctacggctgcaccctccagatgggcggcgacgaccagtggggcaacatcctggccggcgtcgatctcgtccgccgggtcgagggagccgcggtcgaggcgctgacgtttcccctcctcacgacctcggccggggcgaaaatgggcaagaccgcccagggcgccgtctggctggacgggagtctctgcccgccttacgactatttccagtattggatcaataccgacgaccgggacgtcggccgcttcctgcgcctctacacgctcctgccgctcggcgagatccagcgcctcgaatcgctcgccggcagcgagctcaacgaggctaagcgcatcctggcctacgaggcgaccgccctcacccacggggaagacgccgcccgggacgcccgggcggccgcggccgccgccttcggcggctccggtcaaaaggacgccgcctcgctcccgacgacggccgtggcccggggacgcctcgaagccggcatcgctccggccgagctcttcgccgaaatcggcctggccccctcgcgcggcgaagccaagcggttgatcgcccagggcggcctctcggtcaacaacgagaagatcgattccctcgaccggaagctgaccctggcggacatcgggcccgacgggatgatcctcaaggccggaaagaaaaaaatccaccgcgtcgtcgccgacgattagccgcggattccccgtccgctggaacggccggccccggataaaacgctacccgtttttcaaggaggacgggggcgtcttgtccggcgggcggccgaagattttcgcgtagacatccgggtaagcgtccttgccgcagagaagcatcgcggccagggggaaccgggcccgggcggcggccgacatctcggccgcgagacggcggatatcccactgggcggaggcatcctcgcggaggcgggccagatgggtgagctcccggagattgagggcgagaagaacccggcggcggtgggcgttggtcagaacgtaagccgcggccgggccggcggcctcctttaggatccggtaagccgcttcggtccgcccgatgacgtcccggaaccgcggcgcttccccggccgcctcgatcgaggggggaacggtcaccccgaggccgggatcgtaagcctgggccgtcaaggtggccatccggtgtcttttgagctgggcgtaacaggacgccgacacggtcagctcgaacgtcagcccggcgtgctcaaaggcgcgcggcggaaggtcgtaaaattccatgcgctcgaaaacgcggaggaagagcgcttttttcttccgaaccggaagacggcgggcttcccgaaggcagcgggcgtaggatcctccccaagaagcgtgtaaaagagcggccaggacgcgctcgtcgccttcgggcgtcgcccccgccatgcggacggcggaagagacggaaccgctccggcggcttcgatcggccgcggcggacggacggctcccgaggctctcgacggcctcgtcccggaaggcctcttccgtttcggcgtcatacgccgcggcttccgtatagcggacgatcgagggcgcgacccgggccgcttccccggccaagcgaagaccgatcgcccggatctcggccgacggtttggcggccagccgccggatcatcagctcgaggttgcgggcgtttatcgtcaggccgatctgcccctcggtcgccaggccgacggcgtagcgggcgtcttccttggcccagccgtccagcaggaagtgatgtttcggatcggccgccagggcgggatggttttcaaaaaaaagaggccggagtatccgatagaggtcgtgataagccgcgttttgagcccggaccgtctcgacgaacaggtccccgaggcccgcccggacgatttcctcggggacgacgtaatcgtctccaagcttgatgtagcgctgggatttctcggtaaaggaacagaggcggaatttttcgatttcctcgatggccaggcggctgatccccatgaggtcgaaattgaaaacggcatgctcggccacggaatggtggcccatcttgaaaatgatcgccgcgttggaccgccgggccttttccacttcccgccgggcggcccggcggagctcatcagccgggcgggggtcgcgggaaatccgggcataggccgccgacagcgtttcaggcgtcaggtcgaggcggccggggaaggctcggagcacttcgtccaaagcttcccggtcgacgttataaccggccaggacgattttcacggttcggcccggccttgacggagaacctcgaaggcgatcgggcccgagctttgatgggatgcggccaagagaatctccttcttgatatcagaggggcgacggaacggcggccgccgggaagacgccgggcaaagcttcgccgcactgcggacaccggccgtttaagagccggttttccatcacctcgaacccgcgccggcggatgagcgtcgtccggcagcggggacagcgcgtcggctcgatttcccccgagatgttccccgtgtagatgaaacggagacccttttcccggccgatgtcggccgcccggcggagagtctcgatcggcgtcgggacggcttcccggtactcgtaatccgggtggaagcggctgatgtgccaggggatgtcgcggtcgacatcggccaggaaccgggcgatgtcgcgcagctccgcctcgccgtcattgaggccggggacgaccagggtcgtcacctcgacccaaatccccagccgccgcatcagggcgatcgtgtcgcagacgggctggagccgggcgccgcagattttccggtagctttcgtcgcggaagaatttgagatcgacgttggccgcgtcgagaaaaggacggatcaccttgaccgcctccgccgtcaggtaaccgttggtcacgaacgtgctcatcaggccggccgcccggccgaggacggccgtgtcgagggcgtattcgtaaaaaatcgtcggctccgtataggtgaaggaaaggctccggcagccgttggccacggccaggcggacgatgtcgccgggggccaagcggcggcctccggacgcgcggccgtcgatcgggcgcagctgcgaaatctgccagttttggcagaagcggcagcggaagttgcatccggccgcggcgatcgaaaaagccgtcgatccggggaaaaaatggaaaaacggctttttctcgatgggatcggccccggcgctcaccacctcgccgtacgcccgggtgacgagccggccggcccggttttcccggactccgcaaacgccgaaatggccgggatgaatctcgcagcggtgggcgcacaaggcgcagcggacggcgttgtccccggccgtcgaccagaggcgcgccttatggacgccggttgaatccccggtttcgtcgtcgaatgaaaaccgcctcaccatgatcccggcctctctccgccggttggacggatggtcatgtttttattgtagtcgaaaccgaagcccgcttcaaagccgccggccgcccggaggcgttcatcgcggccgcggcgacgatggaaaagggcagccgggccggagggggcaggccccgcagtccggcttgcgggcccggcagaccgcccggccgtggctgaccacccagaaattgaaatcgccccaatgcttccggggaacgaggcggaggagatcccgctcgattttcaccggatcctcgtgtccgctcagccccagccgccgggagacccggccgacgtggacgtcgacggcgatcccttcgtttttatgaaaggcgttgctcaagacgatgttggccgttttccgggcgacgccgggaagcgtcaagagctcgtccatggtcgccgggacctcgcccccgaagtcgtcgaggattttacgggccgctccgcggatgttccgagccttattgcggaaaaagccggtcgagcggatgtcgttttccagaacgcccggaccggcttcggcgtaagcccgggcgtcgggatatttcttgaacaatcccggggtgaccaggttgacccgcttgtccgtgcactgagccgaaaggatcgtcgccaccagcatttccagcggcgtccggaaatggaggaagggcttcggatccgggtattccctcttcaggatccggatgatttccggaaggcggtctgccgccggaagaggcgttccgtcctttcctttttcgcgggaactctccgctttcgtcatttcgggctcggggtcctcaaagccggatcatccgctcgatggcccgccgggctcgggcggcgatctccggcggaacggtcacccggggggccatcgtctccagggcggcggcgattttcggcagcgtgacctttttcatgttcggacataaggcgttttccttcaccggaaagaaccttttgtccggatggtcccggcggaggcggtgaagcatcccgcattcggtcgcgatgatcacgtcggcggccgcggaggccgccgcctcccggaccatgccgccggtcgagaggacgcggtcggccaggtccaggacctctggacggcattcgggatgagcccagaggacggctcccggatgccgggtccgggccgccgcaacgtcccggggaaggatgccctggtggacatggcaccagccgtcccaggcgatgatccgcttggccgtgcggcgctgggtccaagcggccaggttcttgtccggtccgaagaggatctcctcttccggaagcgaggccacgacggcgtcggcgttggccgacgtgcagcaaaggtcggcttcggccttggccgcggccgacgtgttgacatagaggacgacgggccggccgggatattgttttttccattcgaccaggtcttcggcctcgagcatgtcggccatcgggcagcccgcgccctcgtccggcaggaggacggttttatccggggcgaggagggccgcggtttcggccatgaaccggacgccgcagaagacgatcacccgcccttcgaccccggcggccttccggctgagctccagcgagtcgccgacgaaatcggcggcttcctggacttcgggccgctggtaattgtgggcgaggaggacggcctcgcgctcccgggccaggtcccggacccgccggatccacgaggaagggccgggaggcgccggcgacgcggtcatgaaattaccgttcgagctgcgccccgcagtgggtgcagcgggtttcggccccgttggtgtaaagatggcaatggccgcattcgacgagatcgaggtcgcaggttttgcaggaacacatgttcgggggaccttgcaccggcccgtcgcagtaagggcagtgatcgggggccgctccttccacggcccggccggcggccgcttcggcggccggtccggaggccgttccggccttccgggcttggtaattctccagggcggcatgcagggcgtccgcccccaggttggaacaatgcatcttgttcttgggcaggccgccgagctcctcggctactttctcgttggtgatgtccatcgcctcctggaccgttttcccgagggccatctccgagaccatgctcgagacggcgatggccgctccgcagccgaatgtctggaacttgatgtcggtcagccggtcgtccttgaccttgacgtagaaggtcatcatgtcgccgcaaacgggattgccgacctggccgactccgtcggcgtcggggagggtgccgacgttccgcgggttctggaaatgatccatgactttatcggaataaatcatcgacgggtctccttcagaaactcggtgtaaagaggggacatatcccgtaaacgctgaacgacgggcgggaaggcgtccatcacggcgtcgatgtcggtttccgaggtcgtttcgaccaaactgaaaatcaacgacccttgggccagggcgtggtccagccccatggccagcaggacgtgggaaaccttgagcgacttggacgtgcaggccgagaagctcgaggccgcgatccccttgaaatcgaggctgagcagcaaggactctccctcgacgaattcgacgcagaagctggcatgataaggaagccggtgctcccgggacccggtcgggtggacgcgctcgacccgccgaggcaggccgtccagaagccggtcgcgaagggccgtcatgcaggccgtccgttccggcatcgccgcggccgccaagcgggcggcctcacccatcccggcgatcgccggcacgtcctcggtcccgccgcgccggccgccttcctggactcccccttcgatttgaggaacgagcttcgttccctttctcagaaacaaggcggcgctccctcgaggcccgtagaacgcgtttccggaaaggctcagggcgtccacgcccagggcttcgacgtccagggggatattccccgcggccgcgacggcgtcggtatggacgagcacgccgggagacttggctttgaccgcccggacgatctcggcgatcggctcgatcgttccgacttcggaattggcggtcatcacggaaacgaggatcgtatcttcgcggagggcgccggcgacggcggccggatcgacccgtccttgacgatcgaccgggacgattgtcgcctggaagccggatttctcgagggttttgaccggattcaggacggacgcgtgctcgacggccgagacgacgagatgattccccttggcccgctgggcttgggccaggcctttgaccgcgaggttgttggcttcggtcccgctggccgtgaagatgatttccggcggggcggccccgatcagggcggccacccgctcccggctttcctccacggcctctgccgccgcctggccgtcggaatgaaggctttgcgggttgccgaatccggcctccaagaacggacgcattttctccagcacgccgggcgccaggggggcggcggcgatgtgatcgagataaacgcgtttcatcggcggccgggaaaagcgggcggttagagggagacgacttccttgacctccggaacttcctttttgaggatccgctcgatgcccatcttcaaggtcatctgggacatcgggcagccgccgcaggcgcctttcaagcgcaccttgaccacgccgtccggatcgatcccgaccagctcgacgtctccgccgtccatctgcagctggggccgtattttattcagagccgcttcgactttatctttcatggaattctccttgataaggtccccataatataatcgcttcgattcgatttttccagttattatttcctagtattcttataggctttatccacgccgatgtcaagccccgccgtccgggatcgatcgccgcggcggccaggcgggcggccggccgccgggattgttcccatcggggatgaaatcttcgcgagggacggccgggcttcgcgtccccccaaggcaaaaggagcgtccccgttccggggagccggatatccggcggctctcaaggacggcgacaggccgccgtcacgagcacttgttccagccgcaattgggacagacggggcatttctcgtcgggcagggtcgctccgcactgcttgcattgcgactggtacatgtcccgcgcgccgtttttcgccgccccgaaatgccgttccaggacccgggcgacggcgtccgggatcgaggtgacgagccccccctcggtgaaaatcggctccgatcccccgattcccttgagctgggagaccagttccttgggatcgaccccgcttcggagggccaaggaaagcaaccggccgatggcctcggcgtcggccatggtcgaatacccgctcttgccgatcgaggcgaaaacctcaaacggcttctggttgaagaacgtgatggtgatatagagattgccgaatccggtcttgatcttatccgtgaccgaggtcaaggtgtccggccgctcctccggaatcctcggggccggcccgcttgccttgaccaggacctgctcctcgcggcagccgtctctgtagatcgtgattcccttcgtcttcaggtcgaaagcccggagataggccgtttcgacatccttcagcgaggccgcgtggggcaggttgatggtcttggagacggagttgtcgacgtgcttctggaaggccgcctgcatccggagatgggcctcgggggagatgtcgtgggccgtgacgaaatacgccgggggctcctttccggggtttttctccgcccattcggcgtacaagggatggacatccttgagctcggcgtccaggatgcgggaggtgaaggtgaaggcgaagaccggctcgatgctcgaggaacagccggcgatccgggaaatcgtcccggtcggggcgatggttaaaaccgtcgcgttccgcatccggcggcccttgtagatcgacttggcgatgttcggaaagtcgccgcggattttcgccagacgggaggattcctcctcggcccgggcccggagaaacgccgcgatcttatcggccagggccaaggcctcgggggagtcgtagcggatcttcctcttgatcaggaggtcggcccagcccatcaccccgagcccgattcgtcggttgcccttggacatcgcctcgatctcgggaagggggtatttattgacgtcgatgacatcgtccaggaagcggacggccgcggcgatcaccccggcgaagcggtcccagtcgaacccgtcctttccggccggggcgaaaaagttggccaggttgatcgacccgaggttgcaggactcgtagggatgaaggggctgctccccgcagggattcgtcgccgcgatcggcccctggctccgcgtcggattggccttgttgatccgatcgatgaaaatcaatcccggatcgccgatcgcccaggccgattcgacgatcatccggaagatcttgcgggcgtccttgcggtcgacggcctttttcgagcgggggtcgaagatctcgtagctggttcctttcttgaccgcctccatgaaggcgtccgtggccgccaccgagatgttgaaattgccgacgctccggccgtccttcttcatcaggatgaagttctcgatgtcgggatggtcgacccgaaggatccccatgttggccccccggcgcgtccccccctgcttgaccgcctcggtcgccgcgtcgatgaccttcaggaacgagaccggccccgaggcgactccctgggtccggcggacgaagctgccgcgcggccggagccggctgaaatcgaagcccgttccgccgccctccttgtgcaccagggcggcgttcttgaccgcgtcgaaaatggattccatcgaatcctcgatcggcaggacgaagcaggcgctgagacacatgtcccgccccgccccggtcagggtcgggctgttgggcaggaagtcgcgggctgtcatgaggtcgaaaaatttccccgcccacgcttcccggtcccgggccgagcgctcagccgcggccaccgcccgggcgacgcggagaaagagatcggccggtgacgcgtcggcgagctctcccttctcgttcttgagaaaataacgggctttgaggatccgaagggcgttggccgagaatccggccgcggcggcggtcgtcatgggcatcgctccccgggccgggcggcggaagccggcgggcccgcacgattatcatattaaaatgatagtattagtatacgcctcttcgggcgatttgccaagacggccgccgacggtccgccggaacggagccttagaagcggaagccggccaggaagaccagcatattcgatttgaccgtgggatcgccttcctccgggtctttgacaagattggccaatcccaaatggtagcgaagctcggctacgagattgatcccgctgagagagatccccaggccgccgccgaaaacgagcccgtaatcgatcgaggcgacgtcgtccttgatgtcctcggagccggagtcgctgtcgccgcccccgctgatcgtgtagtcgtacttggcctgggcgacataagcgatctcgccgccgcccagaagatacgggttgattccctggaccgggaggttgaaccgcaggagaaccgggacgctgatctcgctgatccgcatcttcacgtcgaaatcagaccccgacagcgatccttcgtaccggattcccttgggcaggtacatcaagccgacgtccacccccaacaggcctccggaatagaacccgacccctcctgccaagcccatgagggattttttatactcattgtattcctcggcggggtcctcggaataggtcaggctggccatcccgtaggcggccatgatcttgaaaccgccgggataggttgtctccggcgccggccgccgctcgtaggacggcgtccgggcgggggccggggcgggccgaacgacgggctgggcttccggctggacggcgaggccggggccggaaatgacgtcgaccacgttggcgtggacgtaggcggtcaaggtgacgccgagatcgttcgtcactgaaatctcgtaccagtcgccggccgtctgagaggactcgaacaaggttcccattttgacttgcttgatgacggcggcattgaggtcgggttgggtccggatgttggccgtctgaaccttcaccttcaggacggtcgtttccgcggacagggccagtcctccgatcgcgagcacaagggcgagagcgacggcgatgcgtttcatgcactcctcccagtcagattccgtgtaggatcgggtcctttatgccatgactataaaaaaatagcaagggggaggaaaagcgggaaaaccgaaaaaccgatcagatcacccgccgggggatggccggattcagccgggcgaggatctcgtacccgatggtcccggccagggcggccagggcctcggccgagaccgtttcccggccgtcacggccgatcagggtgacgacgtcgccggccgccgccccgggaatgtcagtaacgtcgaccgtgaaaaaattcatcgcgatccggccccggacgacggcccgctttccgcggagaagaacgtaggcggcgttcgacaagccccggtcgtagccgtcggcgtatccgaccggaatgacggccagccgcgtcggccgggtcgtccggtacgagcacccgtacccgatgaacgcccccttggagaggcgccggatctgggcgatccgggcccgccaggaaagaacgggtttaagaacgaacggcctcctcttgcgaagccggcaggacaagtacgtttccttcgacggccagaggccgtacaacccgattcccatccggatcaggccgcaaagcgactcgggaaagacgatcgccgcggccgtggccgcgatatgcttgatggggatcggataaccggcctcccggacggcggccgcggcttcgttgaagagggccatctggcgccggggataggcaagcgaggtcgtatcctcaatgttggcgaaatgagaggacaagccctcgatttcgagaccgggaagacgggccagccgggcgaagaaggagaccacctcggcgaccgggaggccctggcggttcgtccccgtctcaaccttgacgtggatccgggccgtttttcccaggcggatggcggcggccgatatcccctcggccgcggcccggtcgtagacggtgaaccggagatcctgccggacggcctcctcgatccggccgggagcggcgggcccgagcatcaggatggggcagcctaacccggcttcgcgcagggccaggccttcctccgcggaatgaacgccgagccagtcgacgccggccgccagggcggggccggaggtttcgatcaagccgtggccgtaggcgttcgccttgaccacggccaggagcagccgcctcggcccggccagggcccggaaacgccggacgttggaggccagggctttgcgctcgatctcaatccattgccagaagcggccgtcgcatggcccgctcatcggatgcctcctgcccggcgtcggtcccggcgctcaggcgccggcgattccctttcggacggcggccaggtcgatccatcccgccaggagatcgtcccggaacagcgtctctctgcgctcgactcccgtcgatatcatggccgcttccgccccgatccggtcctcgacaagcttcaggaaatccttgaaaccggccggcagatccctgaattcccggacgccgcggaccggcgttttccatccagggaccgtttcgtagacggggacgaccttttccaggacttccgtttccaccggataatcgcggagcgacgagcccttgtagcgataggcggtgcagattttgatctcggggaactcgtcaagaacatcgggcttggtcatgatcacccggctgatcccgttgatccggcaggcataggcggcggccacggcgtcgaaccagccgcaccgccgcggccggccggtcgtcgccccgaattcgtcgccccgccgggccaggagcttgccggtttcgtcgaagagctcggtcggaaacggcccggatccgacccgggtcgtgtaagctttgatcactcccaggaccgcgtcgatgaccgtgggcccgacgcccaggccggtgcagacgccgcccgcggtcggattggaggacgtcacatacggatacgttccatgatcgatgtccagcagcacgccctgggctccctcgaacaagaccggcgttcccgcccgaagcgtctcgtggagaaggcgggacacatccttgatatagggcgccatccgggccccgtaatccgcgtattgggcgaagagcttttccggatcaagcggctccaagccccacagggcggcgatttcgttcttggccgcggtgttgcggaagattttttcccggaggagggccgggtcgcaaaggtcccccgcccggatgccccgccggccgattttgtcctcgtacgccgggccgatgccccggcaagtcgtgccgatcttcttttcgcccaaagccgcctcggcggcccgctcgagcaggccgtgatacggcaagatgagatgggccgtccggctgacggcgatcgagtcctcccccactggaacgacggacttcagagcttccagctcgtccaagaacgcccggggatcgatcacgacgccgttgccgatgaggcagagcgtccccggatggaggatgcccgagggaatcacgtggaggacgactttccggccgttgaggtagaccgtgtggccggcgttgtggcctccctggtagcgggcgaccgcgccgaaggccggagtcaggagatcgacgatcttccccttcccctcgtcgccccattgggtgcccaaaatgacaatgttcgccatgacgcgcctcttgatccttaaaaataaaacgccgcttgggcccggaacgtcgattgccaagcgtctccgccctgctcccgcccccggtcgacctcgaccttgatgaagatgctgggcgccggagaataaacgagacccagggcccattgcgttccgttccgggagagccccgcgccgggtgtgtccggaccggcgaatcccggcccgtggaagggatcttcggcccggaaacgccggtaggaaacaaccgggatccaggagccccagtgaagctcgacggcgccgaaccatccttcggccgttcccttggagaagggggccggattttcgatcgtcgcccgggcgtattcgcccgaagcccggatgttctccgtccgccaggaggcgtcggccccgaccatggtgaccgcccgctcgttggccgcgtcggccttgccccggtaataagaccccccgacttccagggaagcgcttaaggcggcccccaggcgccccccccagcccttgtttttattgttgtcggagtactgctggccggcgccgaaatcggctccctcggccaggccgtttccggcgaaaacggccgcgttgaaattgccgaacgaggcttccgcctcgattcccatttcccgccaattcacggggtaaacggttccgaccgccgggggatcggagatcagggcggtttcatggggccggcgggaccggttgtattttccgaagggaacgagaaagagaccggccgtgacgctgacgcccttggcgacggcgagccctgcccgggcttcggtcaagccgaccgcctcgccttgggcgaacgtcggctccaggatgaagacgaggcccggcgtaagagtcccggaaaagatcagccccccccggagattggccacgctccacgcggaagccggaaggcccgagggtccccggaggatgtcgaaggaaaaatagccgttgaccttgaggccggtcgagtcctgggcggcggccggtccggccagggccaaggccagggcgagggccgggagagcggcggacaagcgaatgtgtttcataagcgtttgaaatcaaatccgtcttcgaggatgtccgctttccaggcggccgcgttctttccggcggcgacggccgcggcgatctcggccgcgccggtttttgtccccatccagaccgccccggccagaacgccgtccttgaggacgatcttcttgtaaacgccggaagcgggccgggacagccggaattcctcaaagcccggcccttccggccggatgattcccgccgacaggaggggcaggtcggatactttcagctggttggaggggaccgtcccctcataaattttggtccggccgcagatgttctccgcggccgtccgcgactgggcgaacgaggccggaatgatgccgtagaggcggccgcggtgctcggttccgtctccggccgcgaagatatcgggcgccgacgtcgccatccggtcatcgacggtgacgccccggtccacggccagcccggcttcgcgggccagggccgtattcgggcggactccggcggcgaggacgaccacgtcggcgtccaggcgcgtcccgtccttgaagacgatcccgcgggcttcggactctccggtgatttccgcggccgcgacgcccaggagcacgcggaggccggtctcctcgagacgggccttcaggatttctccgcccggcggatcgagctgccgcggcagaagggaggggaagatctcggccaccgtgacctcggccccccggaggcggagggcccgggcgatttccaagccgagcaagcctccgcccaggacggcgacgcgcggatgggtccggaaatattccaggagagcccgggcgtcgtcgagcgtccggatggtgaagacgccgggcttgtccgccccggagatcggggggacggccgaagaggctccgtcggccaggaggaggcggtcgtacctaacaatcgatccgtcggccgcctcgacgcttttttccgaggggtgaagacggcggacggcggtgccgagccggagatcaatccggttcttcgccgcccagtcggccggaaaggcatagagcttttcctcgggcaggcggccggcgatgaattcgatcaggttcggccggggataatacaaccggttctcggcggcgaaaacgacgacggaagcgcggtcatccagatcgcggatggtcttggcggccatcgttccggccagaccatttccgacaatgacgacgttcatggagaagaaggcggccgccgctcagtcctcgactttccggaaatagtccttgcccaccccgcattgcggacaggtccagtcgtcgggcagggattcgaagggcgtgcccggagggattccattgtccgggtcgccggcggccggatcataaatatagccgcaagccgtgcattcccatttcgtcatcggtggctcctttcaaatgaatcgacagaggccgggcgctcatccttccttgaggatgcgcgcttcatattcgctttccaagcggaacttgtgcctcagctcctcgcggaggagcaattcgaacaggccccgggccgcggcgtccgaaacggcggcggccaaccggccgtagaggtcggccgcctgcgcttctttccgggcggcgcggatcagcacgtcctggaccgaatcgtccggcccggggggttcctccacggccgcgtcggtcagtcccaagtccggaaccgagggtccgcccgaaaagaccggcattcccgcccggtatttttccaggaggattttgtgccggcgctcctcggcttccagctcccgtaaaagggcgcggagaggctcggtccgggcggccgcagccagaccggcgtagaggtcggccgcttcctgctcgcggagaacggcgaaggcgaggatttcatccagggatgaaaaggccacgtcgcactctcccgcgaatgaagttggaaccggcccaggcattataacaattcagggacgcctcgctcaaccccaagccggcccgagcgattcgcatcctctttcccctcattccgggggcgtcccccaatcccgggccgggagcgtcgacgatcattctgaacgagaaccccccggaaccatcgcgggggaagagcggcggcttcccgccttcagcgtttttcgcgctggcaggacgggcaataaaacgtcgcccggccgccgacgacgatccgccggatccgccccccgcaccgaaggcattttttcccctcccggccatagactttatgacgagtctgaaagccgccgatctcccctccgatgctccggtaatcgcggatgctcgagccgccggcggcgatcgccgccgccagaacgcggcggagggacgcccgcagccggcgcaactcgtccggacgcaggcggccggccgcggtcaggggatgaaggcgggccgcgtggagggcttcatcggcgtagatattccccaccccggccaggacgcgctggtcgagaaggacgcttttgagccggcctctgcgggcggccaggcgggcggcgaattcttccgggccgatgtccagaggttcggggccgagccgccggatctcgtcgcaggcctcgacctctccgcgcggcaggcagcggaggaagccgaatttccggacgtcccgaaagcgaagctctccgtccgagccggcaaaagagagaacgaaatgcgtgtgtttcgagaggggacggccggcgttctcccagtcgaaccggccggtcatcttgagatggaaaagaagggcccggggaggcgcctcgaggatcaggatcttgccccgccgcctcacggccaggatccgcgccccggccagggcatcgagatcccggggctccgtcgcccgcaggagcttgggtaaaaaacagcgggcggccgcgacttcccggccgacgatcgccgacctcagggcggcggcgatggtctcgacctcgggcagctcaggcattccggtattgtaaccgatcccgccggagacacaaggccgtcattcccttttcgctcccggcgagatcccccgcccggccggccggagatccgggacacggctcttgtgtctctaaaaaaagactgctaagatgtcctccgtcatgaaaatcaaagccgtcgtcctgatggttctcggctgggccgtgcccggcctcggccattttctccagaggaaatacctccgcggggcggtctttttcggctgcctggcggccatgacggccctcggcctggcgctgggcggacggatctaccccttccaaacggaaaatcccctgacgatcctggccttcttcgccgacatcggcaacgggcttctctatcttctctcccgcgtcctgcccgtcgggatcggcgacctgaagctggcgacgttcgaattcggaaccgcgtacttggccggggcggggcttctgaatttcctcgtcgccctcgatgcttacgacatcgccgcggggacaaagtcatgattttccgcagccaccttctctcgatgatcctatatgcggccctcgtcgcggtcgtcctggccttcctccgccgggacgaggcaaaaagccgcctgaaatacggcctgatcatgttcggaggcatggccggcggggccgttttgttcggctggctgatgtaccttttcaccctgtgaggatggtataatcggtccggccggggcctcgatgatcgagttcagtcacgtttggaagcagtatcataaaccggactgggctctctccgacgtttccttcgccgtcgcggccggggagatggtcttcatcaccgggccgagcggatcggggaaatcgacgatcctccggctgatgacccgggagtgcccgcccaccgacgggcgcatcctgatcgaagggatggacatccgccgcatcccctccgccaagatctacgtcctgcgccggacgatgggcgtggtcttccaagatttccggctgctcgccgagcgccgggtcttcgacaacgtcgccgtccccctccgcgtcctcggcctgccgtccaaggacgtcaagcgcaaggttttcctcgctctccgcatggtcgggctccaccatcggatctggaatacgccggccggcctgtcctacggggagcaacagcgggtggccatcgcccgggcggtcgtcaacaatccccgccttcttttggccgacgagcccacgggaaacctggatcccgacctcgcctcggaaatcatcgccttgttccgggaaatcaaccgccagggcacgaccgtcgtcatctgcacgcatgaccgggaaatcgtccgcaagttcgccggccgcgttctggccctccgggaaggacggatgcgggagcgggggacggcgccgtgaacgggcggaagatcgggcgggcgttccgggacgccggggggcatctgcgccggggcaagacccgccacgccgtctctttcgccgtcctcgtcctctcttttctgatggccggcctctttctctctctttcgaacaacctccggagccgggcccggatcctctcccgggatgtcgccgtcgtcgtctacctcagtccgtcggccacggccgccgagcggcggacgatcgaggaccgggtccgcctgtcgcccctcgtcgcctcggttcggaccgtcaccccggaggaagcgggcgaccggtttctcaaggaattccccgatcttcgggacgtcctggaaaatctcggccgcaatcccctcccggcctcgatcgaggcgatcctgcgcgatccggccggtccggacgcgcccatcgaccggatgatcgacggtctccggcggcttcccggggtggaggacatccagttcaaccgccgctggtcggaccgcgtccgggccctcgggcggttgagcgacgccgtcggggtcgtcgtcggcggccttctcatcctgatgtccatcgccgtcgtctccggggcggtccgcctcaacatcctgagccggcacgaggaaatctccatccttcacctcgtcggggcgacgaacggctacatccggggcccctttctcctcgagggcctgatcctgggagtggccggggggacggtcgcggccggactggtcctgctcgcggctcgtctctttccgctctatctcggccattccctgggcgctctccaggatctcatcggcttcgagccgctctccctcctccaagccgccggcctcgtcgccggcgggggcttggccggtcttctcggcagcctggccgccctgggccgcgttttccgctcttgatcctcgccccggcccgatcaacgaattaacttccgtgaacggcttgccgcggggcagacagaaacaacgactgttgggcagccgagtccgccggccgaactccgcccttttatctccacgcgatgcgtcatagagccgccggttcattgacatcttccccgccggtgacctaaaatctcaacacatggccaccctgggacaagaattgcggacagagcgggagaagcattcgctctccctcaaggacatctccgaccggacgaaagtcgggctccgctacctcgtcgccctcgaggaggaccgctgggaggaaatgccccagaagttcttcatccggagcatcatcaaggcccacgcccaagccatgggcgtcgatcccgagcccttcctggcccgctatgaggaacaggagaaggcccgcttggaatcccccgggaacgagggcgaatctccaaaacgaaagaagcgcggcgcggaggccgggggaacgcgccgaattctcgtccccgccctcgcggtcctgctcgtcctcggcgcggccgcggccggatatctgcttttcctgaagcccggggaaaaatccgctccgccggtttcttcgacggagattccggccccgcagaccgaggccgccctgcccgagccggccgcggccaaggaacccgagcccgtcccggccgaaacgggcctccgtctcgagctccgtttcaacgccgattcctggatgcacatctcggccgacggcgtcgtcgtcctggacgggatcaagccggccggatcgacggcctcgctccgggcggaaagggaattcatcctccagacgggcaatgccggcggcttcgacttcaccttgaacggacgccaggggcggcccctgggaggaagcggcgtcgtcctgacggatatccgcatcacccgcgagaattcgaccacattcctccgggaggagaatccgccggccggcggcgccgtccgctgacgcccatggacgaaaaccagggccggcggcagaagaagggcacccgggtcgtcgtctcggtcatcctccttctcgtcatcctcttcttcgtcatcgacgtcttcctccgcggttcggccgaattctccccgggcaaggtcacctccattctcctggccgccctccagttcatcgtccttctgctggccttgatcctgttcttcgttctcggccggtatttggtcaagctttacctcgagcgcaagcaaaaggtcgtcggctcccatttcaagaccaagctcgtcatcttcttcaccgccctctccttcatccccacgcttctcctcttcatcttcaccagccggatcatcaacaacagcatcgagcagtggttccgcctcgatatcacccgcctggtcaaggacacccgggccgtggccgatggattctacgcgacgacgtcggacgagacctttcatttcgcccagcagctcgcccgggaaatccagcggtccgagctggccgaccccgcccggcggccgcgcttggaggatttcgtcaaggggaagctgaacgaataccggctggacgaaatcagcctctttctcgggggggaggagctgttttcccttctcaatccgaatcttcccctccaggactatcgggacctcaacgccgacgaggtccgcaaggcccatctcggcttggacctcaacgacatcaccccgatgggggcgggcgagttcgtccggcgaggggtgtcgttcatcgacccgaagatgggagcggtcctggtgacggccggcaaattccttccccagaacctaacgcagaaaatgaactcgatcatggccctcgacgaacgctaccgcatgcgggggacccagcgggatctgacgaagacgctctacaccctgaccttgatcttcgtcaccctgatcatcgtcttcacggccatttggatcggctttcatatcgccaagagcatcaccgttcccatcgaaaaactggcctacgcgaccaaggaagtctcgcgcggaaacttgtcgatcaagatcgaggatcccgcctccgacgaaatcgggaccctcatcgactccttcaaccagatgaccgccgacctgcggaagggcgaggcggaggtcgcggccaaaacggccgaagtggccgcccgccagcggacgatcgaaatcgtcctgaatgcgatttcgaccggggtcatcgccctggacgcccgaggcatcgtggcgaccatcaacccggccgcccgggagatgctggacctgccggaaaaaaacgcgaccgggcgcccctaccgggatctcctcgcctccgagcgctaccaggcgctgcgggcggccatcgagacggcgttcgtcaaccgggccaggatcagcgaccgcgagatcccgatgaccatgggcgtgcagacgaagaccctgtcgctgaacctgacgcctcttcgcaagccggaggaggacttctccggcttgatcgtggccgtggacgacctgacccagctcatcacgtcccagaagatcgccgcctggaaggaagtggcccagcgggtcgcccatgaaatcaagaatcccttgacgccgatccagctcaacgccgagcgcatcatccgcaatatccacaagggcgatccgtcgggcggcgaggtcgtcgccgaaggcgcccgggtgatcatccaggaagcccagacgatcaaggctctggtggacgagttctcggatttcgcccggctgcccaagatccatctccagccggcctcccttggcgacatcatccggcaggtcgccaatctcttccgggggatctacgccgatatcgtcttcgagatccggatcgccccggatgtcccggccgagatccggctcgacgccgagcagatcaagcgggtgttcatcaatctcatcgacaacgccattgacgcgatgaataaaaaaggtacaatcactcttcaagcggattacgaccgcgattcccgccgcgtccgggcgacagtcacggacacggggccgggaatctccgtcgaggacccggaaaagatcttcctgccgactttttcgacgaagaaaaaaggccggggcctcggcctggccatcgtcagccaaatcatccgcgagcatgacggcctcatccgcgccgaaaacaaccggccgatgggagcgaaattcacgatcgagctgcctgcatgagtcaagaacgcgttctggtcatcgacgacgagtcggccatccggtcctctctccggggaatcctggaggatgaagggtatgccgtccgaaccgccgcctccggagaggagggattggcggccctgtccaaggaaagcttcggcctggtcattctcgatatctggctgcccgagatgaacggcctcgacgtgctggccgagatccagcgccacgaggaccgtccggcggtggtggtcatctccggccacgggaccgtggaaacggcggtcaaggccgtcaagatgggcgccttcgatttcctcgaaaagcctctgtccctggaaaaagtcgtgctgaccgtccgcaactccctcctccgggcccggctggaggaggagaacgtccgcctgcgcgagcgtctggccggacgcaattgcctggtcggcaaaagccccgcccttcagaacctccgggccaagatccgggcggcggccccgacggacggccggatcctcatctccggcgaaaacggaacgggcaaggagctggccgcccgcctcattcatcagcgcagcccgcggcgggatcggcggttcgtggaagtcaactgcgccgccctccccgaaaccctgatcgacgcggagcttttcgggtgcctcaagggccacggccccgacccggccaaggaaaaaaagggaaagatcgtccaggccggaggcgggacgcttttcctggaaggcatcgagaccctgaccctccggacccaggcggctctcaacctggccctggcgaagggatccttcgagccgctcggcggctccgagccggttccgttcgacgcccgggtcatcgcctcgaccaaggccagcctgggcgacctcgtccggcaagggcgcttcaacgaggacctgtttttcaagatcaacgtcattcccctgacgctgccgccgctgcgggagcggcttgaggacatcccggtcctcatcgcctatttcttgaggatctattgccgcgaatacggccggatgcccaaatccatccatccggaggcgctccaggcgttcgtcaactactcttggccgggcaacgtcgccgagttgatgaacgtcctggaacgtttcgtcatcctcgtcgaggatcaagtcatcggccccggccatttgaaccttctggtcgaaacccgcgagcaaggaccgatgccggcctcccggccctccttggctgaagccgtccggagggccgagcgcgaggccgtgcaccaggcgctccgccggcaccaatgggatgaaatgcgggcctcggccgagcttcaaatcacgccggagaatctccgggccaagatccgggacctgcgcatcaccttgcttccctgaggccgcatgccccgcgatcaggccgaagccatcgtccttcggacgtttcccttggccgatcaggacaagatcgccgtttttctcacggccgagcggggcgtccttcgcggcgtggccaagggggcccggaaattcgcgaaccggttcggcagctccctcgagccgttgtcccacgtcaccgtgttcttttacgagaaggaacggagcgacctggtcacgatcagctcctgcgacctccgcgaatcgttcttcgacgtcttctccgatccggcggccggcttcgccctgtcctacatggctgaattatccgaggaattcgttccggtccgagcccgggagaacctggccttccgcctctttctctcgatcctccgggccgtccgggacaaggtcgacgtccagatcctgacccgatatttcgaagcctggctcctccgtctcaacggaatcctgccggacatccggcgctgccgcctctgccggcgggcgatcgaggatccggccccggcttggctgtccccccgccgggacggcgtattctgcgacgcctgcgcgccctcgcggaaggaagagatccgggaaaacctgggccggttcctgtcctgggtccgggacaacccgccctccgcctgcgcctccctcccgttttcgtccgaagaaatccgctccttcgccggcgccttgcaggcgatgatcattttccacctggagcgggagccgaaaagccgtcgctggcttcaggctgaaaacgggctcagcggacgtaaagaataaaaacgacggaggcgatccaaaggatgatggtcgcggccagcggcttgtcccggaagatcatctcctcgggattccccccctgcccccgctggtggacgaggtaaagataacgaaacaggccgtagaggacgaacggcatggtgaagatcaggttcgacgtcccgaatttgcggaccgtctcctcggaaacggtgtagaggctgtaggcgatcaccgtcgaggcggtgacgaccgaaatcatctggtcgagaagaagggggctgtattcccggagaatggaccggtggagagacgcgtccgcctccaggaagacgatctcatgacggcgcttgccgaaaccgatgaagagagccagaagcgaggtgcagatgatcagccaggaggacaggggaacgccgaggaccaccccgccggcgacgaccctgaggatgaatccggaggcgatgaggaaaacgtccaggatcaccacgtttttcagccggagcgagtaagccagcatcagggccgcatagaaggcggccacgaccgccagccgcggacggagaacgaacgctccggccagggcggcggcggccaggatcacggccgcggccagcgcccgccgcgtcgaaaggcggccggaggcgatgggtcgaaggcgcttcttcggatggaggcggtcggcggcgagatcgcagacgtcgttgacaagatacatcgcccccgacagcaggcagaaaacggcgaacgccccggcggcccgcaggacggaggagccgatcaacgcttcccggccgaacaggagggcggcgaagacaaaaagatttttcgtccattggcccggacggagggatttcaagaggtcgcccatcggaagctcgtttgccgcggttattatatgccagccggccgcaaggcgcaaaggcccccggctcttttcaatctccgcgcttttcgctatagtggacagcctcggagggcatgcatgagcggcggaaaaacgaggacgatccggacggcttcgacggccgtcttcacggtcctcgctcttcttcttgtcttcaatttcgccgatcagtccctccagagcccgctgctcgatccgctcttgtccgattttttcgggcggacggccgacatcgtcccgctcggctgggtgacgttcgtcttcactctatgcgccgcggccgcgaccatcgccgccggcctgctcgccgggcgcggctcccgcctccgtctctgcctggccggctccttgacgtacggcgcgatcgccgtcctgtccgtcctgatcccccacggccggacgggatacgccgtcttttttctcgcccgggccctggccggtttcggaatcgggctgatcgttccctcggttttcgccctggcctcggacctcgtcgccgccgatcgccggtcgacggcgttcggcgtcctctcggtggcgatgctggccggccgcctggccggcttcgccgccggcggcgcgttcgccgcgaactggcggaccgcctacgccctcatcggggcgatcaatctcgccctggccgcggccctcgcctcgctccgagagcctccgcggggaatccgcgaacccgagctgcgggaggcgattctggccggggccgtctaccggttccgctggacgcggaaagacgcgggcgcgcttcgggccgccccctccaacctctggctgatcttcaatttcgtcgacgtcatccccggctcgatcatcctgttcctgatcttcaaatacatgaaggacgtccacaacatggacgccgcggccgtcaacgccgcgatcaccgggatcttcgccgccggggcggccggagcgatcgtcttcggccgggtcggcgatctctggttccgccgggaccgtcgggccaaggtctggacggcgctcctctgcaacgccgtcccggccctcttcatgatcccgtttttgacctcccgcgtctggatcccggacggggcgggcgtcggcgaaacgttcgccgtccccggagcggccggactggccgcctggatcgcggccgccgtattcatcaaccagggcgtgaatccgaattggtacggaaccctgaccgacgtcaacctgcccgaacaccgggcggcgatgatctccttcgcctcggtgatggacatggccggaaacgccctcggcccgctttgcgcctcttacttggcgacccgtttcggccttcggacggccatggccgcggtcctggccttttggattttcaatgtttttctctggctgccgattctctcccgcgtccgccgggatctcgaccgcgtccacgcaattctctccggccgggccgcggcgatgaacgcccggccgaaggatggtgtttaagcccatgaaaccgatgctcgttctcttcaacccttcctccaaccagggccgggccgccggcaagcgggggattctccaggccgctctcaatcgggccggcctcgaacacgcgttcgtcgtgacccagagcgcgggccacctgcgccggctggcccgcgaggccggccgggactataggatcatcgtcggggccggcggcgactccacctattcgatcatcgccggggaaatcacggccggacggacggacgccgtcctgggaatgattcccctcggctcgagcaacgacgttccccgcgaattcggcttggagcggatggaccgggccgtccaagctttaaaagaaggacggacccgggcgatcgacctcggcctcgtccgggccggagaatccgtcctgggctgtttcctcgggcaggccaacgtcgggctgggggcggttgtcaaccggcgggtcgcccgcatggccgagcggaggaggaaaacggcccggcggcaatgggcggccggttatctggctgtccgggccgctctctggtcgcgggaggtgccgctccgcctcgacatcgaggacggcgggccggcctattccggaaagattctggcggccgtgttttccaacatccgctactgggcgacgggaaaaatcatcgcccccgaggctcgaaccgacgacggccttctcgatctttgcctcatcaagccctgccgttttctccgcctggccgagatataccgcctggccgggaaagggcggcatggacggctccgccaagtcgagttccggcaggccggtgttttccgtctccggtccgaggttcccatggagatccaggccgacggagacatcctcgggacgaacgacggccggacgagattcaacgacttggagatcgggatccttcccgccgcccttcaaatcatcgggtgaggggttgttcgacgaggacgacggcgcgctgtcgttccggctggaccgggagagcccctattccttccactgccgacgctgcggcgtctgctgcgccaacaagcgcctgatgctttccccctccgagcggaagcgcctggccgtcttcctcggggtgccggaagaacgcttcacgacggattttctcgactcggaatcgggggagctgctctccgcctccaacggagactgcgttttcctggaggccggcctctgccgcgttcatccggtccggccgctcgtctgccgtctttacccgctgggtcttctccgggacgaaacgggccgcgagacgttcggggtcatgccccttcatcccgactgcttgggattcctgggaacggacgggaccgtcggcggcgacctgaacgcccaaggatccgacgttctcctcgagcaagaaaaagaaagccggccggactgagtccggccggctgcggcgatccgcccgaaggccctactgaacgggaaagacgatctcgaacggcttttcgagctcgtagacgtccagccggagacggagcatccttcccttgatccccccctcgggcatcgggaaataaatcatgtcttccaggtacccgtgcgcccggattttcaccgaatcgatcacccggccgccgccctggacttgggggaaaaagcggctgtcggctttctggtaataggagaagccggtcaagagcgtgtcgcccatgatcccggtctggctctggaacttgtgatccggaacgagcttgtcgtaattccgctcgagctcgacgacgcccggcatggagtaaatccggccgttctcatccacgaggaccagggtctcccggtcgacaatcacctggccgaggcgcttgttggcgatcttgatccccagggggaaatacgcctcctcggtccgcttccgggccatctccacgtcgacgacgatggccaaatcacggctctgccgcatataggaatagctcccgaccttcgtgatttcgatcgtgttcggatcctccgggaccaccggagcgcaggccgcggccgtgattaccaagaccgcggcgacaaagccgcgcggggagcaaagcatgaccggcctgttattcgaccacgaacggcgcggtcttctccacgttcttgccggcgatcttgtccgtgaccctgatcttgaacgtgtacttgcccggcttgagcggcgagagggggacctccgttccgcaggccacggccatgttttcctcgaccttggtcttgaccgtctggggattcagccggtagccggcttcgtcggagatgatgaagtaatcgatcgacaggtcgagcgcgccgtcctgggttttggcgttgtaaacctgatagaggacgctcagaaactcgctcggcttgaaggcgttgccccagcgcggggcggccttgtagtcggtcgtgacaaaggggctgaattccgccccggcctcttccttgggcttggaaatgacctgggagctgaggatgagcgagctcgtgttcagctcatcgttccagaagttctgcacatccagatcggccttcaccagggtgtgaagctccttgtccttgtcctcggcgccgagataaaggaccgatttgccggccttggccggaaagccgaagaccgccagcattatgtcggacttgtcctgatcgagcttgagcggatgcaggaattcctgaacctcctcgccttccccctggagacgtccgaagaacgtcacgtcccggagttttttccggtcaaggccccgggcatcgatccggaccaggaaggagacgtacgtgctgccgctcatcgcccgggtgtaaatcggcgtccattccaggggaatctggttgatttcccggccgccggcgatgaattcattgatcagcttcccctcggtcgagctttcatccagggaaaacttgtacatgggaagctctttgaggtcgggattgaaaatgacgactttggaaaagatgtccaaggcatggcggacgggctggggcgtcatttcgtccaggtcgtagccgaactgctggttcaggaaagtgaccgtgaactcgctgttcaatccaagggcgggcatgggctgatacacccaggtttccgggggccccatgatctgggagccgccggccgattccggcctcacctggcccgatccgcctccgcggacctgggccggagggccgaaaatcatgtagacccggcccatgtccgtatgccaccccttggcgatcgagcccttggagtacgtcttgttgacgtattccaagcgggcgtaccattcgtccttgaactcgttggccttgtcgaggggcgacggatcgcgcttggcccagaacaaggcgatgaacttgtccttttcctcgtcggttttcagcttcttgaacgcggattcttcctccgacgtgatgagaagcttgacttcttccttcatccaattctcgtacttgtcggcttcctttttcttcgcggctccggccggggccgtgtataagaaagcgaacagggcgagaaaaacaatgctccaaacggcatatcttttcatgaacgcctccatggattaaaggatggattccgttaaagaagaatgctagcacaccccggaacgattttcaaaccggcgaatcaggccgtctaaaatctttccgacgggcgatatgtcttgccgtttaaaatatcttgccccggccggacaagagcggcggccgcggaaaagcgcctcagcggaggcgcttttcccagtcggccagggctttccgggcttcggctttccgcgtcgtctcgccctccggcgtcttctggaggtacaggcgcagatgcttggcggcctcggccagcttgccgacgcgctccaggatgacggcgtagttgaaatgggtctcgggcgagggagagatctccaccgcccgggccaggttctcttccgcccgatcgagcttgcccagggaggtatagatgacgcccaggtccaagtagatccggaaatccttcggatcttcccgctttagggcttcgtcgatggccgccgcctcctccccggagcccgacgccgccagagcgtaggcatacttcatgccgaccatccggttttcgggttcaacgtccagggccgttttataatatttgacggattcggcccaattgccccgggcgtcctccacggcggcggcgatgaccagggcgtcgaaatagcggggatccatccggagggccgcccggctcatgtccagcgcttcctggagcttgccgagccccatataaaaatgagccagccgggaatagagggggaaggcgtccggcagccgggtcaagccctgctcgaggaccgcggccgcctcgggcaggcgtttgtttttcgaaaggaaaatcgccaggtccaggtagcgccaggcgacgtcgggggccaggcggaccatttcccggtaatttttctcggcggcggccatgtctccgtcccattcgctctgaacggcggccatcaggatgcgaaactcgcccatcttgtccttcgggtcgggaagaggccccttgggaagcttcaccgcgccgtcgccgccgacgtagccgagcgaccgcaggcgttcctcctccaccaggctcattttccgccggctcaggaccaggttcgaggtgttctcccggagaacgtcgtcgaacttcttccggagggccgcggccgtttgcgggtcggactcgtaaagattccgattttcgtccttgtccgttttgatgttgtacagctccggccggggggcccggatgtatttccagtccttgtcgatgaccccgacaagctccgaccagccgtacgtctccagggggtaatagctttccaggtaacaggtgagatcatcggttctcttcccctcgatgaaggggaggaggctcgcgccctggacattcttgacggaaggaagcttcaccaggtccaggaccgtgggcatgatgtcgatcagccggacgcgggcgtcgacgaccttccccgccggaaggtttcgcggcgcgaataaaatgaagggaatgcgcatcgacacatcgtagatcagcacgccgtggtccacttcgcctttttcccccagggcttcgccgtgatcgccggcgatcacgatcagcgtcttgtccaggaggttcttttccttgagcttggccaaaaccgcgccgaaggcatgatccatcgaggcgatttcgccgtcgtagggatctccggggaactgctcccggaacggagaggggggacgatagggcatgtgaggatcgtaatagtggacccaggcaaagaatttcgctccgcccaggccgtccagccagccgatgaaggcggctgacgtttccgcggccgaccgttccgagcggaaggtcttgatcatttcgtcccggccgtacgtgtcgtcgtagacctcgaatcccttgtccgttccgaaccgggaatcgacgttgaaggagctgacgaacgccgccgtccggaagccgttctccttgaaccgctcggtcagggtgagaatctcggggttgagataataggtcccgttgttgtggaccttgtgatagatgggatacgtccccgtcaggatcgagcagtgggagggaagggtcatcggggtagggcagtaagcgttggcgaaccggacgccgccggccgccagggaatccaggttcggcgtccgggctttggcgaatccgtagcagccgagacggtcggcccgggtcgtgtccagggtgacgagaaggacattgagaccggcgtcctttttcaccttgtccgcggcccccgcggacaggaccaggccgatcccggcggccgccggaatcaagaggaaggaggcgatccggcgcttcgaccgtccgagccggccgtttcttttcttgcgtattgacatcgagacatcctcaaggaaaggggatcccctattccttgatccgcttttcccattcggccaggactttttgggcttgctgcttccggggggtgttgccctcccgcgtgttttccaaataaagcttcagattgacgacggcctcgggaagcttgccgacccgttccaggatggccgcgtaggccaggtaattgtcgggattggggctgtactcgaccgccttggcgaggttttcctcggccaggtccatcttcctgagcgccgtgtaaatgacgcccagatccttgtagatccggccgtccttgggatattccgatttcagcttttcgtcgatcgccgcggcttcctccccgcgtcccagggcgcccagggcatacgcgtatttcagccgggtgaatttattttccggctcgatttccagggccctcccgaaaaagtcggccgaggctttccaatttccccgcatgtcctccgaccagccggcgatgaccagggcgtcgaaatgccgggggtcgagggccaaggtggccacgctcatctcgtaagcgcccttgaaatcgccgaccctcatgtaaaagctggccagccgggacatgaggacgacggagtcggggatccggtcgatgccggtcttgagcaccttgatggcctcgtcgaagcgtttctgccgggccatgagaatggccaggctgatgtaatgccaggagacatccggggccatatcgagaaccatccggtagtttttttccgattcgtcgaggcgcccttcgtattcggccagcttcgcatcataaagaagcttgaactcgttcatccggtccttgggatcgggcagaggacccttggggatttttaccgaggcgtcggagccgacgtagcccagggaccgcagccgttcctcctcctcccggctcagctttctccggcccgcgtccgccttcgaggaataatcccggatcgcggccaccagcttcttatccagcgcggcggcggttttgccttccttcgagaagagattcgtttcctccagggcgtcctgctcgaggttgtaaagttccgagcggggcgcctggatatatttccagtccccgtcgatgaagcccagaagctgcgaccagccgtaggtttccaggggatagtagctttccaagtaacacgataaatcatccttccgcttcccctcgatgaagggcagaaggcttgtcccctggatttccttgttcgccggaatcccggcgacatcgaggatcgagggcatgatgtcgatcagacgcacccgggaagcggagacctgtccggcgggcaggaccttcggcccgtagaaaatgagagggactttcatcgtcacgtcatagatgaagatgccgtgatccagctcgcctttgtcccccagggcttcgccgtggtcgccggcgatgacgatcagggttttgtccaggaccttcgtctccctcaaccggtcgatgatccggccgaagtgatgatccatgtaggcgatttcgccgtcgtagagatccccggcgaattcctccttgtagggggacgggacgtcatggggcatgtgcggatcataaaaatggacccaggcaaagaatttttcctgggcatgccccgcaaaccaggacaggaaggcgtcggccacctcgtccgcccgcctctcggaccggaacgtcttgagcatctcgtcgtcgctgaactggtcgtcatagaagtcgaatccctggtccaagccgaaccgggagtcgacgttgaacgaggcgacgacggccgacgtccggtatcctttttccttgagacgctcggccagggtgacggcctccggacccaggtaataagaaccgttgttgcggaccttgtggtaaaggggataagtcccggtcaggatcgaggcgtgggagggaagggtcaggggcgccgggcagtaggcgttggcgaaccgcacgcctccggcggccagggtgtcgatcaccggggttttcgccttggcccagccgtaggcgccgatgcgatcggcccgggtcgtgtccagggtgaccaggaggatgttcaagccgtcgtcccgccggaccttgccttgggggggggcgccggagagccgcacgccggccgcggcccagaggagaacgacaaggaagacgaggctgttatggggacggacgcggccggacgaccgtcccggaaaacgcttgtgattcgtcatgtcgcgcatacgttgaatatagcaaagatcgagccgaaaaaaaaccccgccccggggttgaccggggcggggttttgaactcgtgcgtggtgcttgtgcgcgtgccttagaacatgatccggagcgagacctgggaggtccggcggccgttcattctcgtcgaaacgccgaagtcggccgactgccacgtggtgcgaggtaacgcccagaagtagcttctgagcaggttgaagacctcgaaaatgccctggatggtgaattccttgccgccgacgttcaggacccagtatttctgcagggcgatgttgatgttgtgggtcgggaaccaccggaactggttccgctcggcgaaggtctggtcgtagtagctcaagtcgttcgggccggcgggcttgaccgggatgccgaaattgctcttgtcccaaccgggacgcccgttggtccaagtgatgatgtcggtgtcgtcatcacccagccacagcggccggtcgttgttgtcccagtcatagttccaatcgtaagccgccgcggaggccgcgatggtgaacggcgcgcccgaagtgatgtcgaagttgccggcgatctgccagccggcgatgatgttcttcaggagccagttgtcggagttcttgaaccaggggatgtcgtagacgaatccgccgacgacccggtgtctccggtcgaactgggcgaagccgtactccatgtcgatccgctcattggacacggcttccatggaggtgttgtcgccgaagtagtcggagttctggtcgtaggcatagccgaacgtgtaggcggtgtaccaggaccagccgtcggagaatctcttgttcaacgtgaccgtcagggcgttgtagtcggactcgaggttctgggttctcaggttgacgcccgtgatcgcgcagtaggggttgatgccggtccgggtattgtcgagcttgtcgccggtgaaccggttgggccgctgaatcgagccgaggttggctccgtgagagccggtgtagttgatctcgatcgagacgttggaggacagctctctctgaatgccgaacagccagttataggccttctggggcttcagatcggggagcatccagcggaggctcgctccgtaaccggacacgttggccatggggacgaccgcgggataagaaacatcgatggccggggagccgtccaggatcccgaggaggccgacgaatgtgaagtcgggatagttgaaccggtcgttctcataggtgttgttgaacgtccggtcgtaggaaatgccgaagccgccgcggagggacgtcttgccgtcgccggtcacgtcccaagcaaagctgactttcggggcgaacgccaggtagtaggggttccagaggcccttgccgaggagctggcggccgtcgaaaatgagatagcggacgccttcctcgccctcgacgccctcgatgacctgcttggaatcaaagccggccttggtgccgaaagcgggcatgttgatgcccttgccggatttctcctcggggacgccgtagtattcccaccgcagtccgagggagagggtgaaccgctcggtcacccgccagtcgtcctggacgaaaacgccgccttcgaggccctgccattttctccgggaatcgccctgtttccactcgccgtacggatcgcccttgacataggggttgtccttcggcggatcgggcggatcggcgccgatgtacaggtagtaagcgccgaggtcatacaggaaccaggtcgaatcgaagaagtaataagctcccgcgacgttggcgtcaaacatggagtcggaattccagagacggagctcgccgcccaccttgatgctgtggttgccggcctggaagttcaggacgtcgaccagctgataggtgttgttggtgaattcctggggcatgttggcccagtcgccgatggcgtggacgccgtcgttgaaataggtgtagccgccgagctgaggaatctcgggggcgacccgtttccaatcggcatagtctctgtggtagcccagccggacttcgttgtacatcgtcgggctgaagagatgcagccacgtgaggccgccggtgtggtaggcataggggacttccttgatgttgccgggaacgttggcgaaatcccacttatcggtgtaggtgttgaacagccaccggacggcgattctgtccttctcggagaagatgtggtcgatcttcaagccgccggtgtagccccggtacttgccggtgccgtcccaaatataccggccggcgtcgatcgagccgtccccgtcgacgtcgatgaaatcatacgtcggaacgggatagttcgagccgactttgtcgaagaagaccttggcggtcgggccggccctcttgatggcgtcgggcgtgaagaaataatacggcgtggcgctgccgtagttttccatgacgccttcgaacgtggcgaagaagaacgtcttgtccttgatgatcgggccgccgatcgtcgccccgtactgggttctgtcctgctcgatgtaatcgtgggtcagccagtcctcgctggagaagaatccgcccgttcccttgtggaacacccaggcgcttccgtgaagctcgttggttccggacttcatgacggcgttgatgatgccgccggagttgcggccgtattcggccgagaagttgttcgaaaccagacggaactcctgaatcgcctcgggcggcatgctggtgatgttgccgctgccgttggccgtcccgttgtcgttgttgtcgatgccgtcgatctggaagttgttggacgatcctctcatgccgttgatggcatagccggaccggcccgcgccgggaagcgttcccggagcataggcgatcagcgacgtgtagtcgcggttgccctggggatagctcaggaactctttctcggtgatgaccgtggagacctgggcccgcgtcgtctcgacgagcggggtgactccgatgacggtcacttcctcttcgatgtcgccgatttccaggtcgaagttgatcttcacctcggcgccgatcgaaagctcaaggccttctttgatcagggttttgaatccgggcagggccgccgtcagggtgtatttgccccggggcaggcgctcaatccggtaaaagccctggtcgttggtgatcgtcgactggcttaagcccatatccaggttcttggccgtgatggagactccgggaagcggagtgccttcggtgctgtaaacagcgccgataaacgtgccatagtccttggattgcgccaagccgagggaggtcaccatgaggaaagcagcaaataggattgtcagctttctcaaattcattcaaattcctcctcggtcccgatgactcgggatttgttttttccccttctcgcagcggctgaatatggattgccgcggcggaaacaaccaaccgttttttcattcgcgcttatccgtttaattatcacctcctgaaaatatattttcgagttcatattactctctttttcgatttactctcttcctcgatctaggatctagttctttttaatgcaatatccatgccattttttttcgtcaataaatcgcccataaattgttgataataaatataattataaaaacggggaataacgctttaaaaagcgcgattcaataaattggatatatttcaataaattggatttttccagggggaggccggacggacgcgatctacttttcgattttaaaagcgatgcgtttctccgccgtcttccctgaaaaaagatccccgacccgcgccagcagcacatagcttccgggcgggagggatcccaggctgtatttgccgctgctgtttaaaggtccggccgccttttgggcgatcgggaccttcagttccgggatgtcgtcgatcacagccacaagcttggtcccctgccagatctgattttcgatccggattcgggccgtgccgctttcctcgtcgtaagtcggattgttgatctggtagaagaagatcaaatcgccgcccggggcgatcgccgccagagtgttgggattgacttccaggttgccgaaaaggaacggcccgctcttctggccggacaggctgagcttgtcggggactttcaaattcgtcttctccagggctttgagggcggggatgtcctgaaggttcatcggcgcgtcctgggtcttgttctccactcttcggacggcccgggccaggatgatgtcgctgagactcagatcctccgccgggaacgccgggacgtcgatccagcggtcgacgtatccgacattgctgttgtactcgtcccaaacgaccatgtggaggaaatacttgcccggcttcaggctcaggctctgcttgtattgatagaagtcggcgtatcgtctccgatagctttcttccttgagattcatctccaagcggtcgctcgcttggaaggccgtccctttgtcgtccttgacctcgatgtaaaaattaaccatgccccggtaccggtcctcgaccgggcggaaggccacgtccttggccgcgatctccaggctgatcggaacgagagtcattccgtcgccgcccgccaggaagctttcccgggcatgaaacgagaggccggccaaggacggcttggactcgacgatcccccgcagccgccggagccgctcggaccgctccaattcctcgagcacctctccccgcgacttggtcagctcggccatgacctggagctgctcgatggcgctctgcatgaactggccctggcccacctgggaggccgtggtcgccgaataggcgtgcccgtccttcaggtccatgtcgccgtagccggcgtagcgggcgggcagggagacgttcctgagggcgttggccagggcgggattggaggtgagctgccaggatcccgcgctgtagtaattgacgaaggtgaaatccacccggccgatccgctccttcaatccggggatctcccggtatgtccagacctcggccggaaattcggccgtcggggcgttcacgcccagcaggaaaccacggccgccgccgggattcgtctcgaagaaatcgggggggccgaacatgatatagacccttccccggtcggtccgccagccggctttcccttcaaaatacgtcttgttggcatacgcgatccgccggtaatgctcctcccggaattcattgacgggggtgtctggggtcgggtcgcgccttttccagaacgtcttgatgaagccctcccggtgttcgtccgtcttcagggatttgaaaacgtcgcgctcgttctgggagatgatgtagatgacttcctcgttgagccacttctcgtatcgttccggcatcttgccggccggctcttcttttttcttttccggcgtcttggggacctgggccgacggatcctgcccgaaggccgctccggagaggccgaacgccaggacggcgagcatcgccggcagtctccttccgcgggtgttcttcatcatcgtccgacctcccaaacttctcgttcgcccgtttcgttgcggcggaggatcgtccgcttcggtccgccggagcgtccgcccggacttggttccgggtttatttcaaataggccagaattctcctggcgatatccgcgttgggctcgtcgggagccagctcgatgtaccgttccaggttttcgacggcttcgggctttttattctgattgacgtagatcattcccaactggtagtaagccggagcgtaatccggcgtcagctccttcaccttgaggaaggccgcctcggccttgtcgtattcctggaggttcaagtaacaggccccgagattgtagaaagcatccggatcattcggggagagctccgaggccttggcgtaatagggcagggcgccctgatagtccttggcctcgccgaagagcgaacctagatttttgttggcgctgtagctttccggctggatttccagcattttcgtgaaggtcgcgatggctttctcgttgttcccgatcttcatgtaagtcgttccgaggttgttgagataggtgggctcgccggcttccttgccgatggcggcctcgtaagcggcgatcgcttcctcgtacttgccggcctggaacagctcgttcccctgcttgaaatccttctcgccgggcgactcccccccgacgtaataattgccttcctccagctcgagattaacctcgagcacgtcctggatcctcacctgcttttcgacgaagatcgggaaaaagccgtctttctccgccttgacctggtagtaatccggctgaagcccgatctggaagtattcgcccttggcgttggtcttgagggtgtatttcacggccgaatactggagggagacgattgtgatcttaacgccctcgacaacattcccttttttgtccttgacgacgcccttgatcgtcccctggacgccggcctgggcatcggcgataaaaacaaaaagggaagccaggaaaatcgaaagactgaggaaaacggcggcttttttcatgctcgcatcctttctcgattcaggcggtcacaacctctcctatcctaccgtcccggcgcagccaagtcaagaatgcgggcgcagcccgcgctccaaaatccattgtgcaagattcataccaaggacgcggacgcctggtcctcagggtgatcccgggcggcggtccgtccgaaaacggcgacaaccgtctccggcggaggccgggacgccctcagcgccgcggccggcgggcgatcaagtagtcaaacaggacggcgtcctccccctcgcgggcgatcttgccgtcgaaaagttccacgatccggtcccgccgggccaaaagcccgtcgatctccatgccggcgaggaagccgcccaactctttctcaagcgaggcccggtccagccggcggagatcggccagaagagcccggtcgcaggccgtgagatttccgggctcgatcaactccttgtacatgcggaacgcccgggtgtggtcgatcagccaaaccgtccaattcttcgtgatgatgatgttccccaggttgcggtcccggttggcgatgagctgatcgaaaaccagcaggatgttgatctgccggttccaattgggacgggcccaccggggcggagtcacgttcttggccaggcgctccttctcatccatcaggacgtcgtcgatccaccaggtgacggcggacggtttcccgtccacgatcctttcgaccgtcaccggaaccatgttcaggtcgagcatccggtcgaggaggtaggcggcgacgttgaatttataggtatcccggaaattgagctcccattggccgccctggccctcgaacttcgccgccgcctggtcgatcgtctggacgtgggcgtcgtgcgtcccccgctcgttccccaacgtaatccggacggacttggtgacgcctcccaggacgccgaccctgccgacgatcccggccgtccgcagaaaatcctctttttccaagcggctccaggaggccgggccggccggcgcgtcttgacggccgccgtccgaggagaggaccgcctcaacggttgaaacgaagggagaagcaaccaagaacaggaaaaggagcggcgctggtggagctgaccaggatcgaactggcgacctcttgaatgccattcaagcgctctcccaactgagctacagccccacgggaaggggtcagatcatacgccaaaaggcggcgatcgtcaagcggactttccgcttccgaaagctctttcttccgccgtttcgggctaaattcgaggcctcggcttccgagccgcggccgccgcgccgattccttctcaaaccggcggctgaaggatttcctccaggacgattcgatgctcccggtcgtcccgggccatttgccggaagagccggcggaggttttcatccttcacctccaaagcggagcccatatggatcttttcgaattgattctccaggccggccagggggatcatcggctcccgaaacgagacccgggtcgcccgcaagaacgccgcgacgcaattcctccttttcaccttccctgatccgtgttaaaatgaggcgcccaaaggaaggtccatggccgttaaacgtaatcaatccctgaagaatatgctgttttggctggtggcggggattctcgtcatcatcctgtggagcgttttccaagcgcgggagatgtccagcgccgacatcccgttcagccggttcatcgacgacgtcgaagcccagcgcgtcgagaaagtcacgatcgacggcgtcaacgtcaccgggcgctatcggagcgacggaacggcgttcaagacgatcatcccctcgcaatacgacggcctcgttcccgtcctccgccagaacaaagtcgacatcaccgtcaaggacgccaaccgggcgacctggctgtcggtcctgttcacctggtcgccgctcgtgctgatcgtcgtcttctggttctttttcatgcggcagatgcaggccggcggcaacaaggccatgtccttcggcaaaagccgggccaagctcttctcgaccgtccagaagaaagtgacgttcaaggacgtggccggcgtcgaggaggccaaggaggagctcaaggaaatcgtcggattcctcaaggagccgcagaaataccagaagctcggcgggcggatccccaagggggttctcctcgtcggcgccccgggcacgggcaagacgctcttggcccgggcgatcgccggcgaagccgaggttcccttcttctccatcagcgggtccgatttcgtcgagatgttcgtcggcgtcggggcctcgcgggtccgggacttattcgaaaacggcaagaagcacgccccctgcctcatcttcatcgacgaaatcgacgccgtcggccgccagcgcggggccgggctgggcggggggcacgacgagcgcgaacagactctcaaccagctgctcgtcgaaatggacggcttcgactccaacgagggcatcatcctcatcgccgcgactaaccgtcccgatatcctcgacagcgcccttctccggccgggccgcttcgaccggcggatcgtcgtcaacatgcccgacgtcaaaggccgcgaggaaatcctcaaggtccacacccgaaaaattccgctggccgacgacgccgacctcaaggtcatcgcccgctcgacccccggtttcagcggggccgacctggccaacatgatcaacgaagccgctctcaacggggcccgcctggagcaggacaaggtcaggatgaaggacctcgaatacgccaaggacaaggtcctcatgggcgtcgagcggaaaagcatgatcatcagcgacgaggagaaaaaaagcacggcctatcacgaagccgggcacgccctggtcgcggccatgatccccgaggccgacccgatccacaaggtgaccatcatcccccgggggatggccctcggcctgacccagcagctccccctcgacgaccgctacacgtacgggaaagcctatctcgaatcccaactggccgtgctgatggccggccgggtcacggagctcatgttcctcaaccagatcacgaccggcgcggccaatgatttcgagcgggccacggaaatcgcccggcggatggtctgccagtggggcatgagcgacctcggcccgctgactttcggcgagcgggacgacctgatttttctcggccgcgagctgaccgcccacaagaactacagcgagaaaaccgccgaggcgatcgacgaggaagtcaagaagatcgtccagcgcaattacggccgggccgagaagatcatcggcgaacaccgggatctgctggaagccatcgtcaagcagctcctcgagcgggaagtcctgtcgtcggacgaaattaacgcgattttgggcaaaccggcctcctcccctcccccatcatccgaagaggagggacaatcaccggaaccggccgggaaccgcgaggtgaagtgagggccggaaccgtcttccgcgtcaagggcgcgcctcacctcctgggggcgcggacctgggtgatggggattctcaacgtcacgcccgactcctttttcgacggcgggcgctatttcgatcccggacgggccgtcgaccacggcctgcgactggccgacgagggcgccgacatcatcgacgtcgggggggaaagctcccgccccggctccgatcccattccggccgaggaggagatccggcgcgtcgttccggtgatttcctcgctgcgagcccaaacgcgggtccttctctcggtcgatacgaccaagttcgagacggcccgggcggctttggaggccggagcggacgtcatcaacgacatcagctcctttgagatggacccccggctgctggtcctggccgcggaaaccggcgcgggattcatcctgatgcacatgcaaggcgtcccgaaaaccatgcaggccgccccgcgctacgacgacgtcgtggccgaggtccgggacttcctggctgaaaagatcgaaatcgccgccgcctacggcttgaacaaggagagcctggccgtcgatccgggcatcggattcggcaaacagctcgaggacaattgcgccttgatccgggaattggaaacgatcgccggtctcggccggccggtggtgatgggcgtgtcccggaagtcgatgatcgggaagattctggacgttcctccggaagagcgcctggagggatcgctggccgcggccgtcgtcggcctggcccgcggggcccacatccttcgggtccacgacgtccaatccacccggcgggcggcccgggtggccgacgccatcttgtccggcccgcccggccgggagaatcccgagacgcgggaggccggccgtgctcgataacatcctgaccgcccttcacctcttcaagctggtcgatttcatcgacatcctcgtcgtctcgatcatcatttactcctttttcgtcctgatcaaggaatccaaagcctaccccatggccgccgggctcggattgatcggcctgctttacctcatcacccgctgggccaacctgttcgtcgccaactggctcatccgcaacttcgtcacctatatcatcatcgccgtcatcgtcctcttccagaccgagatccgaaggttcctgacgcgcatcggctcgcggtcgttccgcaagcccctggctctccgctcgtttgaggaaaaaatcgaggacctctgcctggccgtcgattacatggccgaccgcaagatcggggctttgatcgcggtcgagaacgaggtcagccttgagcccttcgccgagcggggcacgcccatcgacgccgtgctgaccaaggatctcctggtcagcttgtttttccctcattcgcccctgcacgacggggcggtgatcatccggggcgacaagatcatggccgccggatgccttctcccgcttccggccacccatgaaatgcggatttcctacccgacccgaacccgtcacctggcggccatcggactgacccaggaaaccgacgcggcggtcgtcatcgtctcggaggaatcgggcggaatctcgctggccacgcgcggaaccctcgaacgcctcatcgaccggaacaagctggaagaccggctcctggaatacctgaaaaaatgatgaaaaagatccgggatctattccttcgcaacggacttctcaagctcctggcgttcctcacggccgtgttcctctggatcaccctgatgccggaggagaaaatcgtttccgaaaagacgttccaggtccggctcgagccccagggcctttcggccgagttcgagatgaccgagcggccgccgttgatgatcgacgtgaccgtccgggcgacgaaccggatgctcggacagatgacctcggccgacgtccaagccgttctcaacctgagccgggcgaacgtcaaccaagaggattacccgctgaatcccgatatcgtgaccgtcccggccggagccaaggttgtccgggtttttcccaataaagtccatctcaagatcgagcggagcgcggaagtcctgatggagatccaaccggtcctcgtcggccagcccaagaccgggcttaaggtcgaccaagtcgatctcctcccgtccaaggtcttcgtccggggcccggaaagcatgatcaagccccaggatcggatccggaccagccccatggacatcaccgggttggaccagccgaaaacctttgaggtcgacttgatcctcccccggcccgagttgaggttcgccacggctcagacgcgggcctcggtccggatcaccctcatcgaaaaataatccggcggcgggaaggggggaaaagaagaaaatggaaaagctgttcggaaccgatggcatccgggccgcggccggagaatatcccctggacaaaccttcgatccggacgctgggccgcgccctggtcgacctcctccaagaggaaggcctgcctccccggatcctgatcggacgggacacccgggaatccggcgattggatcgaggaggccctgatccggggcatcgcctcggccggggggcggtgcgcctccgccggaatcattccgacgtcggctgtttcccatctcgcccgcacgttcgcgttctcggccgggatcgtcgtttccgcctcccacaatccctacaaggacaatgggatcaagattttttcgagcgccggcctgaagatctcggacgcctgggaagaacgcttggaagctgaaatcgcccgccggccggaagtccggggattggaaaaaacggacgtccggccggacccggtctatcgccgggaatatgagcatttcctccgccgccggttcgccccgggtcccggccccaaggggatgaaaatcgtcctggattgcgccaacggctcggcctcggccatcgccccggaggtgttcggcgggctcggcttcacgatcgtcgcgaccgaggcggagccggacggccggaacatcaacgaggattgcggggcgctccatcctgaaaaactcgcccagacggtgctgtcccggaaggcggacttaggcatcgccttcgacggcgacgccgaccgggccctctgggtcgatcatcgaggccggatcctcagcggcgatcacacgctgttcgtcctcagccgggcgatgacggcccgcggcctcctccgcggacaggcggtcgtggccacgaccatgagtaacatgggcctggagaaagccctggccgccgacgggctctccctggtccggacgcgggtgggagacaaatacgtcctggaaaaaatgctctcgatccgggccaacctgggaggggagcgttcgggccatacgattctctcggacgaatgccccaccggcgacggcctgttgacggccctcaagatgctcgagatcatggtcgaaaagaatctccccttggctgatctaacccgggattatgcggaatatccgcaggtcctgaaaaacgtccgggtggcccggaagccggccatggacgggcttgccgaagtcgccgcggcgatcgccgacgtccgggagcgcctggggaacaacgggcgtctggaagtccgctattccgggaccgagccgttggcccgggtcatggtcgagggcgaggacgaggacctgatcgagatcctggccgcccggatcacggccgcgatccgcaaaacgatcggggcctgaggccgcggccggccctgcgccggacgatccctttggggtataatcggaacgcgccggaaggaaggatcttttccgggaggagttcctcatgaagctgtccttcaacgtcgatcatttcgccagcctgcgccaggcccggcgggcggccgaacccgagcccgtcctggccgccttgatcgccgagcaggccggcgcggccgggatcaccgcccatctccgcggcgaccgtcgccacatcaacgagcgcgacctccggatgctgcgggaggcgatcaagacgaagctcaccgtcgagatggccgcctccgccgagatgaaagccgcggccctcgccgtccgccccgacgtcgtctgcctcgttccggaaaagcccgaggagctgacgaccaccggagggctggacgtcgtcggccgccgcaaagcgctcgccgcccacatccgggacctgaccaagggcggaatcaaggtttcgattttcgttgatccgtcccccgcccaaatccgggcgatcgccgatctcggcgtccggaaaatcgagatccataccggagtttacgccgaggccgcgcccggccaagcccgggagaaagccctcgacgaaatccgggcggcctcgtccgcggccgcccggctcggcctggacgtcaccggcggccacgggctcgattatcacaatgtcggtccgatcgccgccatccccgaaatgaccgagctttccatcgggttttcgatcgtcgcccgggcggcgatcgtcggcgtcgaccgggccgtccgggacatggtcgccttgttgaatccccggcgcgcccggtaggcccgccggtatctcttccctcgacggaggacggcgcccggccccggaaggcgcgggaggaggcccgccatgatcatccgcatcaacgcgtcccgcctgcaatcggatcttgaggccctcggccggatcggccgcgacgccgccggaggaatcacgcggccgtccttcagccgggccgatctcgaagcccgggtctggctccggtcccggatcgaggaagccgggttggagtaccgggaagacggagccggaaaccagttcggccggctggagggggcgtccgggccggaggccagcgtcgtgatggccggctcccatctcgacaccgttcccaacggcggcatgttcgacggagcggccggcgtcgtcgccgccctggaatgcctccggacgatccgggaggaaggtctgcgcctccgcctgcccctcgaggcggcctcgttcaccgacgaggagggcaacctggtcggcgatttcctcggcagccgggcgttcaccggaaaattggaccgggagctcctcgagcgcggaacgacttctttcggcccgcccctggccgacattctcgcggccacgccgtacaccatcgagacgatcctctcggccgcgggccaggcgccggccgtcgcggcgtatctcgaactccatatcgaacaggggccggtcctggaaacggaagggatctcgctgggtctcgtcgagaccatcaacggaaagcattaccggtggtgcgccttcgagggggaatcgggacactccggaaccgttcccctggaattgcggcgcgacgccctcctcgggctggccgacttcgccctgcgggcgacgcggcacgtcgcctcggcccattatggaagcttcgtcaccatcggaagggccctcatccagccgggcaccttcagctccatcccccgccgggcggatttttccctggaattccgaagctcctccaaggaatccatggaagccctggaacgggagctgctcgggatcgccggcgaggtggcctcggcccgccgtttgagattcgcctcgcgcctgatggaccggacggacccgtaccgcatccccggccgcctggccgggatcctggcggcggaagccgaccgtctcggctacgcccatatgccggtcacgagcggcgccggccacgacgcccagattctcggcacggtgacggacgcggccatgattttcatcccgagtcccgacggcctcagccacgcgccggaagaatccctccgctgggaggatctggaaaagggggcgaacctcctgctggccgccctcctgcggctggcctcttaaaacacgtcgggatcgggacggaaggaccggccggctttcttttccccctgccggcgcttgtcgtccagcattttcgccttggcccgctgggaccgcttgcgcttctgccggcggatcttttcgatccgctgttcccgggcgctggcttcgcctttccgcaacgtttcgattttatcgaccaggatgcgccgggccagaaaccggttgatcgcctgggagcgctcgcgctggcatttgaccgaaaggccggtcgggacatggatcagatgaacgcaggtctcgaccttgttgacgttttggccgccttttccccccgaccgcatgaagcgctcaataaaatcggagtcgcgcagtccgagccgctccattttttcccggagggcggcgatcttttccggacggacgggtccgctcaccctacttttttttcttcttcggcgaggcggcgacgaggtacttgccgcagttttcacaaatgtagatgtcgttgctgccctcgatggccgagctcatctccgtggacacgctgatgttgcagccctggcagacgccgtcctcgacctcggccacggcgaagccgtaccgctccatcagcttctgaaaacgggtcaggagggcttcgtcgagctcctcccgcaggaggtcggcctgggctttcagggtgggcagttgggcttttgtcgccttctttttcttcttctcgatctcctggagcttgcgcagcaggccggcccggctgatgatcttgtcttcctggggaaggcgcagctcaatctcgcccagggcttcccacaaggcgttcttgtccttggcctcgaagatccgccggcggaaatgcggatcccggaggaaatgagccagcccggcgaaaaggtggttgaagaggcccggcagggtcggattccagatgatgaggatgatcaggtggaccttcttcttgtccggagcggagaaatcgatgccttccgacgaccggccgacggcgatgacgatctcgccgtcggaatcgacccgggcgtggggcacggcgatgccgtctcccagggccgtcgactcgagggtttcccggtccatcagccgggtcaggatcattttccggttccggacgagcttttgcttcgccaggacgtcgatcaattcctcgacggccgcgactttttccgaagctctgagctcgaagacaagctggttgattttaaagtaatccgagaagtgactgatgcccaggacgtctcttttatccatgcgccaccgtggctggtatattacctcagggcggcgtccgcggtcaatgcggctgttttcttttgaacgagctttccggtttgaactgcggaaggtcgggcgaggcatcgagaagggcggcgatttcccgggcccagagggcgatctggatcgtcccggcgaaatcccagtcaggctggatttcatcgccgacctgatgatagccgtttttcttgtaggcggccgtcttctccggcaggtattccgctccccgcgtccgggaaacgatcccctcgtgaagccaggcggccggaaggccgttgcgggcgaagctgaattgatcggaccggaaaaaatagcccagctccgtgtcccgctccgccgtgtaccggaggccgatacgggcggccgcccgggagacgatttcgtccaggtccgaatgggacgccccgatcgcatagacgtcctcggtttcgccccagacgccggtcatctcgaaattgagatcggccagaaccgcctcggccggaaagggaagatggcggacaaaataatccgaacccaggaattggttctcctcgccggttacggcggcgaaaacaagcgtcgcccgcggcctctccggcgcctcggcgcagagccgggccagggccaacatcgccgccgaggcggagccattatccacggctccgttaaaaatccggtcgccttcgcgggtcggatcgacgcccaagtggtcatagtgggccgaaaagacgatgaaccgctccccggggccccggacggagccgcggagcagcccggcgacgttggaggccgaaaccgaacggtagcggcatcgctgccggacttcggccgtcgcctcgaggggaacagggacgaagtcccgggtttcggccgccgcccggagggcccgccggtcccgtccggccgcggcgcagatccgttcggccgccccggcgctgatccagccccggaaaaacaggggctggggcttatcgggaaggaagtactcctcgttggaccacccgttccggacgacgtcccatccgtaggccgcgcccttcgtgtcgtgaatgatgagacagccggccgcccccagctcggccgctttctcgtacttgtagacccagcggccgtaatacgtcatcgcctccccgtcgaaaaggccgccgggaacgttgcccggctcattgatctcgaccaggaggactttccccgccaggtccatccccttcaggtcatcccagtcccgttcgggagcctggatgccgtagccggcgtagaccagctcgccggaaacgcggaagggcgcgtcttcgcggtaagaatttacgacaaactcctccaaggattccaaggaaacgttcacgcctccggccttgacggacagagcgggcttcggatcgggagcgcattcccgcgcctcgaacgtctggcgatagcttccgtccgggaacgccggctcgagacccaaaccccggaaaacctgttcctggtatagggcggcgatctcgattccacggccgccgagagcccggccctcgagcagatcgtcggagaggaaccggatgtgggcctcgatttcggccggggtgatcggacgcggagcgggggtttccgtcctgcaggccggaagggcggccgccagggcggccgcggcaagaaggaaaaaggcggtcttcgcgcggatcatgtcatttctctcctttgccgccggcgggtggaggcggcggacgatcgcggtcccggcggctttcccgttcccgggtggcgaggccgaagatctcatggacgcccgacactccggccgtccgggcggccagggcggcgccggctacggcggcttcgaagaccgtccgtccgcttagcagggcctcggccgcggccgcggcgaagacgtcgccgcaccccgtcggatcgacgacggccggcgacggcgcggccggaatccggacgaatccctccggcgtcgaaaccgcgacgccgtcccggcccagggtgacgaacacggcccggacgccgagacgaaacgcccgccgcgaaagctcttcgatttcggattctccggcctcgcggtccggccggcccatgaggcaggccgcctcccggcggttggcttgaagataagccgccccctcgacccacgcctcccaatcggggacggcccggtagccgcggggggatccgacgcgcggctccaagactaaggaatggatgtccatccagacgggacacgacgcccgcccggcgacggcgtgccagccgtcgggcgtgatgtcgaaaccggaattgaagaccatcatcagaaaatccaacccggggagggcctcgagcgccgggccgggatcgagcggcggaacggccgattcgagaatttcctccctctccccctcccccgccggatatcggaggcggacgcggtgtccggggccggggacatatgtcagaccggtccggtcgagaccgggccagtccgccgtctcattctcgacggccgcgcgcatcgattcgccgccgcgggcggaaagcgcgacggaaactccgaggccgcagagagcggccgcctggtaaagaatcccgccgacggaccggaacgtccgtccgccttcgatttcgatcgtgtcggccgtgatcgttccgaaaagtccgcagcggggcatgggtcctcatcctatgcgagcccgcgatttttttcaaggaaagagcgcgacgcgacgacgaaaaccaaggccgccttggaggcgattacagggggaaaattgcggtcatcgccgcacacccgcgaggtgatcgcccggatcgcgggaaaggatggaatcctccctcgccggattcggatccggcgggatagagctttaggcgctttgctgaacgaatcttatttttgaatttcttctaacaagagaatatcgacgatgatttgtcctgctcgacccgctgcaggcgcattcatatgaagccgaataatatccggtgatagtgccgcaacagcgcatccggccgcttgtccagcaacaatcagctcaaataagaaatatccccccggaaaaaagaatgaccagaactgccgcaaagaacaccttcattttcgtccgtatcattcatctcccttctttgctaaatagagatcatcattttgagttttaaaaataaaaatgtcaccgaaacaataagcatcttcgatgagatcgccgatcctatcgggcgcgtcttgccaataaaggaaatcccccttggaagagaaaacatacattctttccctttcggcttgttttttcttcaacgaaaacgcatagatgttgttatcgtcatccacgcagcatctcgaccaaagctgaaattcttttatggaaacgctcgaggccgcttgcttcctcgtctcggagatcatgtcctcgatcgcgcggatttccttgtcatgaagcttgtcataaacgctgaatttattttcaacatctccgcttttattgactttgatgaataatcctttaaaaaaatcaaaatgaagaatcgcttttttatcctggcaaaattgaatttgcgaacaattgccgatattgtctccgggaatcatgatgtcatcttctcttttcaggagagtcctcaaatatctcccgttttcatcataggcatcgattaaattcggactcagggaatacgcgatgtatatttcatcgttgtccccgagaagaagcatgctgggatatgaataatagagttccttcggcattttgatttcaattcgcttgataaactctcccctgatcgtaaagacttcaatcgttttggccatcgaattcaagacataaatcacttctttatccgtaataaaaaaatccgacggatgctccaaatcccccgggccttgtcctggccggccgatggaatgaagaaatttcgcgttgatgtcatagacagcgatcttgctttgacgtccatcaaggagaaacacgcgatcgccgaagatcattattttggttatcgaactccaggctcggttttccgcgcttggttcgaacttggctacccgatgaaaagaaatttttttatcttcttccttctggaaaagtccgtttttttgttgaacatgaatttcctgggaaccggcatattgtgagaaaacggcgatgaatactaaaagcgtaatttttttcatgacctcacgcttccttcaaatatctttgcacgacttctctaaggaattccggatcaagattcgaggcgatatatcgaatgaaaccctgactgtctataccgatcatttttatgcaacttccatccaaacggcttcattttcttagctttttcattttcataagaaggcgcgaaacgaataggcttcttttttaaagacttttttttgttgaaataattcccacaataaaagaagggaagaacggagaagaacgccgccggcttgggaagccgggcgcgcgcttgaaagcgtgagccctcgtttccctcgtccggccgcgtgatcgccgctacgtccggatgaagaaatgggtgtccgtccgctcctcgctccggtcggtcgccggaggcggggccggcgagagggccgagatctccgcccgcaggacgccgtccatcgggatctcgagcgcgcccaacacgctcttgagctgggtgacgcttctcgccccgacgatcggcgcggtcaccgccggatggcccgcgacccaggcgacggccagggcggccgggtcgaagccgcgcgcttcggcgaacgcgtcgaagcggtcgacgatctcgaaattcgcctccttgaaataccgcgcctggtaaatcttgtgttcggtcaaacggccggattgcgggcgccggtttgagccgaattttccgctcagaaaacccccggccagcggactgtaggggatcactcccaatccttcggcttcggccatggggaggatttcggcctcggcctggcgcttgagaaggttgtacatcggctggaggacggccggcgcggaccagccatgaagggccgagatccccagggccttctcggcctgccaggcggcgaaattgctcaggccgggatagaggattttcccctggcggacgagatcgtccagcacccggagcgtttcctcgagcggcgtccggtcgtcgaagcggtggatgaaataaacgtcgatgcggtccgtccggagccgccggaggctggcttcgaccgcgttccgaagatgatagcgcgaggcgccctgggcgttgggatccgttcccgtcgggaaaaatccttttgtcgtgacgacgacttcgtcccggtggtctttgatcaatccgcccaggatttcctcggcccggccggcctggtacatgtcggcacaatcgaaaaagttgattccggcttcgcggcaggcgcggaacaactccccggaaaccgcctcgtcggcttccttgccgaaggtcatcgtgccgaagcacaagggcgagacgcggacgccggtccgtccgagataccggtagttcatgatggactcctctccgccttgcggccagctcgggcggccgcggcgatcatcgaaaacagcgggattcacggagaccggccgggctcaatcgctccgccgccggaggatgttcatgatcaaggcgccatccccgctcatgaaagtcagctggatgaccatgttctccctctccagccgggtgaacgcgccctgggggacctccgactccatgataaggctccagccgtcgcccttcaaatcctcgatgtaagcggcgacgtcctccgccccggcgccggcgaacgtcaccgtccaagtcgttccctccggcgactgggaattcgtcgaattccggatcgatcccgcccggaacggggcgaggtcctccggcaggtcggccggccaggatcctcccccggatgtgaggacggcgctccccccgggcgttttgaccgtgagctgccccttttggaagtcgatctcagcccggccggccgaggccttggagaccaggtcggaaattcccttcgcctcgtccttgccggcgggcgtctttttgccgcaggccgggacgaagaagacgaggacggccaggagcgggacgaggccgggaaatcggccgtgcgagcggcggggagtcatgggggtctcttcctttccgggaggatccctcccgaagccgtattctatcccatcatcgggaaaaacgaaatccggcccggagcgagccggcgggggtactgttgacgagatttcatctccatgtccttctgttaccgtcctctctttcagggatttcggttacattttagttgattcaatgcgggggtttgaaaacgcggccgatctcgggtaagatttcccctttcccttgcggaaatcgatcatcaaccaggagtttccatgcgcgcttacgaatccatcgccctcggcatccccgaaatccttctcccccaagccgggctcgacctgacgaaatgggcggtcatcgcctgcgatcaatacacgtccgagccggcgtattgggaaaaagcggccggcctcgtcggcgacgccccctcgacccttcacctgatctatcccgaagtctttttgaacgaacccgaaccggagaaaaacgcccggatcggccgaatccggaaaacgatggctgattatttcgcccgcggcctcttcaactcggcggaagggctggtcttcgtcgaacggacgacgggcggaaaaacgcgcaagggcctggtcgccgccatggatttggagcactacgattaccggaaaggctcgacgaccctgatccgggcgacggaagggaccatcatcgagcgcatcccgccccgcgtccgcatccgcgagggcgcgcccatggagcttccccatatcatggtcctcatcgacgacccggccgacgaggtcatcggtccggtcgccgccgccgcgggaacgcttcccaagctgtatgatttcgagctgatgctcggctccggacatctggccggataccgcgtcgccggccgggccctggaggagaacctcgtccgcggactgacccgtctggccgagccgcgggccttcgccgccaagtacggcctcaaggacggcacgccggtcctgctttacgccatgggcgacggcaatcactccctggccacggcgaaaaccatctgggaaaagacgaaggaagcggccggcggggcggccgccgtcaagaactccccgctccgttacgccatcgtcgagctggtcaatgtccacgacgacgccctggccttcgagcccatccaccgggttcttttcgacgtcgcggccggccgggacctcgtcgccgagatgaaggcgttctacggcgggcacgtccggtacgaatccctctgctgcctgaacatgatgaaggccgccgtggattcgcagaccggcccggcccaccgcatcggcctcatcacccccgagggattcggagtcctggaagccgaagcggccggctcgaaccttccggtcgggacgctccagaacttcctggacgttttcctcaaagacaagggcgcccgggaaatcgattacgtccacggcacggacgtcgtcgccgagctcggagccaagcccgggaacatgggcttctacctcgccggcatgcgcaaaaccgacctgttcaaaaccgtcatcctcgacggcgccctcccccgcaagacgttttccatgggcgaggcttgggagaagcgcttctacatggaaggacggaagctcgcctgatctccgccccgttttcccgcggttttttcgagaagacgattttttttaaaagcccttgacgcgtgctccgcgaggcgatgtacggaatgagcagcgtttaaacgaggcgacggcttaatcgccgaagcggcggctgagccgggcgatccggaaaagaccaaagacgactcccgccaggtaaagagagaggagagcgatccccgccggcggggacagcgccggccgggatccgccgtcctcggcgccgggaagcggaacgggatcccagggaaggccgtaccgctcggccagcccttggacgaagaggagatgaatcaccggaatcccccgccgggccatctcctggaccacgccccgccgatccggcggaggaacgaagatctcctcggcccggttgaagcccggccggagcttgaggacttccccgtccgtccccatgtcggcgaagctccccccgatgttgacgaacacccggatcggccgcccgccggcgctttgttcgaacaaggcgatccgctcggccacgtttttaggaaggtccggctcctggatgaagggcaggcccgtctcctcgatttttttctccagaagaacgcgcccgctttcggacaatcctcctccgccgtcccgcccgccgccgagggacagggccgccgactcgacgtccaggacgcccgcgcggcgcaggcaatcggacatctcgagccaggtccagccgggatcgttggctccccagcgggacgcgcccagggaaacgatcaagcgcggttcgattccccgggccgcggccgcgcagagggtcgccaaaatcaagcccgggaacgaccccgaggcgccgacggcggccacatccccccgtccggcgcccgcttcccggaacatccggacgagggccccggcgacgagaggattcgccgtcgtccgcttggcttcaagccgtccgggggacgtcgtgatcgacgtatcctcccggccaatcaagcccgtccggttgatgtcggagagaggatcgatcggcgggccggacgactcccggcattcccggagggcggcgatcgcccgggccatcaaggcggccgcccggcgggcttcctcgtccgtccccggcgcggggagagggggcagaaaataaaaaaacgccccgaaagccaagctccagaggccgagcccaaccaaaacgcccgcccgcgtccggcgggatttcatttctttccccggcgacgattcgggccgcgcctcgttcctcatggtccggtcagaaaagggcgatgacctcggcaagggcccaggtcgcgaccgtcgccgcggccagggcggccagcgtccgaatcattttttgccgggcgaggttgttggccaggatgccgggaatgacccagccgatcacccgcaggtccagggaagccggaagcagcgacggccaaatcaagaaccaggcctgcccgatcagggcgcccgccaggaggagaaagacgaaccgccggcggccgaagagaaggacataccgggccgacgcccggaagaggccgagggcgaggaaagcggcggccaaggtcgccgcgatccggccgggctggttgagatagagagccaggtaggccgggacgatgaggccgccggggaccacccccgtgacttcggccgtgacgagggcgacgaacaggccgatcagcatcgtcgtcaacatgggaccctcgttcccgcggcgtcccagtattcgaccagagcgccgccgaggccggcgatgtttcccgcgcccacgacgacggcctcgccggcccacaacggccaaagggcggcggtcaccttcgccggagaccggccggccaggacgcccgcggcgggaattccctccgatcggggaaacttcaggcggccgagagccggggcctgctcgccgatgaagacgacccggtcgaacccggcgaaaaacccgttccagatcgcctcgagccaccgtcgcgtccgggaagcgcggtcggcccggagattcagcagggcgatcacccgccgtccctcgaaggggacgcggcgtcgcgcccgttccagggcaatccgggtcgactccggctcattggccgcgaaaatcgaaacgaaatgccatgttcggccggaggcgggcgagaccatcgaccaggcccgaagatcgccgaaatcgggttcggccgaggcgattccccttgaggccgtccggcggtcgatcccggcgcgctcggccacggccagggacaatcggacgttctccggaaaatccaccagaggaagcggaccgtcctcttcgccttgggggacggaaacaagccgggcgttttttctccgggcggtccgggcgaacgccgggaagacctccccctccggaaccaggaccgtccccccgccgggaatggcggccgccagcgattcagcgatttcctctctggtccggcccatttccttctcatgatcgaggcggacgttcgttacggcgaggaggccgggacgaaggatcaagccggattcgacggccaggcattccggccggatgctcatcatctcggcgaccaaggcgtcgacccccagccgggcggccaaagccaacaccctcttttgctccaggacggaagccggaccgggacgatcgatttcccgttcacggccgtcgggaaaaatcagaacgggcttcgaacctgtcgttttagccaagacggcgcggcccgaggcgcggagggcggctgccacctggcgggtgacggctgattttccccgggttccggtcacgcagatccgcagggggactcgggcgcggagccgcgccagccgccgccgttcaaggaggagaaacccgctgaagagaagcagaaggatgaaaccgcggagaagcatgcccacgtgcttattctatggaaagctccgggaaataccaactctcgctctaaaaaaaagaggcggaagattgggtgtcttccgcctccccactgaaaggaagagagttgaaggatattgggaaggcacggtataggtgcctgtcttttattatgcaggaatcatgccaatgccgttttaagcttgatttacctaaaaagggctgaaaattcctttgcccgtaattatttcccgtaaaaattctttacgaacgtaaactttattatcgttataagcttatttacatcggccggccggaggcgtattcgtctttcctgagaagataatcgatcgaccggttcaaagcgttgagatccaagggcttggcgaagaaatgactgatccggagacgcgcgaggacctcgggttcgatcaagtcggcataggccgaaatcaagatgacttctcctccatatccgttccggcgcagcgattcaacgagctcgattccgttcatgtcgggaaggcggtaatcggcgatcatcaagtcaatggaggtgcttttgaaacgggattgagcttccgctccatccttggccaagtacacccggtaggatttgttgagaataaggaaaaacgtcttgcggatggactcttcgtcatccacgatcacgattttttttgcggccattattaccatcctttgaacgatacgcggtaattactgcatgatttgtgccaactgatgttccgaaagccaggcggaaataccgccgggatcttttttggcgtaagggttctttaaaaaaagtaaagagacgaggatcggagcggacgtctagccgggattattcataagaaaaattccggtcaggtcgtcagctggtagtccttgattttcttgtccaaggtcggccggctgatcccgaggatctcgctggcccggatttttgatcccttgaccgcggtcagaacgtattgaatatactccttttccacctcgtccagaggcacgagttcccgggcgcagggtttcttctcctccgattccaggggaaggttttcgagaagaattacgtctcccttggccaggatcacggcccggatcagggcgttttccaactcccggacgttcccccgccacgagttctcctgaagggcggccatcacttcgggcggaattttgcggacgtttttccggagctcccggttggttttttccaaaagataggcgacgaggtccgggatgtcctcggttcgctcgcgaagagccgggatcttgatttcaacgaccttgaggcggtaatagagatcctcccggaacctcccgctgtcgatttgagcccggaggttctggttggtcgcggcgatgatccgggcgtcggtcttcatcgtcttttccccgcccactttcatgaaatcacgggtttcgatgacccggaggagcttggactggaggttggacgaaacatcgccgatctcatccaaaaacaacgtccccttgccggcgatttcgaatttccccttggtttcgttcaccgcgtcggtgaaagcccccttgacatgcccgaaaagctcgctttcgagaagcgtgtcttggatggccgagcagttgatgacgatgaagggttcctcccgccaggggctgttgtaatggatcgccttggcgaccagctccttgcctgttccgctttcgccctggatcaggacgttggcccgggtcccggcgaccgagccgatcagcttgaagacgtcccgcattcccggcgagctgccgatgatgttgtcgatcaaatattctttctgcttttccgaaacgaggtagtcgatcttttcctcgagggccttgaccttgaacgccttgtcgatcgtcaggtcgagggcgacgaaatccaggggtttgaccaggtactcgaaagctccgcccttgaccgcctcgaccgtggtcttcatatcgtcgaaggcggtcatgacgaccaccaccgccctcggggatttgtcccggatccggcgcagaacctccaagccgtccaaatcgggcaaccggacgtccaaaaggacaaggtcgggattcccggcgaagaaggcctccaggccgctttccccgtcctcgaccgcccgcgtctcgcacccccggcggttcagatgagtgatgagggttttccggatcaaggcatcgtcgtcgatgatcaggatggatttcatgattctctcccgatcggaattatgatttcgaacgtcgtcccgggttggttcccgcggatgacgcggatctttcctcggtgaagctcgaccagcttgcgggcgttggacaggcccaagccgatgcccaaggacttggtcgtgaaaaacggctcgaaaatgttctcccagtccttctcgggaatcccccggccgttgtcggaaatgcaaatccggagtttgcggccgcgccggccgccggcgccctcggccgaaagaacgatccggcctcccggtccgacggcttcggccgcgttgcggaggaggttgagaagaacctggcggacgcgatcgccgtcgacgacgatctccggcaagccggcagccagcctcttctcaacggtgatgttcctctccctcagcaggtcggccatcattttcagcgattcatccacgatttgttcgacggggaagggagccttctgaagctcggtcgcccgggtgaagttcagcatctccttgatgaatttctcgatctgggcgatcccctccccgctgagggcaaggtgctcccggtcggcttccgggaaggcgtcgtcttcaaggactttctggatgttgagcttgaccgaggtcagagggttgcggatttcgtgggcgatcgaagcggccaggcggccgatctgggccagcttctcggattggaccaagaggcgctgggcttcctcggtttcccggcgggaggccagcagcctctcggtcatctcgttgaacgaggccgccaggtcgccgatttcgtcgcccggccggtgccggatccggtggccgaattccccccgggaaatccggaccgtcccctcaacgagccggcggagaggatggacgatccggcgggccagaagcgtcgttcccgcaagccccaggaacaatccggtcaacccgatcagaatcagcgtccgcctcgtccggaggaccgcagcccgcatctcctcgagcgacaagccgattttgaccgaaccccacttgtccggagatccttcggcgaaaatcgggacttcgacctcaagaatcctcaggcggcggccgaagagaacgatgtcccgggacttcacgatgaagtcctcgggatcgatccgctcccggaggagactgccttggaaaaggtccggccggccggcgatcagggaactggtgaccagcggcgtggcgtaacggtcgtaaaaaaccacgtagagcggcgcatccgcccggcggcggtcggcatcgcgctgcaaacgatccatgtcccaggtgaggatggactggagattccggtcggccgtatggcgggcgatcaagacggccttgttcgtcgattcctcgtaaatagtcgcgacctctttcttttcaatgacgaagaggatggccccggtcaagacgacgaagaggagagtgaaccaaagaaacaaccgccgctgaagagtgaagcgaaatttcatctcggctttctcatcggatgaaggcgacgtcgcgcagatcgagataggtagttccaaggagcggaatcctcaatccccggatgttgggttggacggccagcctctggaccgccgcaaacagcgggatcccgggaacatcccgccggatcatccgctccatttcccggaagaggtcctgataccgggcccggccgggttcgacggccgcctcctcgaggagagcgtcgaattcggggccgggaacgccggccgtcagccagcgggcgggagaggaccggccgaacagcggccggatgacgctttccggatccgggaaagccaggctggattggcaaaggacgaaaaacggcttgcggacgtccgccagatcggccagcttccagtaatcccgggctttcaggcggattcccgcggtttcaaactgccgggtcagctcccggacaaagggcgtccggtcgattttcccgccggccggcatatacaggaggatctccggaaactccttcgtgtggaaatagccctcctcctcgagaatccggtacgcttcgtcgggagccggtccgaccggattgatggaggggagaaatcccggcagcttgtcggggatgaaactatggctggcccggaaacggacggcccctgaggattgggcttgggcgagccgttcccggtcgataatgagggacatcgcccgccggatccgggtccggtcgaagggcggattggcgcaactcatcatcaggtgatagacattcaggtcgccgccttcgacgacccggcagcccaagcgggccaagtcggccgaaaacggcatcacgtcgatttcccttttttcaaaatggtcgcgggtgtagtacgggctgtattcgaccatcgcgacacggggcagtcggccgaaataggagggattgcgggcaagccggacgccgacgatgtccaggcgggggctgcggatccagccgtcgaatttgaacggtccggtcccgaccgggcgggcgaaaaaccgggagccgtccttttcgacggtttccctgggcaggatgcggcagaagctcatgcttaaaagccccaaagccgaaacgtacggctttttccagtgcagctcgaagatgtaccgatccaggatcctgaagcccgcgacgtcttccgccgcgccggcggcgaaggcctcgcctccgacgaccttatcgacgaagaaccgcccgaacggcgattcggtttcagggttcatcaaccgcaggagggaaaactcgacgtcgcccgccgtcagctcgcggccgtcatggaaccgcacgcccttgcgtagataaaaggtgtagcaccgtcctccctcggaaatatcccagtactcggctaaatccgggacgatattgaggtcgttgtccagccggacaagcccgtcgaagatctgttgggtgacgaaaaccgattcccccttggccggatcgaaccggggcaggaaggcggtgtcgaagttgcggatgcgaaacgtatccccctggggatcaggcggttgatagacgtctcgacccgagggagaggcggaaaggaacaggctgaggaggatcccggagagagcgatccgggtgataattcgggatttcattccgctaaaaatcattatagtccaagcctgtttccgccgcaaaacaacctctcatgatagagcaatctttatgccaacgccttcctctcgaagataatgagagggaaaacaggctatacaaatcctaaaaccgggttttcccggctcacgttgtaaattatttttacaaagacgaggagccggtcgcgtcgatgactttctgaagaacccgaaacgcgttcccgccccagatcttcgcgatttggtcctcggaataaccgcgccgcaggagttccatcgtcacccgatacattcggcttacgtcttggcagtcctcgacctctccgcctccgtcgaaatccgttccgatcccgacgtgatcgatccccgccagtttgacggcatgatcaatatgatcgacgacatccttcaaccgggccggcggctcggggtatttgcgccgcagcgcccggaattcggcggccgccgccgtccgctggtccggcgtcatatccgcccaagacccgtacttggcgtccagggcggcgaacgccgcatcccgttccggatggggcggcggatcgacgagaaagctcgagacaaagcaaacctggagaacgccgcctttttcggccaaggcccggatcatgtcatcggtgaggttgcgggggctgccgcagagagcccggcagcaggaatgggtggcgatgaccggggcattcgagagattcaggacttcggcgaaggaccggtccgacaggtgcgacacgtcgatcatgacgcccagccggttgcattcggccacgacctttttcccgaattccgaaaggccccggtcctccggatccgcccgctccatgctgctgtcgcagatttggttgtcggcggagtggcagagggtgatatagcggacaccgcggcgggcgtacgtctcgacaaacgagaggtcatccccgatcggatagccgttttccaagccgatgaacgccgcccgcttgccttctttcttgagccgcgcggcgtcggccggagtcgtcgctttctcgaccaaggcgtgatgcttcgccgtcatggcctcgacggcgtcgatctgagccgccgcccggctccgggccgtagcgtacccctcgggcgtcagggggccctgaccggtgaaaacgccgaagaaaagggcgtccagtccaccctccttcatccggggcagatcgatctggccgctgttctccgagccgggctcatggcgcgtcccgatgtcccaggccggatcaagcatgttgccgggcgtgtcgcaatgcgtgtccacgctgaggatccgggcatgaatgtcccgggctttcatctcaagggcggcctcttcgtacaccggtccggtcgtggagagacaaccgcatccaaggagacagagagaaagcagaccgaccatcgttatgttgttcatggtttaaacctcaagagacggattatagcagattttgacaatcccccgccggaatgttagtaatacgcttcaggcgaaagatatcgagacgccgccgatgccgcccaaaaaagcttctctcctcgacgacaaacgggtggccgtcctcgtcaatccgaaatcggccaagggccggtggggaaaagatcccaaggcccgggcgtatatccatcgcgttttcggcgggagggtttacgaccgggcggggaccaaggtcgagatgatcgaaacggcccgccgattgagcctggaaaacgacgttctgatcgccctcgggggcgatggaacggtggccgacgcgatgcagggaatcttcaacgccggccgtcaaaaggacgtcatcctggggatcattcccttcggcagcggaaacgccctgagccgctctcttcagctctccctcagcctcaagaacgcggtccgggcgatccggtacggaacgccccgcgtcgtggacgtaatcgacatcggcggccggatcgccagcttcgtcagcgtcggggccaccggtctcgtcacgtaccggacctcccagtccaaggtcccggggctggtcggtcatcttctcgcctcccgaatcctgttcacccatccccggcacccgatgcagatcaccctgttcgacggccgggacgacgccggcgtctccttcgagcggaaggatctcgacctgaaggtcttcgacgtcatcgtcaacaagaccaaccatttcgggtacagttggctgatcgccccgaaggcgaaaatcgacgacggctatctcgacgtcacggtcttcgacatccgggctctgacctacgtctggtactttcccctgatctacctgggcatctaccagaagctcttgaagcactacaaggtccgccggatcgaaatccgcggcggcgacctgcatgcccagtacaacggggaagcgatcgaaaaacgcgaatccttcgagatgaatgtgatccacaaggccctccgggtgatcggaccccggaccgcggataaagcgcggatgaagcggaacgagcgggacgccgaggatttcggtttttagctccggtttccggcggccggcccccgccgtcccgcccgttgacggggcatcaggatagcccccgtccggaaatcgccgtagactccggctttcccttgaagaaacaggcggccgatcagcgccccggtcgccgcgtcgagctcatgatcgctgatccgcgggcgaagcccgcgcgcgccgaggcgctcgagcccccggcgtagtccggccgcgtcccgcttcgcccggggaatcccccagacatcctgggctccgccgggatacatctcgaggacgcggaatccccgtttctcgaggttccccttgagggcgatgccgcgcagcgtcagggaccgcatcgggccgagggtgatggggaaaaaaggaatgccccgggcccgaagctcccggtcgcaggggcgataatgctcgccgttccggtccgcaaacgacctccggccgggcggcaggttcagcggagcgtcgacgacgatgaggtcgggacggacccgcgcggccaaggcctcgatctgggcgtcgtcgaacaatatccccgtttccgctccgagggctcggaggacgcacgtcccggtcggccgccggggggagccggccaggtcgagacccaggacgacgagaggcttcacgccttccggatgacggcggtcgtctcgatgtccggcgggaattggaggtgggctttcaccgtgcaccgctcggccgatttgacgacggccccggcgtatttctccgggaaatccggggggagactgatcgtgatggacgccaagctgatcattttccccttggcctcgcgctcggtccgcatcgtcagctcgatgcccgacgtcggaatgttccgctcccggcagaatgaaagcacgtaatacccggcgcacgtcgcgagcgaggccaggaatagaatgaagggcgaaggcgcggatccctcccccccgtcgcggacgggctggtccgtgcggatcgtgaacccgtcgtgggaggcatcgacccggacgcccccgggaaacgtgaccttgaactcgttgtcggacatctcaagactcctttttttcggtagaacgcttgtttgggaagagggcgaggagaaaaccccggtcccgggcggtcatcgccgtccggccgaaataatcatgaacccaggcggagacgtgatcccggttcgtccggtggatgaagccgcgggcggaaagctgggcgatgatccggccgattgtctcgtcctgctcccgccggggaaggccgggcgttcgattgtccgcgccgccggccggcggcgcggttcgcttctcttgccgggctccgtcaaagagggtgaagagcgcgaggagaacggccgcggccaggttgtaggacggctggcggacggcctgggggatcgagaagatcaggttggcccggcgcagctccgcgccggtcaagcccgtccgctcgttgccgaacaggaggcccgcccgggtccccgccggcaggccgcggatccgtccggcggcttcgtcccagtccacgatggtttcgatcttccgccgtttcgccgtggacgcggcgacgaagtgaagatcgtccgtcgcttcctcgagcgtcgggaacaggcgggccccggccaggatgtcgccggcgtgaaccgcggttttcatcgccgccggaccaaaacgccggacaccgacgagtcggagctcggcgaatccggtgtttttcatcgcccgggcggccaggccgatattttccggattttccggacggacgagaacgacggccagctcgggaagcgcgtttttcatggtcgacggacgtcctttcaggttcccattatatgctataatgactccgatttccgatcccggatctttacggagcgttccggaagacgcccggcggcaaagggagcatctccggttcggcggtcccgcgtccgggatatctttcgtctcccggtttccttgatccatcgaccgcgggacgcaaggagtgaatccatgtggtgggaagaaaaaacgatgcggacgttccgctgccggctccggcagcagccgggagttctcggccggctgctctcggcgatcggcgcggccgggggagacataggagaaatccgcgtcctccgtcaaggaacgacgcacgtcgagcgggacatcgttgtcttcgctctcggcccggaggcgatggccaagctgatcgccgcggccggatccgttcccgacgtcgagcttctcgaggtccgggacgacgtcctggagatgcaccagggcgggaagatcgccatccgcagccggtacaagatcgacagcctcgaggtgctccggcgcgtctacacgccgggggtggccgaagtctgcctccaaatccgggatcatccccggctcgtccgccggttcacgtccatccgtcatttcgtggccatcgtcaccgacgggaccgccgtcctcggcctgggagacatcgggcctcaggcggccatgccggtcatggagggcaaggccagcttgatggagacgttctgcggcctgtccggcgtcccgatccttctcgacacgaaggacgtcggcgatatcgtcgacaccgtggccgcgatcgccccgacgttttcggccattcagctcgaggacatctccgccccgcggtgcttcgacatcgaggcccggctccaggaccgggtcgacattccggtcctccatgacgaccagcacggaacagccacggtggtcgtcgccgccctgatcaacgcggccaaggcggcccgcaagccgctccacgaccgccgcatcggcgtcgtcgggctgggcgcggccgggatggccatcggcaagatgctgatgttcacgacggggaggccggttctgggagcggacctttccagcgaagccctccgccggttcgagggatacggcgggaccgcttccgatctcaaggagatcatggccgcctgcgacgtcgtcgtcacggtgactggagcggccgggctggtcaagccggccatgatccggcccgggcagatcattctctcgttgtccaacccggttccggaaatcgatccggccgccgccttgaaggccggagcggccttcgccgccgacggcaaggccgtcaacaacgtcctgggctttccagggatttttcggggggccgtggacgccgccgtcgcccgcatcaccgaagacatgctcctggcggcctctcgggcgatcgccgacgccgcgcccgcgggcgagatcgtccccagtccgctcgaccggggcctccaccggagcgtcgcccgggccgtggcccgggtcgccctggaaaagggcttgaaccgcgacgacttgaccggatatttcgattgattgaaccggcccgccggcctcgcgagtcgagaggaaaacgggtgcggggggcggacgaagccgtcctgatcagatcgcgagccccgcgcaaccaagcagatgcggttccatcgacccgccagaagataagaactcatgattaattttgcgaggatggagatcaattcgactgtttaaaaaggagacgcgtctgcaaaccaaaggcgccggctcaaacaacggtccgggtggcgatgacgtcgacgcccgttccgagaacgtcgcggatcaggacgtctccccggcggaccgggatggcgggacgcagtttcgcgatttcagccaggacggggaagatcatctcccgggggacgcggccgctcaaacggacggcggtcgtccggccgtccgttccggccacggggatggaggcggccaagttccgcttcggccgaaggatttcctccgaggcgaaatcgagtcctttgtcgcactggtggccgcggacttcaagacggccgccggcggtctcgacttcaagctcgcagccgagcgggcagaggaggcacgtcagccggtcaatcatgggccgaaacctcaaggtcctcctcgatcgccgttttcaccatgatccgctgaagctccgagggaaggaggcggggatattttctccggaacagcgtcgttccgctcgaccggccgcagacctcgatccaaacgttccggcgcggctccgcgacccggaaatgaaggccggctccggccgttccgcgccggacgatctgcggcaggacatacttgatccccgctccggccgcgatcccggccggagcctcccgggccgcgacggccccccgggcgaaccgggcggcattcttccccgcttcgaacccctcgagggaagccccgtcggccacgtcgtggatctggaggacgttgccgcaggaaaaaatcccgggaaccgtggtcatgaacgtctcatcgacgaccgcgcctcccgtcgccgggctgaggacgacgccggcccgccgggacagctcgttttcgggaatgagcccgaccgaaagaagaagcgtgtcgcaggcgatctcccgctccgtcccggccaagggcttgaggcggtcatcgacccgggcgacgaccacggacgagacgcgctcccgcccgcggatgtcgatgaccgtcgtcgaaagctcgagggggatcgaaaaatcgaacaaacattggcggatgttgcgctcgagtccgccggcccacggcaggatttcaaaaacgcccttgacccgcaggccctcgaaggtcaggcggcgggccatgataaggccgatgtcgcccgagccgaggatcacgatctcgtttccgatccggaggtttcggaggttgacgaggttctgggccgttccggccgtccaaacgccggccggccggtcgccgggaatctcgatcatgtcccgggtccgttcgcggcagcccatggccaggacgacggccttcgcccggacgaggccgtacccgccgcgggaattcacccgcatcgtccggccggccgccaggtcgaggaccatcgcccccgtttcgaccacgattccctcccggaccgcgtcctcggccaggcgctcggcgtactccggaccggagatcgattcgttgtacaagaccagtccgaatccgtcgtggatgcactggttgaggattcctccgagacaatcgtcccgctcgagaaggaggacccgggcctcggccctccgggctccgagagctgcggccagcccggccggccctcctccgatgaccgcgacgtcgacgtcccggatcacggcttgatccttccgaagacgaggcgggacgatccgcctttcttggtgatgtcctccggtttcagcccttcggcctggagaatcccgatgatccggggagtgcagaacccgccttggcagcggcccatgccgcagcgcgtccgtcttttgatcgcgtccatcgaacgtgctccgaagggattgccgacggcctcccgcacctccgcccggctgacgtgttcacagcggcagaccatttcgccccagtcgggatcggccgcggcccgggcggcccggtccgcgtcgtccagccgggcgaagcgcggacggccgggcaggcccggctcgaatccttccctcgggcgcagatcctccctcgccccgatcaggccggcgacgtgttcggccagggcgggggcggccgtcaggccgggcgactcgatgccgccgaggttgatccagcggggatgccggcggctttcggcgaccaggaaatcggccggtccgtccgccgtcgccaagccgtcgagcttcggccgcgagccggcgtacgcgtggatgaccgggatccggccgagggccggaaccagccggaaagcctcggccttgaggcggtccatgatcccgcgggtcgagcgcgcgtcgtccttgtcctcggcggtttcgccgctcggacccaggaggacgggcccctcggtcgtgggggtcaggtggatgccgagcgaggattcgtcccggggaggcacgggatagacgggcatccggagaagatcgccggcggccttgtccaaaacgaggtattcgcccttgaagggtcggatgcggaaatccgccggcccggccaggccggcgacttcatcggcttgaaggccggcgcagttgaccacccagcgggcggaaacgggaccggccggcgtctcgaggataaaccgatccggccggcaatcggccgccgtgacaccgctttcaagccggacctcggccccgttcctccaggcgttttcggccagggcgatggtgaattcatagggggaaatgacgccggtccaagacgaaaagagggcccaagcgccccggacctccggctcgagattccggatcgcggccgcatcgacgatgtccaggccgggcgttccgttccgctccccctgggaccggagggcctcgagatggcggcgtccgtcctcatcgaaggcgacgacgagctttccggttttcttgtggggaacgccgagggcggaggcgaggccgtagatcgcccgcagcccggcggcgttcgtccgggccttgagacttcccggacggacgttgaagccggcgtggatgacgccgctgttgcccttgctcacgccctcggccaggtcgctccgccgttccaggaggacgaggcgcagccggtagcgggacagctcccggagaacggcgcagccgacgactccgccgccgatgacggcgacgtcgaacagtccggcggacattggggcacccatggggaggaacgatcatatcaaaacggcttgccggccgtccacgggggaaagcggcccggaaaagaaatcacgccccggctgatccccccggcgaaagaacggaatctcccgaggaacgagatgagaaagatcgcccctctaccgcggcgggatcgcggatccgcggccgccgccccgggaaggcggatgttccgaacgcatcccgtccgaaacaggcggcgaatccgaatcccgccggaaacgcaagaatggaagacaagcgccgcgttgcatcgccccggccgtttttggtacattgcctcccttcgatgagaaaaaagatcctgttctcggcctcggtcttccatgccctgaccgacgcgtccaccgtcgtcatcccgacgatttttcccatcctctacaaccgcggttttctgatcacccggtattcccagatcgggctcctctccaatctcggcctgatcgccaccgtgctttttcaattcgtcgtggtccggctctcctaccgccgggactaccgaatcttccttctggccagcggcttaggcatctgcgcctgcttggccctgacgcccctggccggctcgtttttcgtccttctcctttttttccttttgctccgcttggccgcgagcgtctatcacccgctgatcatcgcctggatctcaaaatcggccgtggattcggacaaggagctggaccgggccatgggcatccagagcggctcgggcaacgtcggggtcatgctggcttacttgacggtcggattcctggcccagcgctggacatggaaaactcccctcttcgcctgggccgggctcggcctgcttctcctcatcgccgtcctgctgacgctccgcggcgttccttcgcgaaacgaggaaatccggcctctccgggaggcgcagtcctgggtccgctccctggccgccgtcaagcgcttcgtcccgggctttttcttcggaggcatgggctggaacgtgaccgtctttttcgccccctcgcttctcaaccaccgcttcggcgtcccgatgggacagaccgggctctttctggccttgtggatggggatcggaacgatcaccggctactcctacggtccgctcagccggcggttcgggcggaaaaagctgtttttgaccactttggccggatcggcggcctgcctcgtcgtcatcggctggtcgccgattcgaggattggccgtggccgccctcctcgtcttcggcggtctcctgcttatgacctacccctcgctccacacattcgtcggctcgaccgtccggccggaggagcaaacccgggccttcagctgggtttccaacatccagatgatttccggcgcgctcgtcgccctggtctcgggcttcctctccgacgccgtcggcatccatctccccttcctgctcgcggccgtcctgacgctcggcgtttttctcttctacctgccccgtggcccggaatttttcggcggccggagcgaacgcgcggcctccccgggcgtcaacggcggcgcctgatcggggaggccgggcccggcgacgagccagcctcggctttgcttccccccggcccgatgaataaaatgaagccgtgagggaacgaacatgaaacgaatctccgccggacttcggattttcgccgccgccgggctcggcctcgtcctcctcctccagccggctcccgcggcgatcgatgtcgacaaggtgccgaatcccctggccgcggcccatcaatgggtcggagacaacgccggagtcctcggcccggaatactccgccttgatccactccgcctgtgaggcgctcaaggcgaagaccggggcggaatgcgccgtcatcaccgtcgacgatctcggaggcctgtccgtggaggatttcgccgcccggttgttccagagattcggaatcggcgaggccggaaaggaaaacggcctccttcttcttttttcgcggaacgaccgaaaagtccggctggaggtcggctacggccttgaggaggcggtccccgacagcttggccggccggattctcgaggaacaagccctcccgtttttccgggaaggccgatacggccgcggtctgtacgcggccgtccggaaaacggtcgaaacggccgccgccgcggccggggcgactctggggcttgaggatccggccgcttggccggcccagccccccccgccccagccggcggccgcggacatccgggcgccgtccccggcgggaaaaaaggtcaagccggatcctcttccctccgccctgatcggagcggccgccgtcctgttgttcatgatcctgggcggcgtccgcgtcgcccgccgggtcgccgctaaacgggggaaagcggccaagatgaaggccgcccgcggggcggacaacgtctccgccctggcctggacggggagcgccgccgccggcctcgtcctggccgtcgtgaacaagtccttcctcccctacctggcggcgttcggcctcgctccggcggtcggctcgttcatccaaggccgggcgctccagggcctccgccggaaaatcgccggccaccgggaaccgtgctccaagtgcgggcggccgatggatcttctcgacgaacaggccgatgacgccttcctctcggcggaggaggcggccgaggaaaaagccggagggatggattacgaggtctggcagtgcggctcatgcggagcttcggaaagcttcgccatgacgctcggcaaggcggccgcctgtccccgctgcgggcggcggacgctggtcacggccacgacgacgctcgtcgccgcgacacgtgcggccggaggaaaagtgaagatcgaggcggattgccggaacccgaactgcgattaccgcaaggtcacggaacgctccacgccccgccttcccccgccgccgcccggacggtcgttttcttccgggcgcggctccttcggttcctccgggcggagctccttcgggggcggacggtcgggcggcggcggagcgtccaagggctggtaagccggccagcccggatcatacggaacgatctcgatttcctcggcgggcgcgcgccggattctttcctcgagggtctcggcgcccgcggtctttttcgccttagcgcagggggacgggacgccggatccagtcgagaagctcccggtggctgaccaggcgcgcctccggcttgctcaggacatagtccaagaacgcctcgagcgcggcccggcgtgaaaagatcgtcgcggccgtttccggcgcgccgccgcttttcaccgtgtagagctcgctgtgcaaaccgagcggcatcgggctccggctcccggcgaggcggaggtcgagcgagtacttcagggtggccagaaattcgttcggcgtcatcgagaattcgatccagagattccaatccatcccggtgatctcgccgttctccgggtcgaaataggattgacgttccatcaaggccgcccgaagcccggccggaaggccgtaacgggggcacgcctcgtcgggcgggacgacaaagtcgacgatgggcatttcccagaatcccggatgccggtcgagaagatacggccaggcgaattggccccgatgcggcccgagggcgggcccgtcctcgagactcgaatcataggcgaatcccgccttgtgggccgcggccaggccgttctcgctccattcaagatacggagagcggaacccggccagggtcgagcgggaaagcccgagccccgatccgggacggggatattcggggctttcctccggatcccacgggcgggtcaggagatcgatcgcccgccgcatttcttcgtcccattgggcttcggtgagggggcggccgtgcgggtgcgagtgagtgtggatgccgatttcgtggccctgatcgacggcctcacgccaggcccgcttgacgaaaacggggagatcggccccggaatagaaggtgtcgggaggggcgcccgcctccgaggcgatgtacccggagacgacgaaaaacgtatagtggggagaaacgccgtcgaagctcccgggatttccggttccggccggattcctcctcgcggcgaagagcgaagtgagataatgcaggccgccgtcgcttcccgaaccggggaggccggaaaagccgttatcgtcggtggagacgcagacgaactgggggatttccgaaacggcgagtccggccggcggtccgcccgcaacagccggaccggtctgcgcctgacgtccgcggcaaaccatgagagaaagggagagaagaagaacgccggccgaaaggacggcccggaagacaaaggatttttcgtttttcacgtgaggcctccgatcaggtttgagtccgggtgagattcgcgtccggcggatgaccgattccggatgccgcggaatcattcaggccgctccaaaaagcgtatgcccggcgggcggagaagtcaatacaatccggtgctcccgaaaccgccttccccgcggctcgtatcgtcgagcgcttcgctttcgcggacatcgaccggaacgaccggctggatgagcatctgggcgattttcatcccggctttgatctcataaggctcccgactcaagttgaccaggacgacccgcacttcccctcggaatccggcgtccacgacgccggccagccggtggacgcccttgagcgaaacgccgcttttgtcccagatcaagccgacgaagccgcggggaatcgccatctggatcccggtcggcacggggaaaagctcgccgggagacaggattttatcaacacaggcgaataaatccattcccgcgtcgccgggatggccgtacaccggcaacttggccgccgggtggatttttttgactttcagttccatgcgtgtttctcccgaattttaaaggatatcccggcggcgtaaatcccgccgctcacagggcctcgaccgtcgcctcgccgaaataagagcgggcgatctcggccatcctctccagctcctctcttgaaaacggctggaccgcggcaaatgacggatcaagcgtccgggccggcgaaaacgactggatccggtaagacggggcgccgttcagccattcgccgattttccggacgtcctccgggccgaccaagccggggacgacggtcgtccgaaagacatgaggccggccggacgcccgaacgatttccgcgctccgggccacggccgccggatcgacgggcgcccggacgacctcggcgtaccgcgccggcggcgccttggcgtccatggcgatccagtccaccagtccggcctcgatcaggcgctcgagacggtccggccgcgagccattggtgtcgatcttgaccaggaggttccgctccttgatcaccgccagcaatccctcgatttccgggtggagaagcggctccccgcccgaaacgcaaagaccctccagccatcctttccgcgcgtccaagaaggcgatgaataaatcgagggggacgtcggccagcgtttccggacggaggaccaggtcggcgttatggcaatagggacagcggaaggtacagcccgggaggaagatcgtcgaggcgatgtgcccggggaaatcccggggagcgaatttctctagtcccttgattgcaaccacgccgcgagctcctcccgggtgttgaggaccgcctccacacggtcgccgtcgcgacagacgagcgttggcaggataatcgcgccctgggcgtcgcgcttgatccggggaagaaacgtccggatccggatccggccctctttctcggcgacgtcctgcgtctcggccgtgatcgccgcttcccggagagccgccttcatatcctcgcacttcgaacagttcgggtaggtgaagagaagaaaatccatgcctccgcctcctcagccgatcgtcgtgtaaggcgtccggtcggcgaattccgcctgtttgccgtcgttccaggtccggatcggccgaagatagcccacgatccgggagaagacctcggtctcggtcccgcaatcagggcaggagggatgcgcccccttgagatagccgtggttctcacagacgctgaacgtcggggtgatgctgaaatacgggatccgggtcgcggagatcttccggacgagcttgcggcaggtctccccgtcgatggcctcgggaaggaacgtgtggaagatcgtcccccccgtgtacagcgtctgaagcgtctcctggtgccggagggcttcgaacacgtcccgggtcgcgtcgacattgagctgggtggaattggtcaagtacgggtgcttgtccgtgcccgaggtgacgatttgggggaacttctgcttgtcgaggcgggccaggcggtaggacgtggattcggccggcgtggcttccaggttgtacaggttcccggtttcgttctggtattccttcaaaacatcgcgcatatagtcgaggatctcgacggcgaacgtccgtccttccggcgagccgatgccctttccgagcaggttgaggcaggactcgtgcatgccgcagacgccgatcgtggagaagtggttgttgaaatggccgaggtagaccttcgtgtacggcatgatgccgcgcttgagcatgctgttgacgatttcgcgcttgacctcgagcgactccttggccatgtccatgagctcgcgaaggcgggccttgtactcctcgggcgtcttgctgacgtagccgatgcggttgaggttgatcgtgacgacgccgatcgatccggtcgagtcgcccggtccccacatgttgcccggccggcgcatgagctcgcgctggtcgagattgaggcggcagcacatcgcccggatgtccccgggattcatgtccgtcccgatgtaattctggaaatagggaatgccgtacttggccgtcacgtcgaacagcagcctggcgttgggggtgtcccagttgaaatcccgagtcaggttgtacgtcgggatggggaaggtgaaaacccggccctggtggtcgccgtcgaccatgagctcgagaaaagccttgttgatcatgtccatctcggcctggagctcgccgtaggtgaagtccatttcccggccgccgacgatggcctttttcggagccaggtcggccgggacggtccagtcgaaggtcaggttggagaacggcgtctgccagccccagcgggaggggacattcagcccgtagatgagcttctggatgtcctggcggacctgcccgaagccgagcttgtcggcccggacgaacggggccagcagcgtgtcgacgctggagaaggcctgggccccggcgaactcgccctgcatcgtcccgatgtagttgaccatgtggagggtggccgtctccaggtgcttggccggggaggaatggacctggttggggacgtggccgaagcccttacggagaaggttttcgagcgaccagccggcgcagtagccgacaatcggataggacaggtcgtggatgtggaagtccccctccaggtgggccttcttgatgtgctcgccgtagatctggttgagggcgaagttgctgaggacctcgcccgagatccgggcgttgagcccggagaagctcagggttccctcgttggagttttcccggatcttccagtcgtgctcgtcaatgtaatcccggatcaggcgctcgaggttgattcccgtctgcttggcttcccggatgctcttgtggcgctcccggtagaggatataggacttggcgacctcgaggtatcccctcttcatcaggacatgctcaaccatgtcctggatctgctcgaccgaggggaccgtgtagccgccgaacttgtcctccaagacgaacgtcacgatatccgagactgttttggcctgggagtagtcatcgattccctgcgatttcatggccttgaagatcgcgttggtgatcttgtcctgggtgaaatcaacaatttccccgtcccgcttcttgatccgggtgatgactcttgagttcatcggctcctctcctcctcttataaatgccggcggggaccacaagaaacaaaaaacaggcgcgcccaatcgcctatatattgtggttccttggcatttttaatacaatatgttgtattgcaatgccacgataagcctttcgtccgcggctgtcaagcgattttttaaattaaaaaatcaggcccaaatcacgcagtttcggctcgagattttctccgggcggacataaaatgcccttcattcccgcgcgctcggcgccggccacattgtccggaaggtcgtcgatgaacgccgtccgcccgggagcggcccggccggcgcgaatcgcctcgaggtagatctcgagctgcggctttcggaaaccgacatcgaacgagaggatatactcgtcgaagatcaaaaggtcggggaatgtcgtcttgacgtgcgtccagcggatgacgtcggtgttggaaagaaggaccgtccgatagcgggatctcagcttccggaagaggccgaggacagccgggaccggcgtgaacacgccctcgcagtaggccgagaaaaattcttcgtatccgcccgtccattccagcaggtcgcgggaattccggtagaaatcatacggcgaaagagcgcctttttcaaagagaacgagaagatcgagattgtcggcgacgaccgcttcgatttctttctccggccggccggaaaaccgggcgatcgcccggtaaaaaacggagttgtcgaaccggaggaggacgttgcccagatcggaaacgacggtttcgatcaccggcccgcccgctccagcacccctccctcccgttgatcggcccgccgcaaaaggagggcgaagacgaggccgacgaccccgaggcaggcgaacatcaccatgctcgcggtataggaatgcgtccagtcccggagcaagccgttgagcaggggaaagacggccatcccgacgttttggatggccgtcatcgtcccgaacgccgtcccgacccgctcgctcttgacgatcagcggaatcgacggccacagggcggcggggacgaggacgaaagccgctcccagggccagcatcggatagaccggataaatccgggtcaagcccatggccaggtggctggggatgaggatcagcgacccgaagatcatcagggtcgcccgccggccgatccggtcgacgagcttgccggcgaacggcgccaggatcatggaggcgaagatgatgatcgaggaaatgcccccggccgtggtgaagagatggagcaggttatcgaacacccgggccaggaatccgcccgtcccctcggccacccgggcgatcccccacttgtcgacgaagaaatccgtcgacaggttggtgaaggggaaaatcgccgcgtagaaggtcagacagaggaacgtcacgtaccagaacgacggcttgaacgacttgagggaggagaacacgatcttctccccctggctttcgtcccgaagacggaggacgcgctcgccccggcggtccatgacgatatagaccaggttggccgccagcgagacgccgcaggcggccatggccacgaagagggccgcccggtacgtcccgtagtagctggtgaagagctcgccggtgttgaaagcgaacagggaccccaagcggctgaaggtcagagacaggccgaaggaaaaggccaactccttgtccttgaaccagcgggccaggatcgccgactgggcgacgatgagcggttccgagccggcgccgaagatgaaccgtccggcgaggaggagcggaacggttttcgctttccagacgatgagcgcgccggtgaaaacgaggagggagaagatcagggaggatttgcgggttcccagcttgtcgatcaacattccgccgagaagaacggccaggatggcggccacgctgtaggcggtgaaaaaggccccgaccgtcccccgggcggcgttaagatcctcgaccagcgtcggggcgatggccgagacgatatcgtaggcgaaatagctcccgaaggaaaggagggcgacgaaaaagaggacggaaaagcggtagaacggacgcgcggggtgaaaaaatccggcggtctccggggcggtcatcgccgggccccggtgaccgggacgctcattccgagttcggggagagcgatccaaccggcccaacggtcctccgatttcttcatttcggccgaccatgtccggtcggccccgtccggcggagtaggcgtgacgaccgtgaatttcaagatcttcccgtcccaggcgggttcggccagcgggacattggaaaaccatccattcgcctcgctcagctcgccggccagccggccctccttcaggctcaagaccagggtgagatcatagaactccccttcggcgttgacttcaagagcccaggagccgaggatggcttcgacggtctcactcccggccgggacatcctgggctcgggccgcgattccgccgggagccgaaaaaacgatcccggccgccataagaacgaggatgattcgttttttattcacgcgacctccgccgaaaagctgtttggaatggaatcccaagggcggcattatatcaaggcggggaggaggagtaaaacgccgattgattcccgaccccggccggacatacaataggcccgagaccatgagtctttccatctccgcctccaatctcgagccttacggcgaggcgatttcccgggaacagctccgcttcgaccgggacggaatcatcggccgcatttggaaacacgatccgaccgtctggaagacggaggacgtggagatttccaaccggctgggatggctggaagccccggcggccgcggtcccgttcctggaagaggccgaatccttcgccgcggaaatcaagaacgcctgcttttcccgcgtccttttgtgcggcatgggcggctccagccttgcccctgaggtgttcagccggatcttcggcccgccggcggacggcctcagtctcgaggttctcgacagcaccgacccggcggccgtgcttcgctgcgcccggacccttccggaagggaaaaccctgttcttgatttcctccaaatccggaacgaccctggagaccgcctcgttcatgaactatttccatgcccggacgcgcgagcggctcggcccggctccggcggcggcctcgttcgcggccatcacggatccgggatcctttctcgagtccgaagcccgccgcctcggcttccgccggatctttcccggaaatcccgatatcggcggacgtttctcggttttttcccccttcggtctcgtgcccgccgccctgctcggcctgccgctgcgggcgtttctcagcgaggcccgcgaagcggttggaacctgccgccgcctccgggccggggaaaatccaggggcgaacctggggatcatcctggggacgctggcccgggcgggccgggacaaggcggttttcctgatgtccgcccccctccaagatttcggggcttgggtggaacagctcctggccgaaagcacgggaaaagaaggtcaagggatcctgccgatcgtccggccgacggccgctccatcttcccaaccggccggcgaccgcctgacggtcgccatcgggctggccggcgacgcggccctggccgagtccgtgaataaagcccgggaacgcggcgagccggtgatttcgatgaccctcgaggacccgatcgagctcggggcgcaattcttcctctgggaattcgccacggccgtcgccgggaccgtcttggggatcaatcccttcgaccagccgaacgtcgcgctttccaagaaaaaaacggaagcggccttgaatgtctttatgaaaagccggacgtttccggaagaatcctccacctgggaggaagaaaccctcgccttctacggggaaaaacgggaagtcggactccgctcgggatttcggacgctgtttaataaattcagggacggcgggtacgccgcgatccaagcgttcctccccccctcccccgaaaccacggaagccctccggacgctggccggccgcatcgagacgcgcacgggacggcccgtcgtcttcgactacggcccccgtttccttcattccaccggccagcttcacaagggagacggcggagcggggatcttcatccaactgaccggagtccaccccaaggacacggccgtcccctcctcgcctgaaggcgggggatccgcttattccttcggaaatctgatcgacgcccaagccctgggcgaccggcaggcccttcgggaaaaaggccggcccgtggcccgcatacacttcaagcgggacccggtcgaggggatttccaaagccgtcgagcgcttgttctgagcccgccgggatcaattcctgtttttgagaaaacgctttttcctgtcgggagggcggatatcgtgaaggcggggacggccgggcatccattgtccgggcgatgcttttcttcttgagacatcttcgagaaaccagcccggctgaaaaaaaaggccggttcccccgcgggggaaccggcctgaaaaatcagcggatgcgtccggcccgctcagtagagcccgatgaagacgacgtcggcatggaacatctccttgctcttggcccggagcgccttgtccacgctgtccttgatgttcagatagaaccagaccttgtcgaacagtttcagctttccggcatagaattccgcgaaggtcgatttcgaatcgacgatcaccttgccgacttccttcccgtcggcgcccatgatcgaaatgcggtcggcggcgccggcggtcccgggaaccagagctccgaaggccttgcccttccccttgccttcccaatccgcgttcctatcgaatttcgtcagggccagggagggatattcattccgggacttctggttgaagaagtcctggggggcggcggcggcggtcgaggtgtagacgctccggaaccgctcctcgccttccttgatttcgatcgactgggcgacaagaagattgggcaggtccttattgaagaggcctttgatccggaccggtttcccgatcagggccgccgcgtcgccgccctcgacggggcccgtgacgcagacgtcgaacccgggaacttcatccatgaagaagtagcttcccttggcgtccttgaccgttccttccaccgtgttcaaaccgatgacgatcgacagcccggactcggtcgtttcggcgactgcgccttccatcgccgccggctcggcggcttttttgccgcaagcgaccgccgacgtcaggagaaggagggccgtgaggctcaggcttgcgaatttcatcatatcggccttatgaaacatagcgcatacctccaaagaagagtcgatccaccgcgatacgggccggaattataacaccgcggggaggaaaaagcaaagcggctccattgacaggatttccagcccccggtatattcaaaataccgacttcatccaaggaaagatctcatggccatccgcgttttcatcaccggggggacgttcgacaaggagtacaatgagctcacggggtctctctatttcaaggatacccacctttcggaaatgctgaaactcggccggtgccggctcaacctggaaatccggaccttgatgatgatcgacagcctggagatgaccgaggccgaccggctgatcatcgccgacaattgccgggccgtccccgaggaccggatcgtcgtgacgcacggaaccgacaccatggtcgagacggcccggttcctggccgagcgcgtcgagggaaagaccatcgtcctgaccggggccatgatcccctataaattcggaagctcggacgggatgttcaacctgggaagctccctggctttcgtccagactctccccccgggggtttacatctccatgaacgggcggtgcttcccttggaaccgggtccggaaggacaaacgcatgggcgaattcgtcgacgctccctgacccttcccgccctcccgggagagggagggcgggaagagccgctggatcctagcggcgtccgccgaggccgaagaagaacttgaccccgaccctgaaggcgaagccgttgatatcgatggccgctttccggatatcgctccgggaactggtatcttccggcttgtcctcgtaaaggccgatttcggagtaatcggcgtcgaacgtggagctgtgccagttgtagtaccagatgttgccgtcccactcgtcgtcgctggaactctccgcaacataatgggtcgtccaggcgcttccggtccaccagccgtaatccctgtggtattggtaatcgtagctggcggtcccctcccaatccttgaagttggccagccggtaaaacgcctcgccgaacagggcgatgttttcggtcaggttataattgaagccggctccgaaatgaaatcccattgtgttgcaagtcgcctcgaaatgatcggtttcgctgtcttgcgaatcggatttgtaatggggaggccaaagatccccgtcggcccagtggtactcattgtaataaccccaggtcccctcgtagtccatatcggatttcagggatccgaggtagtagccggcgccggcgttgaagtaaacctcgcccatgtgatcaaggggaagataatagtaaaagctgagggtgatgggcgtgacgctcagcgtctggtcatagacgtttttattgtgatcgtaataggaataatcgacgtaataccaggaataatcatacgtggtcgcgccggtgtcatcgtaggccaggttgcccggattggttttcttgatgaattccacaccgaggccgacgccgaagttccggccgaaccgggcgaggacctcgcccttgaaattcgtcatcgacttcatttccttccaatcgatggtgtagtaatccttgccgtaatgatcattgtaatccgcgacgtacgtattccagtcccggatgtacgcgttgaagtctccgccgttgatgaagcccaggccgccgctcaagctgaagccgatcttgggcccgccgttgccggcggacggctcactcgaatagcggacgggcgccggggcgggagcgggcctcggcggcgcggccgcgccggtcccctcgtccaggggcggctcgattttcagcacgttctcccgggcgacggcgatcacgcccagggacacgtcccggatggaaatggttttctccgtgaccgcgacgatctccccttccatgaccgttccattgaccagggtgatcttgtacttctgccccgggggctgaagctggggcgccgcaaacgacatgaccgcgagcccggctaaaaacgccaggagagcggtcccgaccaacaaccgctttctcatgagatatccttcctttccggcggagcggtgacgatctgcccctcgttttcgggcggatcttttcccttccgtcgctgtctgcgattgtaagcccaaaaaaaacgctctgtcaaatctttttttgagcctttccgccccccccgcggcctaccgccggcggggggaacccgatgatttcgagccgctcgaggaggaggacttcgaagaagacgaggaggaccgggacggcttcccggatgagcgcgaggaggaggaagaagaggaggatctcgagacggaccgggaggaagaggaagaagagatccgggagggcgcattatacgagcgggaagaggaagagctccgtggcggcctctcgtacgaccgggacgaaaaatcagaggagcggggcgaagaggaggagcttcgcgggggggaggaagagaatcgcggccggattttactcgaataagaccgctccggggaagacaagcgccgggacgggctggtataagagcgggacggctcgtcggacgaacgggaggaggacatgagccgcgacggccggttattgaaccgggaggaagaagacgcgtccttcgagaacggaggagtcgagctcggatacgcccggatccccggcgaggacggcctttcagggaacgaggagcggacgcgttcttcggaagaacgggaagaaggttccccccgccgcgacggcgaaggagccgagctcggatacgcccggatccccggcgaggaagaccgggaggaaggatcttctttccgaatcgccgggcggtcgtcgcgcggaggggaggagaaggagcgcttggccagatcggccaggcgggacggcgaggaggatcgggagggataaaccctcatcgtccccggttcctttccgccggccggctttccctctccggaaaagttcggccgcccgccggcatcgggacggatcaggcgttcggcggcgggacggggcgtttccggcgttccccgctcagccagacgtccggacgaatagggcgtgcggctggttcccagctcgcgggaaggcgcgtcgccgtccggacgcttgatttccggggcccggaggtcccggccgttcacgggcgccggccgtccggccgagggagtgaagccctcgccgacgcggcggagcgcgccgcggttgatcgcctcgcgggcccggccggctaaggtcgacgtccgttcgagggcgggccggatgtcgggctgggcggccccgagcgaaatccggccgaggtcgaggccggaccggtcattaagggcgatccgggaaatggaccggtcttgcagctggctccggcggacgacggtcatcgaccgggagtagtcccggtgacggtcccatccgccgtgatgccgtccgtagaaatggttgttaatgatgacgacagggtaatcccaatagctgagggggcaccagccgatgtaatcgtaatgattgtaccagtggacccaggccggcccccacgaccagcgatgcatcggaatccaataccagcccaggccgtagcgccagccccaccggccgtaatgcgaggtgcaccagccccaaggctcagcggacacccaggtccagccgatgatcggataccagacccagcggccgtgataatacggccgccagccggcgtcgtaaatcgtcggcacccaaacatagccgtagtcggcctcgtagcaccaccggccgtagtccgccaactcatagtcatagtcggcataatccgcgggcagataagtccggctcaagcgccgggcgtacaatgcatcgcgcgattcgttccacgactcaaaatcgtcccggcgggcgaacaggccggacggccctccgctccaccggccttcggcggccgtaatcatttcccccgagcggacgagaacggatccgtcctcaccggccgcttcggcctggccgctgtacacggagaggtccgtgcggctgttcgacgagacgtccagccggtacaggccggcctcaaggacgtaaaaggacgcgtcgggcgtatggatctgaagatttttctcccggtccaaatcccggacccggaaaaagacgctgccctggataaggtggattttggtgggatcgccgtccctcccggggagcccggcgaggtcgacttgggtctcccggtcgaggcgcagaatgttgccccggccgagctggatttccgcccggccttcccgcgttccgagcttgtcgccttccacgacgacgaggttcacttcgccgagctcataacccaggtcctgagcgcgctggatataaacgtcgcccttgacgtaactcaaccgggtgaagctccggtcgtagtagccctcggattgcccgaaggccaggaacggaaacgccgcgaccgccgtgatcgccaaggtcatgagttttttcatcttcgtctccttgcgacctcttaaattgcaacttccatgccaataacttttcccctgtcggcaaggacatttcgccggccggggctgtcctcgataggggacgcatgctcactttcatgcggagaacgccctttttcaaggaaaaaggaatcgcggcgcgtttcgtccggttacattccggatcggaacgagggaaagaatgaaatggcgttcgaagaatgaacaaatccgggggggaatccccccggatccgggaaggcagtcaaagaggagatcttattttttcttgaggatcggcatgccggtcttgggagtttcgacaacctggtatccggccggcaccgcgtcgagggcgccttccttgacctctttgccgaaataatagatcgtctgctgccggccgcccttgagagtcacgtttttcgcgtgaaggaagtagctggcccctttggaatttttaaattcgaacgccatgggatattacctccagtggattggtgccttcatccatttcccaaaatccggcctgatcgtttttattggattctccatcatgtctctgatcttgtcccattgataacgaaaattccggcgattgtcaagacagccgggcccgaggcccggccgtctcaatgaacgaagccgaccggcggcgtttcggccgaagggagggggccgtagcttgcctcatagccctggatgttggacgtcagcgcgcccaggaaacgcttggcgtgggcggggctgaggatcaggcgggcgatgagcttgccggccggatgatcggggaaaagaaaggcgaaatcaaagatgaattcctcccgcgaatgacggatggcggccacgttggcgtattggcccacggccacggcttcgtccaccttgatgtcgatttttttctcatccatggttgcctccttccgctgtttcgacaaggccttctctccgcggcaaaggccgcgacgacaggaagtcccttgaagcttccctcttgcttttttaaatttcttcgtttatattgtgtacggctttcttttgcgggctggagaaagcccccaccttatggttcccatcatcaaccccccttttgctgacaacagcccgcataacccctctcaagggagagggggggcaaaagggaaaacggaaactcattggatgggatcgccgtccggatatcctctgatgatttccttgggaatctcatagacttttttccagccgccgtaccgggtgacgagatcaggcttggacaagcctcgtttttttccgccctgaatcagataaacggaacggttcggcaacgatccgggttcgatgaccatcaatccctcgaagctccggctgatcgtctcgcccgtccgcatccggtcgagcgtctcctgggggatatcggcgacatgcccccacggattgtttccccggttttggtcgaaattgtatttaaagagactctcgaggtccttgaacggccggcggatcaaatcgcccggcccgcgccgctcgatcaggtacacggccgcgccgcggcccttggcgtacttgccttcccagcttttttccttgaggcggtcgcggtcgacctggtccatatccggcgagggccggccccagtccccgccgatctcctgctcgatccgccggagaagggaggaacagtcgtatagggaggggacgcgcgtcccgccccgggcggccgattcgaggtcgcggaacgtcccaagaagatagcggtaggcccgctggaggcccggcctcacggaagcgcgcgacccatattccagccgccctgccaggcggtagaacgtccggccggcggcggcgaaatgatccgccgcgaacaaggcgtccatctgattatcggcccaagagccgtaccggtcgtcgatctggctgtcgatcctatcggcgatctcggcggcccggtccgctaaatcgcgggccaagtcttttaagcggctcgacgcgttccatccttgggacggctcggcgccgtattccccgtaagggatggaagccaggcaggacgcggagagggcggccgtcatgaaaacgatcgcgatgagaaccggcttgaatttcatgcgaaacctccttggcgatgccgttattctatcatgaatcggccgccgccgagcgccctttcccgattccacgtccgcctgagccgccggccgcccttgtgctataataacggccgatcatgggaaacgtgctggaattggcggatgtccgcaaatcgttccggccgggattcatccccaagaagcgggaggtcctgacaggcgtctccttcacggtcgccgcgggggaaatcttcggatacctcgggcccaacggagccggcaaaacgacgacgatcaagtgcgttctcggcttggtcttccccgatgccgggaccgtctccctcttcggccggtcccccttgaatccccggtcaaaggaccggctcggttttctgccggagaatccttatttttatgatcacctttccgggcgcgaattcctcgacttttatgcccagctcagccgggtggacaaaaccgagcgggccgggcgcatcgaccgccttctccggctcgtcgggctggagagagccgccgaacaggcgctgcggaaatattcccgggggatgctccagcgcatcggcctggctcaagcgctcatcaacgagccggaattcgtgatcctggacgagccgctcggcggcctcgatccgctcggccggaaggagatccgggatatcatcctcggtctccgcgcggccggccggacggtcctcttcacctcccacatcctccaggacatcgagatgatctgcgaccgggtggcaatcatcgtcggaggccggatcctcagccagggccgcctttccgatctcgtctcggaaaaaatcctgttcaccgagatcaccctggccggcgtcgatgacgcgtcgctggcggacttcggcgaccgcctccagacgcgggaaggccgaacgcttctcaaggtcttcgacgaaacccgggttcagccgctcctcgacctggtccgcgagcgcggcggccggatccacgccttggttccccggacgcagacgctcgaggatattttcgtcgacacggtggcccgccgatgacgatcctggtcatcgcccgccacacgttcaaggaggccgtccgcgaccggatcctctacctccttctctttttctcatccctgtcgatcatcctggcccgggtcctggccgtcctgaccgtgggcgaccgggtcaaagtcgtcaaggacgtctgcttggcttcgatcgccttcttcggggctttgatggccatcctcatcgggacggggctggtttacaaggagattgaaaagcggacgatcttcactctgatttccaagcccctccgccggtcggagttcctgttgggaaaatatctcggtctcgtcctgaccctggcggccatggtcgcggccatgaccgtgatctcgctggccgtcgtcttcctccacacgttcactcttgaaatccagatgttgccggcggttttcttcatctttctggagctgatgcttctgacggccgtggccgttctcttttcctgtttctccacgccgatcctcagctcgctgttcgccctcagcttctacctgatcggccatttctcctgggggctggacaccctgatccggaaaacccctccggggatcggccggaccctgctccgggtcttggacgcgatccttcccgacctggagaatttcaacatcaagacggaggtcgtccagaacctgccgcttccctccggcttcggactcggcgcggccggctacgcggtcgtctacacggccttcgtcctgctgctggccgtcttgattttccggcggcgggatttcgtctgagccatggccagaaaaacaccgcttgccccggccgccctgctcctcctgctgggcggcctcgccggtatcaaagtcgggcttgacgggatgccccgggcgaagatccccggggccggcatcgtctacctgccgtccggaccggccgtgaaggccgccgttttcggcttttcctcgctgacggccgacgtttcctatgtctgggcgattcagtactacggcaacacggccgtcccggaccgccgccgccacttcaaccgcatcttcgaggtcatcgccgacctcgacccgaactggatggatccatatctcacagcggctttgatcgcccatcacgacttccgggacccggagctcgccctgaagatgtacgacgacggcgcggcccgcaatcccggggcctggatcttccccttcgaagccggccattactgccagctttatctccgggactacgagcgggccaaaagctactaccggaaggcgatggacctccccgaggcgccggccatcgcccggcgtctcttcgccaatgccgccttcaagacaatggactaccagacgtcctgggagacctggcgcgaggtctacgaaaccgcgcctgaccgcgaaatcaagaaaatcgccagtaatcacttgtacaacatcaaggcgtccgtcgacatcgccgccttgaacgccgccctggaacggttccgggaaatccgcggacgcgccgcccgacgactcgacgagctcgcgtccacccgcctgatcgcggccgtcccgaaggatttcgacgggaaagattacttgtacgacccgaagacgggcgaggtcaaaacagcggtgattccatggaagcgctgatcctcgtcgtcgtcttcggcctggcctggggcagcttcctcaacgtcgtcatccaccgggtcccgcggcggatgagcctgctccgcccgccctcgtcctgcccctcgtgcggcgcccggatcaagccgtatgaaaacatccccgttctgtcctacctgattctccggggcaagtgccgccgctgccgggcgccgatcagcttgagatatccggccgtcgaacttctgacgccggttctcctggccgtcctctacgtccgggcgggcggattcaccctgtcgtttttcgcctcggccctgtttaccagcgggctgatcgccctggccttcatcgacgcccgtcatcagatccttcccgacgccctcacttttccggggattgttttgggtttcgcctacgcgttcttccgcgacgatttgactcccggcggggcgcttctcggcgccgcggccggcggaggatttctcctcctggtttacggattctaccgcctgatccggaaaagagaaggcctcggcttcggcgacgtgacgttcatgctgatgatcggggcgtttctgggatgggaaaagacgcttttgaccctgatcctggcttcgttcgccggggcgatcttcggcctccttctaatgaagctccagggccgggacatgaaattcgccctgcccttcgggtcttttctcgcccccgccgcttacgtcgcccttgtctggggcgaccggatcatcgccgcctatttggcgcggttccctcaataaacaaaaaacagaccgagagggacttggttttgacctgtcccctttgattatggtattgatagaaaccatgttatcggacaaaaaggacgccctaacggccgtcctcctgataagcgcggtctttctgggattcgccctgtccgccgaccttccggcccttcacgcgggatttctcgccgccgaccaggcgacttacttttccatcgcccaaagcctggcctacgaccatgacctggaatacacgaagaaggatctcatccggtacaaggagcggttctgggccgggccgcaaggcctgttcctgaaacgggtcatgacgccggccggggagaagctctatttcgccaagtccatggcctacgccctgttcgccgccccgtttgtccggatcttcggggccaacggaccgatcgtttttcacgctcttctcgtcgctctcctcctgctgatgggcttggcctttttctccctccacaaccgcccgggcctgtcgctcctgcgcatcatgacctacctttgcgcctcggtcgccggggcatatgccctgtggatcgccccggatttcttcaacttgttctgcgttttcacggttctgttcctctggctgtacaaacaccggcgggccgagggcggaacggcggacgccccgccggaaaaaacgcccgggcgaaaatcttggagcggtcgctggacggctttccttctctcggacgcgtccgattacggcgcggccgcggtcgccggaatcgtcgcctacgccaagccgcccaatgtcgccgtcttcggacccttgctcctgtggaccatcctgaagaaacggccgggcaaagccctcgtcctgatccttgtattcaccgtctccttcggagccctcttcgggaccaacgttcttctgaccggggattggaactaccagggcggcgagcggaagagcttctatttcagcttcccctacgagcggcccgagctcaccttcgataccgcccaaggccggctgatgaccgccgacggctatcttgaacgggccctccggcccgcgaagttcgttcccatcaacctgttttatttcatcttcggccggttcagcggcatggcctggtattttttccccgctttcctggccctggttttcttcttcctcggccggaaaaccctcgaccgctggctgctcttagccgccctgacgggggaaatcctgatctacgtcattctcatgccggacaatttcggcggcggcggcggttcgctggccaacaggtatttcatggggatctatccgctgtttttctttctccccggcgcggacctccgcccgaagcgtctcgccgctgaatgggccgcggccgctctcctgatcgccccgatcctggtttcgccgatccaggcggcccacgcgccggccgacaacgccaagcgtttcccgttcacgtgcttcccggtcgagctgaccctgatcaacgacctgccgacgaacaccaatccggccgccttccgccagcggtggggcgagccgctcttcgacgaccgcttcctttattttctcaacgacaacttcaacgtcaagcaccgggaggagaacggctggtggacgctcggcgaccgcaaggccgaattcatcctccggacctcggccccggtgaaggaaatcgtcttccacgtccttaacaacccgcgcctcgaaaacaaggtcacggtctgggtcgggggcagacggaagacggtcaccctcggcccccacgcccgggccgagctccgattccccgtcggtccgggattccgggtcgagcccgcccgcatgtaccgggtgaggatcaaggcggccaagggatccatcccctatttcgaggacaagaaaagcgacgagcgccgctggctcggcgtcttcttcactcccgaactggtttccccctgatggcgatgtgcggcatctgcgggctggtccggacggcggaaggagcggcgttttcccgggagctggtcggccggatgtgcgggaccatcgtccaccgcggtcccgacgacgagggggtctacgccgacggccgggccgggctgggcaaccgccggttgagcatcatcgacgtcaaggggggccaccagcccctctccaatgaggacggcacgatctggatcgcctacaacggcgaggcctacaacttcgccgaaatccgggacgagctgcggaaccgcggccatgttttctcgacccggtccgataccgagacgatcgtccacgcctacgaggaatggggcgcgccggccttcatcgaacggttccgggggatgttcgccttcgcgttgtgggacaagcggacggaaacgcttctcttgatgcgcgaccgggtcggggtcaagccgctctactacacgcaactccccgaccggacgctggttttcggatccgagctgaaaaccatcctcattcatccggacgtccggcgggaggtcgagccggccgccctcgacttttacttgacccttgaatacgtcccggccccctacgcgatgttcaaaaacgtcttcaagctcccggccggccatttcctgacgtggaaagacggccggatcgaggtcaaacgatactgggacgtcgagcccgatccggatccgcggccgccggcctcgttctccgccgcccaggacgagctgtacgctcttctcaaggaatccgtcaagctccgcctggtgagcgacgtccccctcggcgcattcctcagcgggggcatcgattcctcggccgtggtcggcctgatgcgcgagctcggggccgagccgctccggacattctcgatcggattcaccgatccgacctacaacgagctggcccatgcccgccggatcgccgagagattccagaccgagcacgaggagctcgttctcgagccgaaagccctggaattgaccgaaaagctcgtccggcatttggatgagccgctgggcgatttctccatctttcccacgtacctggtctccgagatggcccgccggcgggtggccgtggccctgtcgggcgacggcggggatgagctcttcgccggctacgagcattacttggcccagcggatggcccgctggccgggcgtcgcggcggccgcccgggcggccggagcggtcgccggccggttgccgccctcgaaaaaaaagaaggggacctggaacaagatccggaggttcacccaagcgtttgaccaggacgccggccaccggcatctccggtggatgatgttcctctcggatgggatgaagcgggagctctacggaccggcgttccgggaggcgatcggcgggatcggagcgctccggcgccgggagccgtttccggcttacttccaggcgatgaacggattcgacgaccggaccggggagctctacctggacttcaagacgtatctcgtcgacgacatcatggttaaagtcgaccggatgagcatggccgtctcgctggaagcccgggaaccgctgctcgaccacaagctcgtcgaattcgccttccgtctgccgggcgactggaagctccgcggcggaacgacgaagtggatcttcaagaaaacgctcgagcggctcctcccgcgggagacgctctatcggaaaaaagagggattcagcatcccgatcaagcattggctggcgaccgaccttcgggacttgatggaggagactctgagcgaaaaacggatccgggagggcggatggttcgcctacgccccgatccgccggatgatcgacgcccatgccgccggccgggaaaatttcagccaccagctctgggctttgctggtcttcgaaatctggcgcgggacctgcctttaagaaacgtccttctcgattcgaaggacgcggcgggtggacgggccgattcggaacgcctcggccgcgggaagcccctccacccaggcgatctccccgcccgattcgaagacggtcctgagtccgcgctcggaaacggggacgccccggccccggagcatctcattgatcttccgccggcccggcgagccgaccggccggtagcggtcgccggcccgcggagaccggacgatcagcgggaaaacgaggcggccggcgtcgaggaagacccggcgagcgtcgtcaaaggggaatttcgagagggcccccccccgaaagcggcgggctgtgaaaacggcgcccgtttcgacgaccgccaggggaacagtcccgtcccagcgtcggcggaatcccttggctgtcctttggcccggccgacggccggccgcccgccggatccaggcgccctctcggatcagccggattcctccgggaagaacggccgttttcccctcccggagagtccggacgttctcgacgtcgtcgaaggagacgcggagcaggtcgcctttccggtcctcgatgaaagcccggatgcagcggcgggagagaccggtcggcagaaacgccagggcgtcggcgttcaaacgcgcctcggcgctttccccctggaccaggccgggcaggattcgccgaacgtgcgcttccaggaaccgatcctcggcctccaggatttcggccatccggccgagcttctcggcgacggccggctcgtaattcctctccagatacgggaccagccggcgccggacgtcattgcggagaaaagccgggtcgcggttggtttcgtcctcgcagggaacgatcttccgggcccggaggaacgcttcgatctccttgcgccgggcctcgatcagggggcggatgatcaggccttcgcggattggggcgatgccggccaagccgcgcggcccgctcccgcggaggattcgcatcaggacggtctcggcctggtcgtcgagcgtgtggccggtggcgattcgggccgcgcccgtttcaaccgccgcccggcataaaaaatcgtaccggaggcggcgtccggcttcttccaggttccagccgtgcttgcgggcggcggcccggacgtccttcttttcataatggaagggaaggccgaaagacgccgccaactcatgaacgaaccgggcgtcccggccggaagaagcccgcaagccgtggtcgaaatgggccacggccaggcggaaagagaactccgtccgcagatcgtgcaagacatggagaagggcggtcgagtccgccccgcccgagcaggccgccaggatcaggtccccgggagcggccaggccgcggcggaggatcgtccggcggaccatcgaaacgagaccgggcgttcggctcaccgccttcctccccgccgcgatccgcttcccggcgccggtgagcgcttctcccatttcctttatcccgccttatttcaaataatcaaggattctcatccctcgatgattgtctcttcgatacgggccataagcatttccctcccaacgagtcggtcggaccgccttcgctccgcgaccgaagccgtctcgactcatgaatgacccagggtggctcgtttcctccggacctattttaacacggcggggcgtcttcaaccgcggggcggaaaagcaagaagggaaatgaagtggcggcgcagggatttgaaccccggactctgcggatatgagccgcatgctctgaccaactgagctacgccgcctgggggaccaaattctagacgaaccggccggccaagtcaatgaaaggcttgctcttgcgcgccgggcggcccgttcaagccggcaagcaaccgcggaccgctcgacggcccggccgaacgccggcctcgagcccgggggattgctttcgcttgtcatccgaatcggcggcttgggcggaaaacatccgggccggatcgcggcccgcgtctccgccgacggccggccccgaaccgagccgaggctccatgacgaaccgggtggaatatctcatcatccgacatcccgaaacgtcatcgagccacgatttgtttgactccggccggcggcagtggtagaaaaaaggaactgattcgcgcatggaggttttcatgttgaagaaagactccctgaaagccggcgcggccgccctcttcgcccttctcctcgcgcccctgttcctccccgctcaaacatcgcccgaagcattcctgggcttcaagatcggcgccgaccgcaagctggccgactacgaacaaatccaggcctatttcaagaagctggcctcggaatcgccgaagatcaggatcgagaccatcgggacctccaccctgaagcggccgatgatcatggccgtcgtcacggccgaggaaaacatggcccggctggatgaatacaaagcgatttccgccaagcttaaggatccacggacccttccggcggccgaagcggagaagctggcccgggacggcaaggtcatcgtcctcgtcacgtgcagcctccacgccacggagatcgccgcctcccagatgtcgatggagctggcctataaattagtcaccggggatacgcccttcgacgccgcggccgtcctccgggacgtcattttcctcctcgtcccgacgtccaatcccgacggcaaccagatggaagtcgactggtacaagaaaaacctcgggaccaagttcgagggcggggacatgccctggctctaccatcattacgccggccacgacaacaaccgcgactggttcatgtccaacctcagtgaaacgcgggccgtcaaccaggttctttatcacgactggttcccccagatccacctcgaccagcaccagatggggtccgacggagcccgtctcttcatccccccgttcatgaatcctcccgtcccgaatgtccagccgctcgtctggcggggcgtcaacctgcttggcgccaacctgggctacgacctccagaaaaacggcttcaagggcgtcgttcacggccggagcttcaccggctggtacatcggagcctgcgacgacacctcctggctccacaacattctcggcctgctgagcgagatggcctcggtcgggctggccacgcccctcttcatcgagcccaccgaaatcccgacatcctacacgcaaaagcggatcgagtttcccgatccctggcccggcggctggtggcgcctgcgggacatcgtcgattacgagctgacgctttccctgagcctccttcgcacggcctccttgtataaagaggaattcctgctcaacacctaccggatgaacaagcactccgtcgaaaccgtcgagaccggacagccgtacgccttcgttgttccggccgtccagcccgacccccccacgatgctcaagatgctcgacgtccttcaaatggggggcgtggaaatccaccgggcgaagaaggaattccgggccggcaaccgcgtctacccggccggatccttcgtcatcctcatggcccagcctaacaagccgttcgcctgggccctgctcgagcggcagaagtatcccgatatccgtgaatacgcgggcgggccgcccgccgtcccctacgacaacgccggctggactctgccgctgcagatgggcgtcgcctgcgaggaaatcggcaagccgtttgcggccgagctcgaaaagatcgaccggacgccgtccccggatatcgtcgtccccggcgaggcgacgccctggctggtcttcgattgccggacgaacgcctcctacgcggccgtcttcgccctgctcaaggacaaggccgaagtccaccggtccaagggcaagatcatcgggtccggtttcgaggccgcgccgggcagcttcatcgtcaagaacacgccggccgtccagaaggccctcccggcgcttttggaaaagctgcgtctttccgtccatccgctcgccgaggcggacgctcttccgaagtcggtcctcaagaatccgcgcatcggcctctaccagtcctggtggtccagccaggacgagggctggacgcgctatatgttcgacgacctgggagtcccctacaccaccctccacaacgctgatttcaaggcgccgaaggcgggcaaggcgaaggagccggccaaggtcgacctcaaggcccggttcgacgtcatcgtcttcgccggcgaaccctacgacctgatcaagacgggcaaggtcgatcccgcctcgccttgggcccggtggttctctccgctgcctcccgagtacgagggcggcctggaaaaggaggggatcgacaacctcaaagcttttgtcgaggacggcgggatcctcgtcaccctgaacgaagcgtgcaagctggccctcaaggatttcgagccgcccgcccgcgacatcttagacaaggccgaccggacgaaatttttctgcccgatgtcgattctgaagatttccgtcgacaacgcgacgcctctcgggtacggaatgccggagacggcggccgcggtcttcagcgggagcccggctctggagacttggattccccaaacggccgattgggaccggaaggtcgtggccagttatcccgaagaggatctcctgctcagcgggtggatcatgggcgaggagaccatcgcccggaaggcggccgtggtcgacgccccgcataaaaaggggcgcgtcgtcctgatcggcatcgcctgccagtcccgggcccaatcgcacgggacatacaagtttctcctcaattcgctgctttatccggagatgccctgagagagacgccgcaaacgaacgagaatttcggcctcacgattaaaacgggatgcggcgatcgagaggagaccgagggtcgactcggctcctgacgggtgccgctgtcttctcgctggtttcccctcgagggaagaggcctgaagaacccggccgagcggggagccgtctcggagatcccgatgatcggagcctcgcttcggccgggaccggaaatcaccggggaggcggagaacggcgtcgcccggcttgcttcgattccggcttcatccgccggatgcgctcgaagccgctgacgcagacatagtccaggcgcccgtccttttcgacgtcgtccaggagcaggttcaggccgaggacgtcgctggcgatatgcccggcgatgaccacgttgatcccggccttccgggcgttcgccaaatgctcctcggacatgtgcatcccgacgatcgtgctcaccccgccggaaaccagcttgtcgaagatctccttggctccctcggtcccgccggtcatgtcgacgaagatcttcccgcaggaatgggagtccttgccgttaatgatcttcggcggagcctggaggcggaaggacctctcgtattcggggatcgcccggagcagacgaacgagatccttgagccgggacggttttttcgccgcgaacagtttcgtcaggtagttcgtcacgcaattgtcggcgaccgtgtggaggcatatgaggggcaagccgagggcccgggccaggtccatcgttcgagtggcgttggccggcagaagccgccgctccacttcctcgatccgcttgtccatcaactgctcggcgacggagaccgtcaccccgtggagcgccagcagcccggcttgcaggcgcatcacgtcgtacatccggtactgggccggacccagggggtgatggcttaaaaccaggtcgatcttcggaccggccggctcccggttgagggaacgggccagatggagctcgccgccgtcgatatcgatcccggcgaggatccggcggaccggcgtctccggatcgccggtcagcaggcgcgtgtcggcatagggattgaacaggcggtcccgatcgaagaattccttgtcctccgcggcggcgcccttgtactcctcggccgcctcggccaagaggcggtcgatttccttcttcccccgcaggtcggccgcgatccccgcggccacggccttccgataaaaccgcccgatgttcatgattcctttccctccccggcggccgcggccgccgtttcggccttgctcgtccataggcggttgaccacccggatcaggacgaggccgcaggcgacgaaaaccacaccgaggatcgcggcgtaattccaccggccgtacaggatgttgcccaccaaaaacagggccgaccagatcaccgcgcagcccgtgctccacccgacgagggccaaggggatgctttcatgggtcccccggccgccgccggcggccggtccggcctcggcccggaccgccttccaccccggcccgaacggacggactttcttgtagaaatcgaggagcgttttcttgtcggtccgcgggccgaggaaagccgtggccacccagcagaccgtcgtcacggcgaccgtgatcatcagggcgtaatgggtcgggacgacggttccggcccggcgcaggacgagcaggccgatggagacgaggaacgagctgaccatggccacgacctcgcaccacgcgttgacccgccaccagaaccagcgggccaagtacagcaagcccgtcccggccccgacttggaggatgatgtcgaagctgtccttggccgtctccaggacgaagaccagggcgctggaggcgaaaaacaggaagatcgtggccatccggccgaccaggacataatgcttttccgtggcgtcccggcggagaaagcgccgataaaagtcatgaacgagataggaggccccccagttgagatgagtcaggacggtggaggagttggccgcgatcaagccgccgatgatgaggccgaagaagccgatcggcatgaacttgaacatggccggataggcgatgtcatgcccgagaagcgtcggatcgagccccggaaaggccgcctggatgtcggccaggttggggaagacgaccagcgaacaaagggcgaccaggatccagggccagggccgcaggacgtaatgggcgaggttgaaaaagaggaccgcgcccagcgagtccttttccgacttggaggccagcatgcgctgagcgatataactgccgccgccgggctcggcccccggataccagaccgaccaccactggacggcgaggggcatgatgaacacggccagggcgatgtcccagtggttcttgaaatccgggagcatgctcaggtagttcaatccccccggcccggccttggccgagacggccgtgatcatcgccggcagcccgccgacgtgccggacggcgaagtacgccaccgagacgaccgcggtcatcatgacgaagaactggatcatgtcgatgaccagaacgccccacaggccggagaaggcggcgaaaaacaggttcaagaggccgacgatgagcagcgtctcgaagcggttgaggccgaacagcagggcggcgatcttgcaggcggccagattgaccgtagccatgatcatgcagttgaaaaagaggccgagatagacggagcggaacccgcggacgactccggcggccttgccggaatagcggacttcgtagaactccaggtcggttatcacccccgaccggcgccaaaggcgggcgaagaagaagacggtcgccaccccggtcagggtgaaggcccaccagacccagttgccggccacgccgttgcggcggacgatgtccgtcacaaggttgggcgtgtcgctcgaaaacgtcgtcgcgaccatggaaatgccggccagccaccacggcacggcgcggccggagacaaagaactccgccgtgcttcggccggcccggcggccgtagaacagggccgggatatagcagaggagagtcgagccgacgatgacgatccaatcgaggggagccaggcgcatgggattccttccttaaggcgggaatggaggccgcggccagggcctcatgaaagaccgaacgagcccggccaaacgcgcccctatttgaccgcgtccaggcccgtcacctggaggacaagaccgctccagcccaggctttccttctccggagggaagaagaagacggccgggatttcatcgcggttgaggggcaggtcattcagccgcgcccggtgccgggccgtccagccggagcctgccttcccgtccccgagctgattccgcccggccgcggccgcgttcaagacatgaccgacgaaacgctccagctccttgtagtaagcgacccggtcgaacgaccacagcgaggaaaacgagccgtaagcccggacggcttcgtcccggcgcttgagcgctccctcaagaccctcgactccggcgccgccggccaggcgctcatactccgccgggttttcgtccgcggcctggccgaaataaagccggacgtcctcctccccggcctccttcccgggcccggccctgaggctgagaacgacaagatggtcggttcccacgagccggagaagagtgcagggcggaacctggacataccgtcccggcgagaggttgatcgaacgaaaccctttgcgaacgtcgtgcagctcgagccgtccggtcccgttcatgacgtagaatccctcgtccgtcacggcccgcatgtacggcgcgccggaaaaaaggccgtcgggtcccggccgttggtcgtacaccgtgatccgggccaagccgatgcccccgacgatcccctcggcttttcccgccgggccggagtcccggcaggccgcgaggaaaaaagccgaaaccagaaccgctccgatcctcagggccgcgtgtttcatggaaacctcccgtccggggaatcataatcggaggaggccgttccgtcaacgtcggcggcccaagcgcccctcgggggcgatcttcagccgagaatccgccgggacttccgaatcccctcgcggaagtcctgctctgattccagcggcggttccttccgcccggtcgaacggctcgccgacttcttgccggggcgctcgttttgtttcgtccctgatgccccatccgggcccgggagcctataaaaaaagccccctccccgcgaagggagggggcgggacgggttttcccgggagcgcggtcaggaggcgaccttggctcccgtgtggaacaggaagaaggaaaacgtatcggccgtgatctcgatgcccttcgtcaggttggacgatccgtggccgcttcgggtttcgatccggatcagtacgggctccgggccggcctggcatttctgcaaggcggcgatgaacttaaacgaatgggccgggacgacgcggtcgtcgtggtcggccgtggtgacgagcgtcgccgggtagcggacgccggccttgaggttatggagaggcgaatacttgtagaggtaggcgaaatccttctcgttgtcgctcgatccgtattcgacgatccagccccaaccgacggtgaacttgtggaatcggagcatgtccatgactccgacggcaggcagggcgaccctgaagagatcgggtctctgggtcatgcaggcgccgaccaggagaccgccgttgctcccgccctcgatgccgagccgttccggcgaggtatatttttcagcgatcaagtactcggccgcggcaatgaagtcgtcgaaaacgttctgcttgttgccgagcatgccggccttgtgccacgtttcgccgtattcccccccgccgcgcaggttgggctcggcgaagacgacgccgttctcgagcaaggcgatatgggccggagagaaggaaggctggaggctgatgttgaagccgccgtaggccgtcaggaagcagggattgccgccgtccagggccaggcctttcttatggacgatgaacatcggcaccttcgtcccgtccttgctggcgtagaagacctgcttgaccgtgaaatcctcgggattgaatttcacctcgggcttgcggaagacctccgaagctcccgaggcgatgtcgaacttgaaaatcgtcgtcggatagttgtaggaggtgaacgtgtaaaaaacgacccggtcgtccttccagccgccgaatccgcccgctgaaccgaggcccggaagggcgacttcccgaatcagggctccgtccggctcatgctggaagaccttcgtgctggcatcctttaaataggagcagaaaagcttccccccggccatcccggccccgctcaacacctcgagcttttccgggatgatcgtcgtccacttgttctcggccggctcccgcgggtcgacgaggacgatcctggcgttgggcgcatggaggttggtctggacgagaaacttgtccccgatgttgtccaggacatagctgtccgcttcgaacccggggatgaggagggaaaattccgtcccgggcgcttcgagggatttccagtacaactccgttcccgacgttccggcgctgaccgtcagaaaggcgtatttctcgtcctcgctgacgctgaccgagaagtagagaagcggattcttcgtatcctggtagacaaggatgtccttttcctggggatcgccgagcttgtgatagaacaccttctggaactcgttcttggccgtcagctccccgccggccgggggctggtcataacggctgtagaagaatccgtccttccaccaggcggttccggagaatttcacccagcggatccggtcgggaagctcggctttcgtggcgatgtccatcacccggatctcgccccaatccgatccggcttctccgcgcatgatcgccattttcgtcttgcagccggagggaccgaggagatagattttgatggttccatcggccgaaagcgcgttcggatcgatgaacacctcgggcgtcccctcgaggcctttctggatatagatgacggactggttttgaagcccgtcgttcttggagaagaaataatgcccgccgacccggaacggcgccgaataccggggatagttgtagatatccatcagccgcttcttcagcgcctcgcggaaggggatctgttcgagatggccgaacgtcacggcgttctgggccttgacccatgcctcggtctcggccgaacggtcgtcttcaagccagcggtacgggtcggcgactttcgtcccgaaataatcatcgacctggtcgacggtcttggtcacggggtaggtcatctttttcgcctcttgactgaaggctccggcggccagcgccagggcggccgccaagccccacaggatcattctcttattcatcaaaatctccttgatgggcggatatttttattctaccactttttcgccttggcgggctccatccggcgcaggtccaggccgcgctcgaaggcgccgatccggtagagacagatttccctcaccgacgacggatggtggaggacctccgagagcgactggtgaccggccgcccagactccgccgccccggatgacggccactttgtaatcatgcaggccgcggatcagggcctccgggccggcgtccgccggcaggacggggatgacgagatactggaagccgccctcggcgtccaccggaacaatccggtcggccgcggtctcctcgcccgggtaccggaaataggcgtgggcttccgcctccggcagccagcaatgcatgaccgtctgaaaatccgattcggcgtagatcgccttatgaagggccagctcgggcgagtcggttccttccggccggatcggccgccggcgcagcggcccgggaaggccgcgcggcatcgacgccttcggggcgtacagcagatcgccaaccccgcggaccgacatcgagccggtgtggaacggcgagaggaacgattcgaagatcctggccccggccttgcggaattccttaaggatttcggtctcctcggggaaatcgcaggcctcgtcgtcctcgaccgcgtagggatcgggcggccggacgaagaagcccgagggccgggcgagcattccggcccgaagcccttccacgtccaccttcagccgccgggcggcgttgacgaccttcccggcgttgtcggccgcggccagaagaaaaaaggcctcctggagcgtccggccccgggcgaacgtcccatggccttggatcgtcgtcaccggccggccggccaggcgccacggcaccgtttcggccatctccggcgagccgctcggcacggcgaaccagtcgaccgccacccgctccccgaggacgtgccggcccaagggatcgatgggaacgaaatccggcggccgagcgggcttcggctcgtcgtccagggtggcgatcgccagctccttcgtatgggcgtgcatggaggcgccgacgccagggaggcggaggatccgctgatggatgtcggtctcggaggacgccttgtagtagccgtaatccgtttccgtcgccgaaaggaagcagatctgctccggctcgagatcgcccttctgggaaccggccgcggtgatgacgatgacgtcggatccgtcctcgcccttgaccttgacggccatattgccggaatggctgtcttggatgtcggccagaagggacgctcgtccgaccgcctgaaacagccggaagatctcgtcgttcgcggtccagtttcgagggctcatggccgcctcccttcgggtggatcgagacggcgcggcggcctcggcccggcggccggacggccgttcgcgtcccagccgcggacttggtaataatcccggcgcatccgctcctgggtttcccggctgacgatccggttttctccggcgacgacgaccggcgattcggcgaaccgggccgggagcgcgtcgtcagctggaacggccccggcctccaggttgaataggcgctcaaggtcggcgatccggttggcgatctcctcgaggcgggcgaccgaaaaatccatgccggtcgccccggagagcatccgcgaccagggatcgctcccgaaggcgtacccggtgaaacggcagacgcccaggctgtcctggaggattccgatattctgcatgttccgaatggcgatcggggactggaggaggctgaagcgggggatttccttagcccccccgaaaaacgccagggaaacggcgtagccgccgcgaagatgacaggctcccgacggcgaggtcatgtaacccaacgcttgggtgaacgaagcccggggatcgtatgccgggatctccatccgtttgaccgacatggacgcctcgggatggccgcagctcgaggccagccgccaggatccctcggctaaaagatcccccggcccccggcgatgggcgacatcgacggccagccgctccaggacggcggcgtttccgaaacgcagcccccggccgccgtcgaaatccggcggcagggcgccggcctcggccagctccatggcgcaggcgaccgttccgccgaagctgatcgtgtccaaacccagctcgttgcagcggtaattggccgtcgtgatggccgccaggtcgtagacgtcgcagaccggccccatcaggacgacggtttcgtactccggaccctctccggattcgtccggcgatcccgcccggacgatccgggtgcggcgctgacagccgatgggacagagatggcagccggcggctcgctccagaatggtccgggcgatggtttcgcccgagatccgctccaggtcctcgtcccggtgagcgcaatcctggaaattgcggcggggcagcatcccgatgacgttgatgagctcgaccaggccggccgtcccgagttcgcgcaggagccgcttggtcaccggggcctgccgcaggagatggaacgcctgatcatatcccgacttgtagcgctcgggatcccggatccggattttttcctttccggagacgcggaccgccttcaggttttttgaaccccagaccgcgcccggtccgccgcgcccgtaaacccggttgcggtcattggccacgtcggcgaaccggacgagattctccccggccggaccgatgcagaggacgcgcggtcggtcggccgggctgaacccggaggtcagggcgtccgtcgtcgcgtggatgtcctccccccaaagcgtcccggccgggtggatcgccgcgcccgccggcgtgatgtcgatccagaccggctccggcgcttttcccttgatgaccagggcgtcgtggcccgtggccttgaaggcgaatccccagcttccgccggaattcgacgtcccgatcaagcccgaaagcggcgagtgaaagaccatgtggccgcgggccgccgtgggggcgttcgtcccgacgagcggggaggcggcgatgacgatgacgttcccgggctcgaggggatcggcggccggatcggcctcatcgcgaaagagacgagtggccaggccgcggccgccgatgtaattggcaacgagatcggcgtcgaggggacggacgcggacggcggccgacgtcaaatcgatttcaaggtaccggccgaaaaaaccgaaggacgaaccgctcatcggttcaggatacccaattcatccccctcccatcaaggggaaaacggcgaccgtgtcgcccgcccgcagctccccgttccatccgccccgggcggacgcgttctctccgttgaccatgacgacgatatgagggtggagagcgggaggctttccggcctccggggcggcgaaaagctcggcccggcgggcggaggaatcccctagccgttccaagaggcagccgagcgtcgtcccctcctcgagctcgaaaatcctttccttgccgccgaacgtctgccggaacgcggcgaaaaacctgacccgcacggtcatggtcgtccggccgggtcctttcataggcgattccccgccgggagggcgcggatgagaatttccggatcacgcgagggaggcagcggaacgaccgcaaccgcaatcctcgccggccagcgcttttggaaatcctccatcaacgtgtcccggacgacgacgaggcaggacctccgggcgtcggcgaagaccggggcggccgccggccaaacgcccctcccgccaagctccaagcggccgagctcatcgatgataagcagacgggagggatcgcttcggccgatgatatccgcggctgcggccaggccgccgggaagaacatcaaaggcgcccgtccggaggccgtccgcggcccccgcgattcgaagaaaaggaatccgccggccggtgcgcaggtccaggagatcatagccgggcgccggacggccgtcccccgcccgctcgctgagatagccgtcgggcggccgcccgagcgccgccaggcggccgacgacggctttcaaaaacgtggtttttccgccgccgaccggtcccgtcagaatcgtgatcatcggtccgccggtccggcgccctccgtccgcccggaccctagcggacccggatccgcgcctggttgatctgaaagtcgaggttttggccggacggatccgtcaccaggctctggctcacggccacgaccgattccccggcggctttggcctcgaaaacaatcgcggccagggtgccgccccggcgcacgcccttcccggcgaccgggctcgtgaaaccgatcgtgcacgtcccggagccgttgtcgtagttctgaagaaacggggcgttctctcccagcgaccggcccaatcccccgtcctgaacgcttttcacggctagcacgctgggattgaaactgagggttacggcggccgacccgatctcggcctcggtgagaacgccgacagtcatccggaattctcggccggcggggacttccatattggccggcccgagaaggatgacgttgcgtctttcgcttcccggccgcgggcggggttggagccggacttcctcttcgaggtccgattccgggaagatctcttcttccgcctcggcctcgccgcggcttccggatccggaagcgttgatatccacccaaaggacttgttcatcctccgctccgatcgggacggtccggacgatgtgaggcgtgatggtcatgatgatgtccgtctgctcgatggtcgtgtcctccgccccgaacagccggccgatccccggaaggttcttcaggaaggggatgccggagagggatttccgctccgcgtcgcggaggaggccggcgaacatcgtcgtctcgccgtcccgcaggcggagcgttcccttgagctcgcgggtgttgatgatcggcagatcggcgtatccctttcccccgagcgaggtaatcttgagctccatggccagggtcacttccttctccagatgaacccggggggtgaacgtgatgtcgatcccgacgtcctggtaatcgtaggacgtcaccggctgctggctgtagccgccggcggcgatgggattccacgtcgtcttggggacggggaccttctcgccgacgagctggtggatttcctcgtcggccagcccccgcaggcgcggctgggcgacgatctttgtgtccgaatcggtctcgagaaactggagataggcgaccggcaggttcacgaaataattttcgctcttggataaatcgatcttcgagagctgctcccagccggcggacgacgaattctcggccagcggcgccccgtatctcaagccgactttattctggtcgagcgacaagcccagctgacggagccgcgtccgggaaacctccaaaagctccatgtcgatgacgacctcgcccttgggcttgtcccagatccggatgagcttttcggccagctcgatgacctgaggcgtgtcccggatcgtgacgctgttgagatccttgtcgaagaagatcaaggggatcttggccgcgccgcggagcatgttggtcagggaggcggtcatctcttgggcctgggcattggacaagtagaacgtccggatgcagctcacttcatattgaagccgcttggccggctggtcggggacgatgatgaccgtccgctcgtcaatgatccggtagaaattcttggtcgcctggcagactgttcccagggcttgttcgaaggtcacattcgtgaaatcggtctgaaaggggacgtcccggaacgcctcatcgaaaatgatgttgacccgcccggcccggcccagggattggaggaccgcccgcagggacgtttccgccgacaggcggagatcgagcgccccttcccggaccttgagcttgatcggaaactcgattttcgacggaccggcgtccttcttcgtctcgggcgagagggcctgcttggcctcaaaaaggagggcggaatcgcggggattgtagctcaccgccttggcataggccgcggcggccgcgtccttttcccccaaggcgagaaggcggcgggcctcatccgtgaagaacaagccggctttgaccttcacctgggccagagccagccggtacgcgggttccttgggattcatgagggcggctttctcataaagagcgatcgcctcgtcccaattctgggcgatttccgcccgaacgccctgatgatagacggggctgatggtcgcgcaggccgcggcggtcaaaagaacgaggatcgccagcgcggtcgcttttttcatgggcgttctccttcataaaggaacaccagcgtattcccttccgggcttcgcaaggtgatctccttgtccgtgatcttgagggccgtccagccgttgggggcggtttcgccttcggccagggcccagggccgcccgttgatcacgaggatggcggccggcgggccgggagcggcgtaccgggcgaatccgatgtagcggacgaccgggggagggggaggcggcggcgtctcagccggggacagctccttccccgtcaaatccgaaggctccccgctttcgccggagtcgacgatgaagacgaccgtcgaaaacggatcgcggacgatcttcggaaaaaccggggcttcttttcggagaagatcccggcggatcaggggcgggggggcatccggcccggccgccgccagggccccgaggcagagcacggcggcgacaaacacgattccccgccggtcaggcttattcatcgacggcatatccttccagcgtgacgccggcttccaagtgtccctcgacgatgacccggaaatccaccttggagacgaacagcgcccggggatgggcctcgagggtttccaagagccggcggaaagcgggataagaaccggcccaatggaagccgacggtgtaccgccgcatccggttcttgaccacctcggattccccgtacatgatttccgggaccgacgcgcccgccttttttaaaacatcggccaggtcggagcgcatcgtctggattcccctcccccggtcgtacagccacgtcccgcggagctcccggacgtcggccgaggccccgtcccaacggctccattcggcgacggcggccttccgggcctggtcggccgcccgccactccgtctcgaccgccgcccgccgggcggacgcccggccggcgttcagccaagccctgaccccgaacacgagaagaacggcgaacaccgcggcgcagacgacggccgcgatggaaacgatccggcgctcgccttcgtccaagaggtcaaagagttccattataatcaaatccgatttcgcagatgagccggccgccgcccgtcagctcatcccgcagaaccacgtccttgaaaccccgggccgtcaggttttcaatcaagaccagaaggccgggcaggcccggagtaatgactttcatgttgacccgaagccctgtttcggtcagctgaagcgggctgagcgagacgatcgagcactgcggcggcagggcttgttccaagcgggagaaaagccccacccaggaaaaattcttccggacgatgacgccgttgaccacgtcgacgagctcggaatcccgtttcctcatcgtctggctctgcccggttttatccgctcgttcgcgtccggccgattggatgcggcgctcgagctcggcccgggtccgctcgtcggccctcaggcgggcggtcgaatggaggagaaggacccccgcccccccgccgaagagaagaaaaaggaccaccggaatcccgaccgccgcccggaacaagcgccggttccgcagcggccgggtggccaggttgatcggaaggcgcaggccgccgttcatgagatctgtccaagaaggggggccaggcggatccggtcggccggcggaatccccgtcgatccgtcgcccggcagaatccggacgggacgggaaacgcggctttggatgagggccgcgcccgtcccggcgtccccgcccgcggccggccgcagccagacgctttcgatttccttcttttcccggtcctcgaggaaacggagggtggccgcggtttcctcggccgcttcttcccataaattccccgtcgagaggggcttcacccggaacagcgccggtccgccgtcgagaatcgccagggcggcgaaataatcctcctcgatgttgacgattacctggttcgccggtccgtttttcggcaggcagccgagcagggccggcgtcggaaggccgactgttcggacatccagcccggccgcggcgaacgcctgttcgtattcccggacgactccggcggcggccaggacgcaaaacgcccgggcccggccgtttgtccggctgacggcgaacgacaaccgcgtctcggccgggggcagcgggagcgtccgggccagccgccagcggatgatcttttcccgctcgtcgggagcgggcggcagcgagtcgaagctcaggaggacggttttaacggacgtttccggaaggaggagggcgaccggtccttccggcgacccgatccggcggacggcgtccttgaccgccgattgaaactcctccggccggggaagattcggcttgtcgaacgacggctccacgagaccggccggaaggctccggacgacggagcttttcaccgacgcggattggcgggcgcggcgcagaccgccgagggatccacgggcgacatggaagacggccgcgggaatgtccggggccgttaggcgcctgatccaggaatcaataaacgcggccatggcttattccacaaacgtgactttattcaattccttgaggctggtcaaaccggacaggacctttccgacgccgacgtcccggatggaaaccattccctccgccttggctctcttgcggacctcggacaaaggcttgcggatcaggatcatctcccggaccgtgtccgagaggtcgaggatctcggcgatggccgtccggccgtggtaacctgtgaatccgcactccgcgcacccgccggcctcataaaacacgcgctcccggtaccgttccgggtcgaggccggattcccgcagcgcctcgtccgggtagcggacgggcgtcttgcacttggaacagagcagccggaccagccgctgggccagaatgcagttcagggcggagatgaagctgtacggatcgacctgcatgtgaaggaagcggccgatgacgtcgaagacgttgttggcatggacggtcgtgaaaacgaggtggccggtcagggcggactggatggcgatttgggccgtctccggatcgcggatctcccccaccatgattttatcgggatcatgccggaggatcgagcgcaagccccgggcgaatgtcagccccttcttctcattgaccggaatctgggtgatgccgtcgacctggtattcgaccgggtcctcgatggtgacgatcttgtcctcgaccgaccggatctcggtcaaggcggcgtacaaggtcgtcgtcttgccgcttcccgtcggcccggtcaccaggaccatgccgtacggctgggcgatgtagcgccggaagcgccggaggacgtcgtcggagaagccgagcaggtcgagcttgagctcggagatggcctccgtgatcatttccttgtcgaggatccggaccaccgaatcctcaccgtagatggagggcatgatcgagacgcggaaatcgatcgtcttgtccttgatcttcagacggaaccggccgtcttgggggacgcggcgctcggcgatgtccaggtcggacatgaccttgattcgggagatgatcggcgcctggaatttcttgtcgatgggctccatggcctcgcccaggacgccgtcgatccggtacttgacgtggacgttgtcgtccttggattcgatatggatgtcggaagcccgcttctggacggccgtgaagatgatcgtgttgaccagcttgatgatcgagccgtcctggtcggccagcttctccagggagatgacctcctcctcctccccgccttccttttccacgagctgctggataaagccctcggtcgctcccttgagaacctggagggccgtttcgctcttgcggagggcctcctgaatggcccggggaggcgcggcttcgaccacgacattcctgccggagagggtccggatggcgtcgatcgtctccaggtcggagggatcggcgacggcgacgcggagattcgccccgtcgtcctcgagggggatgacgttggcccggtagaggaattccggggggaacgattgaaccaggtcccggtcgatccggacgtcggccaggtcggtgaaggggacgccgcagcgatcggcgagccgacggacggcttcggaatcggccggagcggagggacgggaaggcgggggggtcatcggatcaccgggccacttgaatgattcggaaaatggggagataaacggccaggagcatcccggccaccagcacgccggtgagaatgatgacgacgggctcgacgagcgagacgagcgtgtcgagcttctgttggatccgctcctcggtgacgtcggccagctcgcggagcatcccgctgaggttggccgaggattctccgatgcggacgagatccagggccatcggggggaaaaaattcgttttgctcaaggcctcggaaaacgcctcgccgttgcggatgccggcgggcacgggctccatccggccggccaggtgcttgttggggacggcttgggaggccagggcgacggcgtctacgagcgaagctcccgcgcccaggagaaggctcagcgtccggctgaagagggagaccgccgattcgacgatcagggaccgagccacgggcacccggagcttcagccggtcccagcggcgtctcatgtccggattccgcttcatccgccaggcgaggacgacgagggccgcggccagaaccggccagatgatccagttccggcggagaaaaagggaaaactggatgagggccgaagtcaggtacggaaggctcgtttcgaaatcagcgtaaaactcggaaaaattgggcaggacgaaattgatcaaaagaagcagcaggcccgcggaaaaacagatgatcaaggtcggatacgtcagggccgcgcggacccggcgggccgtccggtcgatggtcttggcatagctgacgtattggccgatcgtctcgggcagggttccgctgatttccccggccatcaaggccgccgtgtaaaccttcgagaagcggtcctcgaacggagcgaaggcttcggacaaggctttgccgtggcggatgtcgttttccaccctgcccagaacgttcttcagggcgggattcttcgtccggccgccgatcgtctccaggcagcggagcaccgggaatccggcccggatcatggccgtgaattcctggttgaacatgatgaaatcgcgggccttgattttcccctcggatccccgcagaaggcttccgatcttccgccgttcgcggcggacggacaggacgcaaaatccttccgactcgaaatgccggcggcagtccgaggcggtggaagccggaaaagtccggcggaagaccgtcccggcgtcgtcggcgatccggcaaatataggaagacatggcgtttcgatcccgccctttccgctagggggaaaccgtttactagattagggcaaacggccgaccgtgtcaatttgccgtccggtttgacggccggaaaacggcccgatatacttccctccgtcatgtccttctcctccgtcccccggaaacgccgggcggcggccgtcccggcggtcctcgtcttcctcgtttcgttcgcggccttcgaccgccttctcctgctcggcctccgcgcctgggccggacggtattacgccgccgggccgggaccttcggccgggaagacggcgacggtctccgccggcgaaggcgacggagagatcctgattttcggaacctcccgctcggcccgggccttcgaccaggagacgctcgccgcccatctcgggaaaaaaatcatcaagaacgccgcggccgggcggtatccccgatatttcgatttgtattatctccgctaccgccgggagaaccgcaggcccgcggccgtcgtctacgggatggattacttcatgttcgagaagaagaccctgccgtcggagcttcgaatattggatcccgccttcgaggctcacgccctgaatcccggggacggggtcaatgacgcctctcccctcctgagccgcctttcccggctcttccggaaaaaaccggagatcgatgatttcctcggcgctctgctccgtctgagaacggaggaggacgaggtgatgccgccggccgcggatcaaggcaaaggacgggacgaaaatccggatcattcccctccgctttcctcagaccccaggaagcgccggccgttcgagccccgccgttaccaagcccggccgggagccgagggcaaggacctggcaaaactcctgaccgtccttgaaaaggacggcgttccagtcgttctcgttttcatcccggatttcatcgggacgaacgaaacgaacttcgaacaagcccggttcaaggaggacgtcggggccctggccggccttcacggcaacgccgccgtcctggatttcaaccggcccgaccggttcgatctggacaacccggacctcttccgggacggaggctggggcaagagcaactcccatttgaactttcggggaaaggcggtcttcaaccgtctgttcgccgaggcggttcgtccttttctccgctcaaaaacaccgggcgcgatctgacgtctatgatccgggctcccgcatcacggccgtcagaacgaccttcccgcctctgatatcctcgcggagggatcgggtcatgccggcgatgagggcccggctcaatccgtccgattcggccgtctcgttgagaatggtcttcaggacctcgccggccgtgaagaggagggtggtttcattttcttgctcggagtagcccacggtcagatccagcccccccgcgccggaaacgaggccggcccgggcggccgcgtcgccctcccggaagcaaagctgaagcgtctcctcgacaaccaaaaggaggtcggccacggccgcggccggaaaaaagtgccggccgcagaacgcctcgatcccggccttcagatcatagagatcgtacttctcgtcggcgatgtgatattggaaattgcggatgcggaagatgaaggcccgggttttctcccgcttcggggcgtcgaagattccggccggcggcccttcctcgtaaatgacgccctcgtccatgtagaagacgcggcgggagacgtctcgggcgaaccgcatctcatgggtgacgatggccatggtcatgccgtcggcggccaggcggcggatgacgcccagcacctcgctcaccatcgtcgggtcgagagccgaggtcggctcgtcgaagaggatgatctcgggatccatcgacaggcaacgggcgatggccacgcgctgctgctggccgccggacagctcgtcggggaaagcattttcccgggcggccagcccgaccagggcgagcaggccgcgggcccgcgtttccgcctccccgcgcgttttccgcaagagcttcaccgggccgatcgtcagattgtccagcacggtcatgtgttcgaagaggttgaaattctggaagaccattcccattttccgccgcaaggcgttgggatcgttcctcggatcgaggacgtcccgtccgtccacccagatatggccgccggaaggacgctccagcaggttcaggcagcggagaaacgtgctcttgcccgtgcccgacggcccgatgatcgagatgacctcgccccgcttgatctcagcgttgacatccttcaggacgacggtctctccgaagcacttggccaggtgctcgacccggatcaggacgtcgcccgagccggcggacggacaggaagctttcacggccttctccttttcgggttgacccggacccgaatcatttccagaagcgaggtcaggccccaagccaggatgaagtagaggacggccaccatgaccaaggggaagaaggcgtcgaacgtccggctccggatgatgtcgctggccttggtcaggtcctggacggcgatgtagcccacgatggcggtcatcttcaccagggcgacgaactcgcccttgaacaccggcagaatgcgctggaccgcctggggcaggacgatatggacgaacgtccggaaccggctgaagcccatggccacgccggcttccacctgcccccgtttcacgctttcgattccggcccggaacatttccgagacataggcggcgaagttcagggcgaaggtgaagatcgccacggccaccccgctcacgtccagcggggcgaaaacgacatagaacatcagcatcagcaggaccacttgggggatgccgcgcaggaggctgatgtaggccttggcgaacgctttcaaagcccgattccttcccatccgcatcaggcagatgagggctccgagcagcgttccaaggagggccgaaaggacggcgatgagggccgtgactttcaatccgttccagatcaacaggtagcgcttttcccggatgatgttgtcgacgaagctcttcttgagccgggccggccaggaggggcagagagcggcgccggcggccggcggccggtccttaagcgtcatcatgacctggggattgacgtaatagccctcggaaaaggcgactctccgccggcgctcctcggtcgccgtcaggtttgaacaaacgacgtccgccttcccggattcgagagccgcgatcagggcggagaacttcatgtcggtgaagacgaccgggcggcccagcttgaaggcgatccgttcgatcagctcgggatcgaggccgacgattttattgtcctcgatgaatcccatgggctcccggttggccgcgacggccacccggagagccggccacccggacgcccgcggcacctcggttttcacgtagggcgagccgtccggccggacccagtggctgatgatttcctccaacgtcccatcgtccctcatttcttcgagaaccgcgttgatccgctcgagcagccggggattgtctttatggacggcgatcgccgcccacgcctgattgtactcctcgggaagcacggccaggtcgggattggcccgggccgcctggagggccgtcgtgtacgcggtgatgacataatcgaccttgcgcgctttcagggcggcgacggcgtccatgacgtcgtcgaagagatggatgccggcccggggaaaacgctcccggacgagcgcttcccccgtcgagccggtcatcgccccgatgacggcctcggcgatgtccggtttgcttcccgtctcttcgggccggtttccgccgtccaggtgttttttcagggtgagggcgtccgccgccgattggtaatacgcgtccgaaaaggcgacctgcttggcccgctcctcggtgatcgtgatgccgtcgcagatcaggtcggctttgccggaggcgacggccgcgatcagcgaggcgaagggaaggggctggatctgcggcttcagcccttggcgggcggcgaagcggagggccagctccagatcgatcccgcagggtttctcctcccgcgtgtaggaaaagggaatgtcgacggtcgtggtggcgatgcgcagccggccgttctccccgccttccggcaggtcggggatcgcggccgcgccgtcgtcgccttcccattttctccggatctcttccagctcgcccgtcgcccggagctcgccgagaaaggcattgaacgcgtcccggaggcggacgtcggcgaatccgaagccgaggttttcaatgaaaatcttctcggccagaacggccagcgagggatcgtcctcccggtacagccggccggcgttggcatcaaagatcgccgcctcgcattttccggacttgagggccgcgagcatgtcgggggcgttgtccatccgaaggatttccgcccggggaaaattcgccgtgatgtgcttgtcgtgggtcgagccgaccatcaccgcgatccgtttctcggcgacgtcggccaggccggaaaaggccggcgctgctccggcgacggccgaatccctcaccgcggccgcgatcccgccgcggtagacgggctcggtgaagagaacgctcttggcccgctcctcggtgaccgtgatgcaggcggcgatgagatcggttttcccggacagcagcgacgggatcatcgccccgaattccatgttgtggatccggagctcacggccgaggcgccgggccagccgcgaggccagctcgacatcgaagccgacgacccggcggctgtcgtcgatgaaggaaaacggttcggtgacggcgcaggttccgaaatcaagaatcccgttgggcgcctcccaggccatttcgggcatgggcgccggctttcctttttccgggaaccaccgggctttcatctcgtcgtaccggccgtcggcccgcagctcggcaagcagggaatcggccgcgtccttcagctcccggtcgtccggccgcacggccatggcatactgatcgacggagatcatctccggcaggatcttcaagccgggattctgggcctggatgttgcggaggatcggttcgtcgtaggccgccgccgtttccttgcctttcaagacggccaggcaggcgtccagaggcgaagggtaatacccgaacgtcgcttccggaaagcggttaaggacgaattgatcggcgaccgtccccgaaacgacgccgaatcgggccgttttcaaatcttccagcgaggcgacgccggccggctttccggccggggaacaagagaggcaagcgccggccagcaatccgccggccgcgatccaggcgaatcgtttcatgcggctattctatgaatccatcgacctcttggcaattgtccggccgcgggcctccggcgaaccggccgggcccgcggtctccgccggtttgaatttgacatccggccgcgggggggtattaaataaagcgggatgaagaagaaacgggttttaaaagggattctcgcgcccgcccttctcctggcggcggcgatcgggctcggacagccgacgccgtcggctgagaatccgccgcaggagacggaccccgcccggcggccgcccaccgactacatgcgttcgctcttgtcgcaaaacaccaagccgctcggcgtcaaggtggacaaatccctcgaacggttgatgcgccagccggcgatcgcctggaccgcccgggccgcccgccggcatattctggactaatccgatgacacgggaacgcccggcctcaatcgaatcaggcacgatggattcaattttttggattgcaccatgaaagaccggaagatctggcttctcgtccccctgacgatcctcgtcgttttgggggttctcaacgtttaccgccagatcgtttacaaggaaccctccgacggcgtcgtctgggccatgaaacaaggccgtctgacggcgatcaaagtcgacaaggacgggccggcttatctcttcaacttgaagaagggcgacgttctcttctcggtcacccacaatctcgcccccggcaagatcatcgtccggagcaaaatcgacctgatcaaaaacctctggcaggtttggaagcaagggcagaagatcacgtacgagatctaccgggagggcggcgtgatcacctacacggggacgtttttccccgtcggaaagggccccgacattatttatttctatttggccctgatcggcgtgatcacgatcatcatcgccttggttgtctttctcaacacctcccggccgttccgccggaccaacattcattactattttctctcggtcctcctgttcatgttttacgtcttctccttcaccggggaattcgactggctcgacagcctgttttacggcctggataaaatcgcgttcctggtctttccgccgctcctcgtccactacttcctgattttcccccagcgagtcaagctgctccgggataaacccgggacggcgtttcttctctacgcgcccgcgtcgctgctgctcctggcccggatcgccctcttccttccggccgccggcggcctcggcgagctccgccttctccaggcgtattccgccctggaaaagctggatctgggccatttcgccctctatacgctcggcgccctggcgacgatcgctcacgggacgctccgccacccgagcttcatcatccgcaaacagcttaagtgggtcgcctacggcctgggcttcggcgtcgtcccgttcacggccctctacgtcgtgcccttcgtcgccggggccgcgccgagcgtggccgccgagctgaccattcttctccaggcgctcatccccctgtccttttcctattcgatctcccgctacaagctgatggacctggaagtcatcctcaagaaagcctccaccctggttttttcctacttcgtcctggccctggttttcgtcgggatctcctcgcaaacgaaaatcttctcggaaaacaagatcaacgcccttcttctcggagccctggccattatcctgggcgcgaccatgttcacccccctccggaccctcgttcaatccctcttcgaccgggtcttctaccggcggagctaccagtaccgcaagacgctcctgtccatctcccaggagctgagccgggagcgcaacatcgaaacgctcgcccgccgcctcctcgagctgatctccaacgccttgtccctgcgctcgatcgccctccttctgccggtcgaaacggggagcgccaccttcacgatcttcagcgcgcacggaaacgccgaaacggccgcgggcggacgcctgacgttcgatcccaagatctacgaaaccctggtcgagaacaacaccctgtcgctctactcggtgaccgaggacatcaagcttcaaacgaagctcgagagcctccgggactccggcttcgatcattttctggccctcaagggcgaaagcaagctggtcgggtgcctggccatggggcgcaagatcgacacgtcgtttctgacgcgcgaggactgggaactgctgacgacgatctcttcgcccgtggctttggccgtggaaaacgcctacctgtacaaccaagccggcctccgggcctccgagcttgaacggctcaaagactacagcgagaacatcatcgaaagcctgacggtcggcgtcgccgtcctggatcaaaacggacggatcagcggctggaaccgcgtctgcgaggagacgttcaaccggaagcgggaggaggttctcggcgaacgcctcagcgacatcatcggtccgagggccttcgccgcgatcttccccccggacacccagtcggaataccatctcgttggagagatcccgatcggccgcccctcgggcgaaatgcggatcttcgacatcgccaagacgccgctgcgggacaaccgccgtcatcccttcgggacgatcatcgtcttcgaggacatcaccgagaaagtccgcctccagcagcagttgttgacttcggaaaagctggcctccctcggcttgctttcggccggcgtcgcccacgagatcaacaccccgctcaccgggatctccagctatgtccagatgcttcaaaagacggtcggcgacgagcgtttttcccaggtcctgggcaagatcgaagctcaaaccgaccgcgtctcgcgcatcgtcaagaacctcctgaccttcgcccgcaatccggccgagccggggatgcaccggatcgacctccgggacactctccaggagatcatttccctcatcgactacaagcttcgggccatggaaatcgagctggaaaccgacctggctccggtcgcccccatctgggcccagggcgagcgcctgcagcaggttttcatcaatatcatcctcaacgctctggacgcgatgcccgggggcggacggctccgggtggagctccgggagacaccggtcgaagccgtcgtcgtcatcagcgacagcgggacggggatcaaggaacagcacttggcgcgcatcttcgatcccttcttcacgacgaagggggtcggcaaggggacgggcctcggcctgtccatcagctatgcgatcatcaacgagcacgaaggccggatcgaggtccaaagcgaagtcggcaagggctcgaaattcaccatctttctgccgaaagatctcgaccggcggaaatcgaaaacgagagaatcatgagtcacgcctccatccacgtcatcgacgacgaacccgtcatccgcgacgttctcgaacagcttctgcaggcggagggatacgacgtcacgctctccgaatcgggggaagcggccctgtccaagttcgccgaccacggcttcgacctggtcctcctcgacctcctgatgcccggccgcggcggcctcgagatcctgccggagatcaaaaagatccagccctcgacgatcgtcatcatcatcaccgcttacgcctcggtcgagtcggccatccaggcgatgaagatcggggcttatgattacgtccagaagccgttcaagcacggggacctcctcctgacgatccagcgggccctggcccacaaaacgctcttggacgagaacgaccgcctccgggaggagctccggaaaaaattcagcttttccaacatcctcggccgaagccggccgatggagcgggttttcgagctcatcaaggccgccgcccccacccggtcgacgatcctggtccagggcgaaagcggaacaggaaaggagctggccgcccgggccatccacaccaactcgccccgggcttccttcccgttcatcgtcgtcaacagcggcgcccttccgccggacctcctcgaaagccaccttttcggacacgtgaagggggcgttcacgggagcggtctcggagaaacaagggctgtttgaggcggccgacaaggggacgatctttttcgacgaaatctccaccatcgggctggaaacgcaggctaagcttctccgggtcatgcaggaccgggaattcatgcgcctcggcggaacgaaaaccatccgggtcgacgtgcggatcatcgccgcgacgaacgtcgagctcgaggacctgatcgaccgccagctcttccgcaaggatctttattaccggctgaacgtcatcaagatcatccttccgccgctgcgcgagcgccgcgaggacatccccctgctggtcaagcattttttagacgtcttcgcccgggagaacggcaagacgatcgagggcgtcagccccgatgtcttggaaatcctggaccgtcactcctggccgggaaacgtccgcgagctcgaaaacctcgtcgagcggacggtcgtcttcagccgggacaaggtcatcacccgggactgtctccctgacttgttccggacgccccgggaagcggcggccgccccggcggcggaaggcgacgggttggatcttaaggagcaaacgctcgcttttcagcggcgcctgatcgaaaccgccctggccaaggccaacggcgtgcaaaaaaccgcggccgcgcttctcggggtgaagccgaccaccttgaacgagatgatcaagaggcttgagatctcgccggaccgctcctagcctgccttattcgcgagttgaatatccttaagatcatcatcgaacggataacatctttagaaaatatatgaagaggaccggctagcggaattttccggggacgagcccgtccggattgatcttgaacttcaccggtttgacggccgccggaaaggaataaaacttggattcggagtcgacctcgaggatgtgccggaccggccggccgtcctccgtccaggccacggtcaggggaaaaaccatcgcctgtccggcctgacggacgaaaatcttcacttcgtagccttcgtccgccttgaggatctggtgcgtcaccgaggcttccggaagcacatgggaatcgatccatccgcggaaaaagtcacggagcgaacggccggaggcttcctccagggcccggatgaactcccccgtccggacggggcgataggctgaagaagcctggaaggcgcgcaggccgcggtccagcgcttcttcgccgatcaaatccgcgaggaggaacaggaccacggtggatttcccgtagatgatggcctggaaagcccggaagtcaagatagctcagccgggcgccgagcgtaatcggcccgtaatccgccatgcgcttcgtccaagaaacgctttttttcaggatcgacggaagcttgtcgttcccgtgcttcatcctcaagtatcgaatggccgcgtattgagacagcccttcgctcagccacaagtcgtggtaggtggccgcgctgacggcatgcccccaccattggtgggcgatttcatgggccagaaaaagctcccggtacccggggagatccaccgggctcccgaaatccggaatcccgggcgccgtggctcccgtccgcggttcattgaggatgacgaaggaagcggggctttgccccccggccgtctcggcgacgcgctggatgatggccagcttttcataggggaagggcccgaacgtttcttcgtagaaccggacgatcgcccgggcttccccggccagcgtcccgcggaggctccgaacgttctcggacacgaggacgttgatcgggggcggcgacgggtcctcgtcgaccgcgtcttcccggaagcgcccgacgataaaggccagccccttgaccggcttccgggtctcgaaaacagaaatccggttgccgattttctccagcgacagaacccggcggacctcgtcgacttcctccactccggcaagctctccgttggccacgcaaacgtagcggggagggaggctgatccgaaaccgggaaaggaaataatccccctcggacatggccgggtaccatccggccgacggcgtgtagagatcgccgtcatcgatgaaattcgctccggcgaatccgccgtaagccgccgcggcgtcgctcgtcggcgggggcggaggaagggccccgcggtaatagatgtccagggaagccgattcccccttctccaagggctggagaaaccggatgtaaagaagacggttcaccttgtcttgggtgaagaacagctcgcgccgcgaggcgtcgtagaccttgagaacgtccagggcggagtggaaatcaaaccgcaggttgtccacccccggagaggccgcttccagccggatgcgggccaaggcggaaaggaaacggcggtcgggctgaaaatccagatcgatgtcgcagcggaggatatcgactttttcccccatggtgaggaacatccttcgttcgttcccctcgcggatatccggagaatagaggcagagaagctggtctggcgagcggctccagaaatggatctcctcctccgaaaagggggaatatccatatccgaacccgctccgggagtcggtcccgaattcaaaaaccgcctggtcgctttgcggcaggaccgaaagccgcgccccggcgatcgggttgtcgatcgtgaacgagccgccgtaatagcggcggaacaaggcccgggctttcgcgatctccccgggcggacaagagccggccgggccggtctcgggggtgattttgatccggttcgcaaaaaacgagggggaaaaccttaaataagcggacaccagcggcttgtccaaattttcggttttgtaccgcaaggccagttggtggcgttccgtctccgacgaaggccgaaaacgcagccgccccgagccgatgatgatcaagcccgtcgggcggtcggggatgttgtcgtaaaaaacccaagcgttctcgaatgtcgcttccagatcgtcatggcggatttcaattcgggcggctcgctcgatccggtccgagggaattttcagcttgagaaaaatcgctggattcccgatcacgctcttggcccggatgactcgccgctccccgtcccgggccagctccagctcccacgactcaaacaaggcttccaggtcgttctgaaagacggcctgaacgaagagaggaacgccttccttgtcctcgaagacgttcgtcgccggaaaaaaaacggcctgggtcatccgcgaggcttgcctgagggaatcgtaggccgcgccctcggcgtcgcgaatttcggcttcgaaataagctaaataagccgctcgatcggacgattcgaaggcctccttcagcccggataggaacgtccggacgtcggtctgcggcggaagggattcctggccgaacgaggcgagaatgaaaacgagaacgagcggaaaggccgtcgcccatccctgcatccgcatggttaaattatagcaaaaaacggaaccgatgatgtttcgcgttcttctcatctctatcccaacataagcatgaaacatgccaatagaggattccggccggcgggatcggcttaaccccgaacaaagcccggccgtaaaccgcaaaatcgttggaaacaaaaaagaaaaaaacctccgcgatttatacgatgtaatgaatttttacacggccgatcccttcaccatccgaaaaaggcgcgttttggatcccccgaaaacgatttacacgggaagtcttcttctttaatctaaagacgccgcggggcgatccggaaccatgccggaaccggccctggaagggagacacccgtgaaagccatgctcatcacccgaatcctcgacgcctgggagagcggcgagccgctcgaaagccgcgatctccctctccccgtccccggtgaaggggaaatcctcctccgcatcgccgcttgcggcgtctgccacaccgagatcgacgagatcgaggggcgaacgccgcctccccggctgcccgtcattcccggccaccaggtaatcggccgggtcgccgcccgcggtcccggcgcccgaaggttcaagctcggagaccgcctcggcgtttcctggattttctcggcctgcggcaagtgccgtttctgccttgagggccgggaaaatctctgcccggaattccgagcgaccggccgcgacgccgacggcgggtacgccgagtacatggtcgtcggcgagtcgttcgccttctccatcccctcccttttcaccgacgccgaggcggctccccttctttgcgccggggccgtcggctaccgttcgttgaagctcgccgggctgagggacggacaagccctgggcctgaccggattcggagcgtccgggcatttggtcctccagaccgcccggcatttgttcccgcggacgcgcttctacgtcttcgcccgaagcccggaggaacgcgttttcgccgcggagctgggcgcggcctggaccggcgaggcctcggacacgccgcccgaggacctggacgcgatgatcgacacgacgccggtctggaaatccgtcgtcgaggccttgcggtgcctggccccgggcggacgccttgtgatcaatgccgtccggaaggaagacggggacaaagacgcgctccgggcgctcgattacgccggccacctctggcgggagaaggaaatcaagagcgtggccaatgtgacccgggcggacgccgtcgaatttctcaggctggccgcggaaatccctctccgccccgcggtgcaggaataccccctggccgaggcgggccaagccctcggcgaaatcaagcggcggcggatccggggcgccaaggtcctccggatcggctgaaacccgccggaggcgctatttcccggctttgatctcgtcccagatcttcacgtaaagcacgttcttttcccccagatcggccaggatctcgcaatgggccttgatctcgggagtcagaaaaatccccggattccccgtgatctccgccttcaacaacggataggaatccttgttggggcagaggaactggatgtattccgtgttttccgcggccaccgccgggtcgtggaagaagttgatgtaggcgtgggcgagcttgacctcccgggccgacttggcgatcaccaggtcgtcgcaggagatgaccccgccctcccggggcatagcgaaggcgatgtcctcgttttcggcctggacctggaggatgtcgccgttgtagccgtggaccaggaaaaattcgccggaggcgatcccgctcttgtactgttcgttttcgaacttggccaggttctcccgccagccgaggacgacggccttggccgcctcgagctcctcgggattcgtcgagttgaggctgaacccgaggaacttcagggccgccccgatcgtttcccgcatatcattcagcatgaccatccggcctttcagatccgcccggccgaacatcccccaggtcggctcaaaatccgcgaccttgctcttgaggtaggcgatccccgtgttcgtcagcatgtagggcacggaataggccatggttttgtcgatggcgatggccaggtaatccggatcgacgcgggagaggttcggcagccgggagtggtcgaggggaagaagcatcccctggctctgcatcaggctgaccatatagctcgtcggggtgatgacgtcgtagcccgtggctccggccttcagcttggcgtacatcgcctcgttggaatcgaaggtgtcgatgacgactttgcagttgttctcggcctcgaaccgggcgatcaattcgggcttgacgtaatcggaccacgtataaacgtgcaggattcccggggccttcgctccgcccccgcatcccgcggccaataagccggccgcggcgagaaacgctcccagagccgaccgtccgaacgtgcgcatcttcattgtcctccctccaaagctccggatttggataaacgctggctgacgagcacggtcgtgaacgtcagggccagcagcagggttgaaagggcgttgataagcggggtggcgccgtgcttgatcatgctgtagacgcggatcgggagagtggtcgatccgggaccggcgacgaaaaaggtgatgacgaaatcgtccaccgacagggtgaaggcgatcaggccggcggcggccaagccgggcgcgagcatgggcagcagcacccgccgggtcgccgtccagccggtcgctcccaggtcgcgggcggcctcgacgaccgtgaaatcaaaatcctggagccgtcccaggacgaccaaggcgacatagctgatgcagaacgtcacatgggccaggatgatcgtccccatccccagcttgacgccggcggcgacgaaggccatcaggaggctgatccccatcagaatctcgggaaccaccagcggcgtgtaaatcagcgtgtaatggacgcgttgaaaccgcgactttgagaaacggtgaagggccagggcggacgtcgtccccagaaggagggagacgaacgtcacgatcaaggcgatgaccagggtgttgcgggcggccgtccagatggccggctcgtgaaacagccggacgtaccacttgatggaaaatcctctccacgccccgccgaagcgggaggcgttgaaggaatcgacgacgagaataaggatcggaagatagaaaaacaccaggacgaggccggtgacgatgaagggaaaccggctgcgcttcacggcttcccgcctccttccggcggctggatccgggcctttttcccctggagggcgagaacccctaaaagcggcgccagcaccgccaggatgagaacgatcgaaagccctccggccaaaggaagattccggtcgacgaagacgcgttgggcgatcttgttgccaagcatttcgcttccgggtccgccgacgatgtccggaacgatgtaagatcccagcgacgggatgaaaacgaccaggacggccgtgaccaaggcctgccggatgcccgggagaaagaccttccggaaagcctggaaaggccgggctcccaagtcgcgggcggcctcgaggagccggtaatcgaatttctcggcggccgcgtaaatcgggaggatggcgaagggaagaaacgtgtaaaccgtcaccaggatgaccgcccccaggttatagagaagctgggaggagggatcgaccaggccgcagaaaaccagggcttttttgatgaggccctcgggatggagaatcgacttccaagcgaacacgcggatcaggaagctcgtccaaaacggaacgatgacaagcatgaggagaagattccggcggcgctccggggcccgggcgacggcataggccgtcgggacggccaggagcaggcagaacgccgtggacaggaagctgacccacagcgtccgccaggcgatcgcgagatactggggatcggccaagcctttgatcgtggccgtcgtccagccgcggccgatgcccccgaagggatcggccgggcggaaggcgaggatgaagaccagggcggtcgggatgagaaaaaacaacgacagccaaaaaaacgacggcagggtcaggaagaactcctgtccccggcgccggaggtttttcatgcccccggctcccggcccgtcccagccgcggcggtcatgcctcccccactttttggggcggggcggcgacgagcttttcatcgtcccgccggaagccctcgagcatgaacccgtcgtcgccgtgccagaacacccagacatcgtccttccagcggatcggcttctcgtcgagaaaaaaccgggcgtgctggcggagaacctggaggcggtgctcgccggcccggacccagtacttcgtcgtcggaccgaggtagatcacatcctcgaccacggccggaacggcgttccgcttcggcttcggctcgggccggtcgcgcgaaatctggatcttttccggccggatgctcaggaaaatcttatgtccgtcggcgatctgtttgtcgttgtaaacggtcacgtcgggaagtccctcgatccggaggcggctgtactccggttccggatgatcggcgacgacgccctccaggaagttcgtgtcgccgatgaaggcggcgacgaagcttgtccgcggcgcctcgtagatctcagccggggcgccgatctgctcgatccggccggcgttcatgaccgcgatccggtcgctcaggctcatggcctcgctctggtcgtgggtgacgtataaaaacgtgatcccgacctggtcgtggatcatgtcgagctcgatgagcatcctctggcggagcttgaggtcgagggcggccagcggctcgtccaagaggaggacgccgggcttgttgatgagggcccgggcgacggccacccgctggcgctggccgccggacaggagatccggcttcttgccggcctggtcctccaaccggatgaggcggagcatcgtctcgacttcgcggtcgatctcggccttcggcttcttggcgatctggagaccgaaggcgatgttgtcccggacggtcaagtgggggaacaaggcatagctttggaagatcgtgttgaccgggcgccggttcgggggaagatcggtgatctcccggccggcgagaaagacttggccggcgtcgggcgtctcgaacccggcggcgatgcggagcatcgtcgttttgccgcagccgctcgggccgagaagggcgaaaaactcgccccgcttgatttccaaggacacgccgtcgacggcctggatggctccaaaccgcttggagacgtttttaaactcgagaaattcggccacggcgctccttctgtgaggggcattatggaacaatcgttctggtttttcaagaacgaatatgctataaataccgccgacgcaaatgaatgtcatttcgatagttatccagatttttgtcctcctcttcgccatcacggtgcacgaggcggcccacggctggacggccaagaagatgggggacccgaccgcctacaacatggggcgggtgaccttgaatcccatcgcccacatcgatccgttcggaacgatcctcctgccgcttcttctctcgctggcccgcctgccggcgttcggctgggccaaacccgtgatggtgaatccccgcaatttccgcaatccccgccgggacaacctctgggtctccttcgccggaccggcggccaacatctccgtcgccctcgtctcgctcatcctcctgttcctgatgaagctgacgattcccggcgtcgggcggtttatccaggccttgatcaacggattcttccggcagatgggcttcctcctgcccgtcctctctcgaggattctatccgctggagggcctggccctcattctgatcatgaccgtgctcatcaattcttatttcgcccttttcaacctcatcccggttccgccgctggacggatccggcgtgttgatggggcttctttcggaccaggccgcgttccgctacgatcggatccggcccttcggtttcatcatcgtcctcttcctgatttatatgggtttcctggacatcctgatgtggccggtgaagctcatgattgtgattgtgctcggatgaatcccacccccgatccccgcaaaatcgtcctcagcggcgtccgcccgaccgggccgctgcacctcggcaactacgtcggcgccctccgcaattggattgccttccaggacctctaccggtgcttctacgctatcgtcccctggcacgccctgagctctgaatacgccaacgccaaggcgatccggggctggtcctacgaggttgccgtcgactggctcagcgtcggcctcgacccggaaaaatgcgtcatgtttctccagtccgaggtcaaggaacacgccgagcttcatcttctcttatcgatgatcactcctctgccctggctcgaacgggttcccaccttcaaggaacagctgaaagagctccaggaaaaagagctgaacacgtatggttttctcggttatcccgtccttcaggccgccgacatcatcctctacaaggccgatctcgtccccgtgggcgaggaccaggccgcccatgtcgaactgacccgggagatcgtccgccgttttaaccgcctctacggcccgatttttcccgaaccccggacgatgctgacggaagtgccgcggctggccggaaccgacggacggaagatgagcaaatcctacggcaacgccatctacctgaaggattcggccgagacgatccgggcgaagatcctcccgatggtcaccgatacccggcgggtccgccgaaccgatcccggcgagcccgacgactgccccgttttcaccctccacaaggccttcgtccccaaggaggcgcgggaggacatcgcccgcggctgccggacggccgggatcggctgccgcgactgcaaggccgtcctcctggagcatttgttccgtttcctcgaaccggtttgggagcgccgccgcgccttagaaaagaacccggagagaatctgggagattttcgaagccggcaacagccgggcccgccgcgtcgctcaagccacgatggccgaagtccgggacgccctgggattttaggctcgaggcccggacgcatggtcgaccccggatatcccaacgaggaaggcccgctcgagaagccggcccccgaagaggaatccgccgtcgaggggggcggggacggctaccagatcaagctcgatattttcgagggaccgctcgaccttcttctcttccttattaaaaagaagaagatcgggatcgaggatatccccctggccgtgatcacccgggaatacctcgattacctccacggccgagaacggatcaacctcgaccgggaagccgaatttctcttgatggccgccctcttgatctacatcaaatcgcaaatcctccttccccgggagcagcccgtcgagccggacatcgaccctcggaaggagcggcccgaccgaaccgaggattacgagcgggtcaaggtcgtttccgccgtcctccgggacaaggaggaggagcagtcgacgatctggcggcggacggccctcaacgttccgctgcccgaggaggatctcgacttgatcgaggtctcgctgttcgacctggctgaatcgtttttcgccatgatgaagcggaaacaagccgtgccgcagcggatcctcaagaccaaggaaatttcggtcgcggacaaaatccgggaaatcgtgagcgccctgcgggagcacggctttctcgattttcttgaatacctggacgcccaggagaccctcgaggaggccctggtcgcctttttctgcctcctggagctgatcaaggcccgccgggtcgtggccgtccaggagcagctgtttcacacgattaaggtctggcttcggaaagagccggccggcgaggacgcctgatggacgatttgaagaacattctcgaagccttgattttcatctcggtcgagccgttgacgatggacaagatcaaggaagtgcttgatggaacgcccgaggaagagatcctccaggcccttctccggctcgggacggaaatggaggacgccccccgtcccatccgcttggtgcagacgggcggcggctgggtgttcatgaccaaaccggcgtatgatctccacgtccggaagcttcttcagatcgagcgccgcaagcggctgtcgtcggccgccctggaagccctctcggccgtcgcttatcatcaacccgtgacccagaccgacatcatgaacatccgcggcgtcgattcgacccatgcccttcacaccttgctcgagaacaagctcatcaagatctccggccgcaaggacgcgccgggacggccgctgctctaccggacgacggagaaattcctgacgtatttcggcttgaattccctcgaggagcttccccgggagacggagctgaagaaaatcctcgaggaaggcaacgcctgaggtttttcatccgggccggccgtcccgatttggcctttccccggctgtatccgtccgaccgccgtcgcccgcgggaaagggagagacgatccggccgacaattttcatggattcatgcgggcgatcgcgccgaggcggagacgaaagaaagccccgcctctcccgccggacggacaggagcgtcaaggacgagccgcggcgcctcggcccgcttttcccgggacgggagggacttcatctaagttcaatccttatcttgacttagcgattgacaaaccgggttgaatcgtttagacttaaccatctttttcacccttttgattaacatggttaggaaatcatatccgtcttttatgctcgcgggagcaaattccatatccgggaaaaccgggagcggacaagccacggttttgccggcgggcggatccgccggcgccctacccatcaaggagaccccatgaccgaagatgcaaagcagaacaacgaaaaaatctcggccgaggattacgagaacctgctggacaagtaccaattcagctcccaggaagtcagcccgggaaaaatcgtcgccgggcgagtcgttaaagtcctgcccgcccacatcctggtcgacatcggcctgaaaagcgagggactcatcccgatcgaagacttcacggaaagcgccgacgcccggattccctccgtgggcgacgaaatcgaggccgtgctggagcggaccgattccaaggaaggatacttcatcctgtccaagcgccaggccgacgcccgccgggccctggagcttctggaaaaggcctacgaagaaggcgcctccatcagcggccgggtcatcgacaggatcaagaacggctataccgtccatgtcggtctcaaggctttcatgcccgattcccatgccgagctccggccgctcaaggacccggctaagatcgtcggccaaaccctcaaggtcaaagtgatcaaatacgaccgcaagacggaaaacgccgtcgtctcccaccgggcctacctgatggaagagcgggacaagaagaaaaagatcgtcttcagccaaatccagaaaggccagaagctaaaaggactggtccgctccctgacgagtttcggagcgttcgtcgatatcggcggagtggaaggcctgcttcacgtctcggacatgacctggggaaagatcgccaacccgcacgacctgttcaagatcggccaggaagtcgaggttctcgtcctcgatttcaacgagaaggacgaaaagatctccctggggaccaagcagctcacccctaatccttgggacaacatcaccgacaagtacaaacccggcgaccggatcgagggaaaagtctcgtccctgaccgacttcggggcgttcgtcgagctggaacccggcatcgaaggactcgtccacatttccgacctgacctggtctcggaaaatgattcatccaaaaaagctcctgaatctcggcgacaaggtcacggtgtccatcctggacgtcaatccgacctcccggcgcgtctccctcggcctgaaacaaacccagccccatccgctggaagagttgaaaaagcgtctcgtcccgggaacccggatcaaggggcggatcacgtccatcactgatttcggagcgtttctggaagtcgaacccggcatcgagggcctgatccatatcaccgacatctcctgggaaaagatcaagcacccctcggccaagctgaaagtgggcgacgaggccgaggtcgtcctcctgaacatcgacgtcgagaagcagaaagtctccctcggcatcaagcagctcgagggcgacatctgggaggaattcttcctccggcagaaagtcggcgacctgctcaacgtcaaaatcgtccggatcgccgaattcggcgtgttcgccgagattctccccgggatcgagggcgttgtctttaattccgagatcgacgagaaaaaggtcgagaacccggccgaggtcgtctcggtcggcgatcagaaaacggcgaaaatcatcaagctgaatccccgggataagaagatctccctcagcttccgccaggcccagagcgacctgcagaggcaggaataccagaagtatcaagaaacccaggatgaccggttgaccttcggcgacctgatcaaggaccagctccgccagctgcagaacgccaagaaatcaggcgccgaaacggaggagaaacccaatgattaaggccgacctcatcaacaagatttccaaggagctgaacatccccaagcaggaagcggagaccggcgtcaatatgttcttcgagacgatcaaggaagccctgctggccggggaggagatcgaggtccggggcttcggctcctttcggttccggaaccgcccgccccgctccggccgcaacccgaggacgggcgacccggtcaaggttccgcccaagaaagtcctctatttcaagccgagcaagctgctcaaggaactgatcaacaagtaacatggaatatatcgccgctccctggcgggagccttacatccggagcacgtccaaaaaagaaacgggctgcgttttctgccgggcggcccggacccgggacgacgcgtccgccttcgtcctcgaccgcggccggcgggcgttcgtcctgatgaacaaatttccgtacctgcccggccatctcatgatcgccccgtaccgccactcggcctcgctcgagcgcgcctcccgcgaggtcaccggggaaatggacgagcttctccggagctgcctgcgcgtcctaaaaaagcactaccgcccgcaggggttcaacatcggcctgaacctgggccgggcggccggcgccggcgtcatcgatcattttcacatgcacgtcgttccgcgctggaccggcgactcgaatttcatgcccatctgcgggcggacgaagatcgtcctcgaggatctcgagacgacgtacgcccggctggcccctcttttccgccgggaacggcggaacactccctcaaaatcatgacccccgcgtccccgaggtgaaccgatgctcaaatccatgcgtgaaaacgtcaagtccctgaagtgggttctctggcttgttgtcgccgcctttgtcgtctcgatcttcttcatctggggcgcgtccggaaaactcaccggcgacgacgccgggaacaccctggccgtcatcggccggaaaaaaatcagcggcgatgattatctccaggctcttcgcaaccggatcgaagccatcaagtcgcaataccaggaaatcgaccgggcattcatcgagcagctcaaccttccccagcaggtcctggagcaactcgtcgagcagactcttctcgtggaacaggcccgggcgatgcggctgcgggcgagcgacgaggagctccgcgaccggatcacgtctattcccggcctccagcagaacggcaaattcgtcggctacgaaatgtacaagagggttctccagtacaaccacatcaacctcagcgagtttgaacacagcctccgccaggacatcgtcctggacaagatgatccggctgctgacggccgggctggccgtcactcccgacgaggtctggtccgattaccaaaaggcctccgactcggccggcatcgatctgctgatcctggagacgtccaaggtctccctcgacgaggcgccgtcggcggccgaggtccaggctttcttcgaggcccgcaagggcgcttatctcatcccggagaaaagggaaggcctggccgtcttcttgaaagccgaggatctgaaaaaggaaatcgagctgtccgaaaaggacatcgagaactattaccaagccaatttgtcccggttcaccaacccggaatccgtccgggtcggccggatttggctgccgttcgaggggaaagacaaagcccttgtcgaagccgagggccggcgcgttctcgaacgtctcggcgcggggggcgatttcgcggccctggcccgggagctgtccaaggacgccaaggcgtccggcggaggcgattatggtttctatgattggcagtcgcttccccagcccgaacgggatgagattcaccggctgacatccggccagacctcggacctgatcgccgaggcggacggcctcgccgtcatccgggtgacggaaaaaacggccgcgacgacgaccccgctggccggagcctcggcccagatccggtccatccttctggacgaaaaagcccgtcagctcgccgacacccggatcgccaagatcgagaaggaggccaagtcggcccggagcctcgagacggccctccggaaagccggcctgaaaggggaatccaccgggctgttgaaaaacggcgaggcttggagcgacaacgatccgtccggcgccgtcggcacggccctcttcgggctcaaggagaaagaagtttcggccccggtctacacctacaccggcgtcggtctggtcgagctgcggaaggttgaggctccccggccggcggcgttcgaggaagtcaaggcggacgtcgaaacggccctggtcaacgagcgcaaaatggaaacgtcccgggcccgcctggccgctctcggacgtcgtctcgaggagaaaaactgggaggatatcgcggccaggaacggattcgagttcaagaccgtcgaggcccacaagcgcgaccagtatatcgccatcgtcggcgaaagcaagacggccgacgacctggccttcacccttcccctgaacgaggccagcgcgccgttcgatttcgagacggggacggccgtccttcgcgtgcgcgaccggaagacggtgacccgggaggaattcgaaaacgtgaaggaaacccaaacggcccagatcctgaaccagaaaaagaacatgttcctccaggcctacctggccaagcttaaacaggaaaagggcattcagatcaagtacgacaagttcctccagctcacccaggacgtcctctcccggtacgaatccgccaagcagtaatcctggcctggaatcggggacggattcggatttcgcgccgatacccgcgaatcccgccgggtgccgttttctctgctctgaattccacccctgtctcccatgtccttcgtttgtcctccgcggtggacaacaaaaagccggacgaacggaaaacggagcgggccgaaaaaaagcgcgggattccggggacgcgcgtatttaacggatattcatgcgtttagaaattcgagtctgaattttcgtctttttggtacgattcttgccgattctctttttggaacggctcgaaaaacgccggccaaggagaagcgagatgaagacgaagacgatgacggccttcctgatcctggccgcgacggccatgacgacggcagcctgtttccgttcctacgggcaccgccgttatcccggcacaccgaggtttgcgtccaatgactacgcctatgtccagcttctccggcgcgagccccgccgtgatcatgtccggttgggcaaggtttggttcaggcccgaaccttggatggaccgttatgaagtcaaactcattctccgggaaaagaccgctcggatgggcggcgacgcgctgatcatcgtggccgaccggtatccgcgcggcgccgccgctcgccgctaccggagccgggccgtcggcgaacgctggatcatcggcttcgtcatccgttaccggcgctagcccgccccgcatgagccttctcggccgcgtctgacctggacgattcccgagtcaagccggcggcaaagacaaaacgcggcgggggatgaatcaccgggcgcccggcggacggttttcaacgaagccaagagcaggcttgccgggattctccgacaggcggtctccaacggggccggcggaacataagccctttccccggacaacaaccgtcccgagggcggccgccggggacgacgattcccgcgtctttgacaacccgcgagtccgtcggctaaagtagaggcctgttgaaggaggccccgatgaatcccgtgaaaaacaagctctacgctgcggccgagaaagccgtcacccaatccctccggatcaaggccggagaacagttcctcctggtcacggacaaggccaagatggacatcgccgaggctttcgccttctgggccaagaagtgcggagcggagacgacgacctatctgatgacggaaaccctccggccgatttccgaaccgacgaagctttttcggatgctggccgaaagtccgaaggtcatggtctacatgctcgacgcccggatcgccgaaaagccgtttcggggctacatggttcaagccggcgagacccacggccggctgtgcatgatgcccgggatcacggtcgacatgatggagcggctggtcaacatcgactatttcaagctggccgaaaaaaccaagaggatcatgcggcttctcaaggacgccggagacgtccggatcaccaacccggccggaaccgacatctccttcagcgtcaaaaagcgcggctggcacatcgacatcggcgacatttccaagcgcggccgccacggaaatctcccggccggcgaatgctacacctgcccggtcgaggagacgtttacgggcaaggcggtcatcagcctgatcgacgacaagctcggccgcggggtgatgcatttcgagcgcgggaagcttgtctcctcttccgggaggggcatcgaggcggttctgaagaacatcggcgaagatccgaccggccggatcatcggggaattcggcgtcgggaccaacgccggggcccgcatctgccccaatatgctcgaggccgagaaagccttcggcacggtccatttcgccgtcggcgattcctacgggatcgggatcaacaagagccgccaccactacgacgccttgatcgaaaaggcctcgatttacgccaagggccgctggatcgcccgggacggccgctatctcgtttgacttcccgtccggggccgggctatcctctctcccggacctgacgccggaattacataaaccgggggagaatctctcttgaatcacagcgaaatcgtcagctttatctggggcgtggccgatctcatccgcgacaccttcaagcggggcaaataccaggacgtcatcctgccgttgaccgtcgcgcacatcaagaaccgcttccggacttaagccgataatttcctcttgacgtccggcttgttcttctttattatcacctggtcataaacgacggcagaattccatgatccgcaaagaggagaggcatgagcgtctccgcgaggagatcgagcggaatccgtttgtcacggacgaggagctggccgccgccctcggggccagcgttccgaccatccgcctcgaccgttcgaccctgtccatccccgacgtccggcgccggacccgggaaatggccggccgctacttcggcgtctcccggtcgctgggcgcccgcgaccacgtcggcgaaatgatcgagatcgatccggggaaaagcggcctgtcccttctggaaaccgagtcctggatgtgcctggagaaatgcgacatcgtccgcggccacgtccttttcgccctcctcaactccctggccgcggccgtggccgaggctccaatcgccttgaccggcgaagcccgcgtcgatttcctccgtccggtccgggccggcgcgcgcctgatcgccaaggcccgggtcgagaagaagatcggccgccgggtcttcatcgaggcggtcgcccgctcgggggagaacatcgtcgcccggggacgcttcgtcgtccacgggctgaaccgggagacggccgcccatctccatcttttaaaggacggcgagtaaatgccgaaaggaacgatcatgaccgaaatcggaatccgcagcatcggaacgagcgtccccaaaaaaatcctgaccaacgccgatttggaaaagatggtcgagaccaccgacgagtggatcgtctcgaggacggggatcaaggagcgccgcgttctcggccccgacgaaaagctccggccgcatgtagtggccgcggcgaaaaccgccctcgagcgggccggccttcagggaaaggacgccggtttcatcatcagctcgacggtcatctccgaccggttctgcccggcccagtcctacgaaatcgcccacgacctcggaaccgagcgggccctggccttcgacctcaacgccgcctgcagcgggatgatctacgggttgggcatcgccgagagcctccttcaaacccgagatctcgcctggggcttggtcacggccgccgagcagatgaccacggcgaccgattacaccgaccgagccggctgcattctcttcggcgacggagcggccgcggtcgtcgtgaccaaggaacggccgatgcaccgcctcctggccaccgagctcggctccatcccctccctcgtcgacgaagtccagatcggcggcgccaaagaccttttggccggacggacgaaaaacttctggttccggcagaacggatcgaccgtgatgaaattcgccgtccggatcatgcaggacctctgcgagcgcgtcccccgcaaggccggggtcgacatcaaggacgtccgctacgtcatcccccaccaagccaaccagcgcatcctcgacgccgcggccaaaggagttcccgggccggcggaattcatctcggtcatcgggaaatacggcaacacgtcgtcggcctcggtcggcttggcccttcacgacgcttgggaccgtttccaaacgggcgacctggttctcctcatcgccttcggcggcggactcagctgggccggcgccctcatcgagtggtgagccggccccatctgtcaggaagcggacagcccctggagggcgttcccttcccggccgaacggatcttgcccctgaactgattaatccggattattcacgatttgaatcatccggatgaaaaaggatttcgcaaggattcgacgagcaaccgctcgacggcttcttgaagcgcggcccggaaccgttccaccgtctcgtttatgtccccgccgaggaaatcccggatatagaggggcaggccgacgttcacccggatcgttcccggaatcccccaggcccgctgcgtgccgaaaatcgacagggggacgacggggatatccaatccctccccggctttcatccggaaggcgatgtacgggatcccccggccgaacctccggacgtagggattcgggtcgtccgggtggacgcggccccggccctgcatcgagacgaccgcccggccggcccgaaggtaatccatgaaaagagagacggccgtcaggttgctcccctcgtacatgtcggccgggatcgtcccgacgcgggcgatgttcgtcgagacgaagcggacgaaaaccgtcttgagcggccccagcagccggtcaagaaccaggccgtaattcttcaggtggcggcggaggtgcttgcggatcaggaagtccagctccccgcggtcgaagagcatccggttggcgttgaaaaacaagggacgggagacgatccgaaagaccgcggctggatccttgatcgctccgcagtgattgctgaccaggaggacgggccccgtctccgggatgcgggcggcgccgcggcaagccaggcgcttgggaaacaaggcggctttcgtcagccggtcgatcacgggaaggaggaggcgaagctcttcttcaggggacggcatggcggatccgccgccattctaaatccggccgggggttcttgtaaatgcccgggcggcgtgataatttcccctcatgacctctccggcgccggtgaaaaagccctccttgttcctctccctccttcccttgattctcatggccgttctgctcggcatcggctacggcgtgtatcaaatcaagccgcaggtcctgctcgtcgcggccgcggccttgaccggtctcctcggctggggcttgggctactcctggaaggagatggagaaggggatcgtcgaggggatcgccaaggccatgccggcgatcctcatcatgctggccgtcggagttatgatcggcgcttggatggccgccgggacgatcccgatggtcgtctattacggcctcaagctgatctccccgaaattctttctcgtcacggcctgtttcgtctgcagcctcacggccgtggcgacggggacgagctgggggacgatcggcacggtcggcgtcgccttcatggggatcgccatgggcctcggccttcccctcggcccggcggccggggccgtcgtctgcggggcgtacttcggcgacaagatgtctcccttttcagacatccccaacctggccgccgtgaccgccggcgccgacctgttcgatcacatcaagcacatgatgtggtcggcggttcccggctggttgctcagcctcggcgtattcttttttttcggattccgctcccaagcgcaggccgtctcctcggaggtcctgacgaaaatcaccggcacgctccggacccatttcacattcaacgtctggctgctcctgccgctggtcatcgtcttcgccctggccttcgccaagaagccgaccatccccggcatgctcttatcctcgctgatcgccgtccttctggccgccgtcttccagaaagcgcccttagccgacctcgccgcgtctctgaacacggggtatccggccgccaccggagttccggaagtggaccgcctcctcagccggggcggcttgatgagcatgatggagacgcagttggtggccatcaccgccttctgcttcggcgggatcatgcagaaaaccggcatgctcggcgtggtcttggataaagtcatggccggggcccgcaaggcggggagcatcgtcctggtgacgatcggatcctgcgtcgtcacagccttagtgacgggcagctcttatctggcggtcatcctgcccggagagctgctcgggcccgctttccggaaattgcggctggcgcccaagaacctttcccggatcatcgacgaatgcggggggatcatcgtccctctcgtcccctggagcatggccggcgtgtatgtcgccggagccctcggcgtcccggtgctcgattacctgccctgggcgatcgggaattacgccgccctcttcattcttgcggtcttcggcttgaccgggttcaccatgacccgggaagacggcggcccgcgggacgaggcctgaccgccggctaatcctcagccggcggctcctcgccggccgcggcgaacgctttcgcgaacgcgtccttggcccggtctttcttttgtttctggagggaggcggtggcctcgaattttgtggccaggccgtccttcttggtcttctcccgggcgagaaggtcgtccagggattcttttttccgggcggcccgctcggtcttcaggatgctccggtttctcccgtccacccaaatcaccgttccgcaatgcggacaggcgatctcgaacgcctggtctccgttccgttcctcgttcgggctcattctttcactttatcagaaccccccttccccttcaatccgccccgggggagttcccctcggcggcgccgggcgccgtaatccggtgcttttttagtagcttaaagagagcctgacgggagaggccgatttcctcggccgtccgggccttgttgttttcatgccggcggagagcctggccgagaaaccgccggacaaaatcggccttggcctcaaagaagttgaagctttcgggggccgggcccggcgaccggccgggattgagacgcggcgacaggtgttcgacccgcacgatcccctcgttgccgcacaggatcaggcagcgctgaacttcgttctggagctcccggacattgccgggccacgcgtacgccagcagcgtttccatgacccggggagtgaaataaacccgaggccggccgatcttttcgccgtaccgggcgataaaatggtggaggagcagctccaggtcgtcgggccgctcgcggagcggcgggacgtcgatggttacgatccggagacggtagtaaaggtcctcgcggaaccggccgctgctcacttcccgctccaaatccttgttggtcgcgctgatgaaccggacatcgaccggccgggtccgcgtctccccgatccgccggatctcgcgctcctgaagaacccggagcagtttcgcctggagcgggaatcccaagtcgccgacctcatcgagaaagaacgttccccctccggcttcctcgatcaagccgggcttgtcccggagcgcgccggtaaaggcgcccttggcatagccgaagagctcgctttcgaggagattgtcggggatcgcgccgccgttgacggcgacgaatcggccgccggcccgggcgccgcggaaatggatcgcttgggcgatgacttccttccccgtgccgctttcccccgagatgaacaccggagtgtccaggtctttcagccggtcgatcagctcgcgaacgcgggcgaaagacgcgctccgcccgaggaggacgatgtcccgcccggctcccccgtttccgccgtcgttgacttcgctcatgatccgttccgttgacattcaaataacggagcggaccgcggttttttctcaccgcgctggtcgtaaataacgcggaacagagaccgccggccggcggttaccggcgctggccgcccaagattgagccgaggaggccccggatgatctggcggccggccgaggtggccagggaccgggccacgctcttgccgacggattcaacaaaggtgtccctcggccggccgaccggacgcggggcccggggcggctcataggagggtccttggggataaccggtcggaatgggggagcgggcggccgcctcctccgcttggcgggctttttccttcagatgctcgtaagccgactcccggtcgatctgccgttcgtaatggccgtacaacaccgagcttccgatgatccggcgcctttcgtccgccgaaatcggcccgatctggctccggggaggcaggatgaacgcccgctcaacaatgccgggccggcctttctcgtccaggaacgagactaacgcttcgccgacccccagttcggtgatggttttctccacatccagcttgggattggcccgaaaggtcgtggccgcggctcggaccgccttctgatcgcggggagtgaacgcccggagggcgtgctggatccggtttccaagctggccgagggcgatgtcgggcacgtccaagggattctgggtgacgaaataaacgccgactcccttcgagcggatcagacggacgatctgctcgattttctggaggaggacggcaggggcgtcggtgaacaggaggtgggcttcgtcgaagaaaaagaccagcttcggcttctccaggtcgccgacctcgggcatgttttcataaagctcggccagcatccacaggaggaacgtggcgtaggttttcggctggagcatgagacggtcggccgccaggatgttgatcacgccccgcccctgggaatcggtttggatgaaatcggcgaggttgagggccggttcgccgaacagccggtcgccgccctgcgtctcaaggtcgagaagggaccgctggatcgccccgatcgaagccggcgagatccggccgtactcggtctgaaagtcatcggcgtggtcgccgcagtactggagcatcgcccggagatccttggaatcgaggaggagaaggccgttgtcatcggcgaccttgaaaacaagagacaggacgccgctctgagtctcgctcaggttgaagagccggctgagaagaagcgggcccatgtcgctgatcgtggtccggaccgggtggccctggtcgccgaagatgtcccagaagacaaccggcttccccgcgaattcaaacggccgcaggccgagcttgtccagccgctcgccgatcttaggcgtttccgtccccggccggctgacgccgctgaggtcgcccttgacgtcggccatgaagaccggcacgccgatccggctgaagttttccgccagcacctgcaacgaaacggtcttgcccgtgcccgtcgccccggtgatcagcccatgacggttggccatgcggggcagaaggcggatctcctcggttcctttggcgatcaacagggattccgtattcataagcgctcctcatcggcgggataaaacccttataacgtccgcctccctcccctgtcaagccgctggaggctctttgacaaatcgggcgccgcatttaagccgaatcattctccgcgcttctcgtcatggaggcgccgctccggcggccgagccgtcacggtccctttgccgcggcggggccgaagcgtcctcttcgatgcgacgggctgcttttcctgttcatcggaaaaccaggcctccgtttcttgacaccgtttgcgcccgaggataccatgcctcgagggagggagcgggccggggcgggagaacgagcgtctcccccaaaccggcgcctggtccccccttcaattaaggaaaacaacatgcgctttgaccgtggacttcggctcttgatcgcaggatcttttttactggccgccccggccgtcttcggggagaaccgggccgagcaatgcacggccgccgtgatcagcccggcggcttccgccgccggcggagcggtgctgtggaaaaaccgcgacaccgccgtcctgtccaacaaggtcgtcttcgtccgggagacgccctacagctacgcggccctgatcaatgccgagggcgcctcgggccgccaagcctgggccggcctcaactccgccggtttcgccgtcatgaacaccgtggcttataacctgccccaaaaatccggggagctccaggacctcgagggcgtcatcatggccgacgccctccgcacgtgcgccacggtcgaggaattcgagcggctcctccgggccaatctcggtcccgacctcggcgcccgggccaacttcggggtcatcgacggaagcggccgagcctgcctcttcgaggttcacaaccacggctttgagaagttcgaggcgtccgcggccccggaaaaatacctggtggtcaccaacttcgcccgcagcggccgggccggggcgggggccggctaccttcgattcgaccgggccggccggttgttcgcctccctgccgcccggccggccgatcgattttcaaacgatcctgacgcgcttcagccgggactgcggccacgcgctgctgcggaatcccgatcccgaagagtggaaaaatatcccggccgagcccggcttatggattcacgcccgccacaccatcaaccgccccgacacatcagcggccgtggtgatcgtcgggaaaaatccggaagatccggaatcctcggcgacgatgtgggtcatcccgggtgaacccctcacggccgtggccgttcctctttgggtcgaggccggccggagcccggagcccctttggaagggagagaacgcgcctctttgggaggaatccgcccggatcaagaccctcatccatcccatcgacgagtacgataaaaacgaatatctgctggtctcccggctcgacaacgccgacggcacgggcttcctgccgaagctgctggaggcggaggaggccatcctgagggaaaccgaggcgttcctgaaaacccggcccgagccggccgagaaggccgattttcaggaccggatggccgcccgggccctggcggcgatgaaagcggtcaagtgacgccggccgaccgccgctgaatttgggccgccgccccgattttataaatcctccttcgatccgcgcctccgtttcttattgagaggaaaggagaatccagccagggggggaaatcgagggagtgtccgcccttaacctttccggacctccggcgatatactcggttgtgaaatggacgtgaaggagatcgaattggccgcccgggtgctcgccggagattccacggcgttcgagccgctcgttcttccctaccggaagacgctgttcggactggcctataagatgaccggcaaccgcgaagatgccttggaggtcgcccaggaaacgctcctccgggccttccgccatctcggaaaatgcgatttcgaacgcggcttccggaactggctgctccagatcctggtcaacgtcggacgcgagcgagccggccggcgacgccgggaaacggcttgggcgaactccgatttccttctggagaacgccggcggcggcggaccggggcccgaggaagcccgcggccggcaagaaatccgggaacgagtcctctcggccctgtccgccttgagcgcccgggagcgggacgtattcatcctccgcgacctggagggaaaaagcgtccgggaaacggccgcgatcgtccggagctcggcgatcgccgtccgcgtccatctctcccgggcccggggtaaaatccgcgatcgattggccgccctcgatccttcgcttcaggagacctcccgatgaattgccggtccgcccgcagacggctttccgatccgaccggacggattttctccgccggatcgaaaaagcgcttggaacagcacctccgggaatgcgcctcctgccgaaccgaggcgtccgcctttcgggccgggatcgaggccttgaagcatccggccgttttcgacgacgcggatttcaccgaggcggaatggagggtcgcgatccgggcggccgtcgccggcggaaagacggcgaaatcggaccgtttcgcccggttcttccgcccctccctcggctgcgttctgggcgtccttcttgtcggcgccgccatatttttcggcgtccggcatattccctggctcatccccaaggtggaaaaccatccctcccgggccgcggcctccgccgcgcggcctcggatcatcaagccgaacgcgcccgggaccattccggcggaaacggactcccgggccccggccgggggaaccgtcttttccgccggccgcccgtccccctttccttcgtccgcagcgcccccgccggcgggagacgtcccgtcgttcacgtggatatcggaagagaccggtcttcagatcgtctggtttatcaatgactctctcaacctggaggaatgacatgaaaaaatccgttggaatctttcttctcgccgggctcacgttcgttttcgccgccgccgtccgggcccagagccaaaacccggcggccgcgtccgcttccatgccggcctcccccgccgagccgcctgaagcggcgccccaggccgccgcgccgcccgccccggcccttcggaccgagctcatcaagctgaaatacgccgatctcgaaacgatcacgattctccttcgagggtaccaaagcgccctcggccgcgtcatgccggccgggcgcgcggagaaatcgatcgtcgtcaccgacacgccggagatcgtcgagaaaatgatatccatcgttcgggacatcgacatcaagccggccgagatccagtacacagtccagatcgtccagggatcggacgcgggcgaagataccctgaagaacgatgcggtcatccgggagcttcgcggcatcctgaaatataaaagcttcgtcctcctcgacgggacggtcatccgggtgatcgacggcgagacggctcaagcgaaaatcggacccaagggggaatacgaagtctggctgagaccgaaatacacgaaggacggaacggtcgaaaccatccagaccgagatccgcctgggcaggcaggaatggaacccggcggtgacggtcggcctggtgaaaaaagaggaggccccgccggcggcctcgcgcttcaacgagctcatccgcacgacccttctcctgaaggccggggaaaagaccgtcgtcggcgtttccaagacggacgccgaccggggactgatcctgatcctttacgggaaagcggttaaataagccccggcccggcgaaaaggcgccggagggaatcccgccgaccggggttcctccggcgccttttccctttggggatcggcccgggagagaggattctttcatttgaaccttgatttccgggaacaaaaatgattctctagggaaaaatccgaaggagcgttttcatgagcacaaccagcctcgatcgcggcaggatgattccgattcatcccgggaggcgcgccgcctcggatgccgatcgcgggccgcgacccctcgccgccgccgccgtcgtagtactcctggccggagctttcctttccctcgggtgccgccccggcgccgccccggacttcgcggccgccccgccggagctggtcgagcttgccgtcgccgccccggacatcatcctggacatcaagtacgcgacgaccgacaacttcaccggcaaggccgtctatcccatcgcccgttgcttcctcgtcaaggaagccgctcaagccctggtccaagttcaagcggatctgcgaaccttcggctacggcctcaaggttttcgacggctaccgtcccctttcggtccaaaaaatcttctggtcgattctccccgacgagcggttcgtggccgatccggccaagggatcgcgccacaaccgcggctacgccgtcgatctcaccctcgtcgacgccgccggccgcgaggtcctcatgccgacgccgttcgatgatttcaccgagcgggcggcccgcgacttcatggacctgccgcgggaagccatcgcccaccgcgcccttctcgaactagccatgacaaaccggggattcattccctacgccccggaatggtggcatttcgatttccgcggcttcgaggacaaacccgtcctggacgtcccgctggataaaatgaattgaccgggagaagctttctctttttcccatccctttttcggccggcggcattcataagatcttttcggattcctgtctatctcttgtcctcaacatcgtcttcatgaggaggacagcccgtcgggcgtgccgaaggatcgtgtttgctccccggcgaagaggtccccgcgcgaaccgttcgctcgaaccgtgtatcctgaaggccgggatcagaggatcgccaccgcccgaacgggcgagccgtccccgccggcgatgttcaggggcaggcaggcgaagaggaacgcccggccgcggagcgtccggagaccggtcaggttttcgatgatcacgataccccgggacagaaaaatccggtgcacggccggacgggccgcatccatgacgtcggcggaaggcgcgtccaccccgactcccttcagcttgaagccggccagccagcgggcggccttctccgaaagcgccggatggccggagaaatacgcgggactcccccagcgcttcgcccagtcggagaagagaagaacgaattccgaggccgcgatccggtcccggtccccctccaggtcggcgatctcgatccgcggcccggcaaggcgggagacgtccacgagacagccgggcccggcgaagcgggcggccggcagccggtcgagggccgcgccgccggccagaaaatgggccggcgcatccacgtgcgttccggtgtgagtccccaggcggagggttttcgaggcgaatccgtgttcatcgatggtcgaggcttccgtgatccgcggggccgcgtcgccgggaaagaccggcatcgtttcggcgaggagatggcttaaatcgatgatgcgcacagtgaaagaggaagcggtcaggacacgattttttcgaggatcttgatgcgcttggccgtgttgcggaacttcggattccaggccgaaatctcgcggtaaagagccagggccgcctcgttttcgctgatcatctcgtaaaacgaggccagttcgtacgccaaggcgaaccgctccggagattcctccggcgtcaaggaaatcgccccctcgaaacgacggcgggcttccggatagtttctttttttgacgcagcattgtccgatcagactccagcaatccgccgtccggcccggatcggcggccgccaattcgaactcggcgatggcttcctcatagaggttctgctcgaaaaaggccaagcccagattgtagcgggattcataattgcgctgatccaccttgatatccacctgccggcggaattcctggacgatatcgaccaggtccttctcgatgaccgaggtccgctccttaagctgcttgtagaactcgacttcgagagcctcgatttcctcctcgatcttgtcggtgatgtcgatatacccttgggacgcggcggcggaaccggctgccgaagcgacgaacgggccgatatccaagccggcgaatatttcggcggacgtgaccttggatccggcctcttcgtcgggcgcctcggcctgaggcgcggggagcggcggaggaggcgcgggtttcgtccgggaggcggccggaccgctccgaacggaaaaaaccggtccctttttccggctcgacggtgtttcggcggccggatgaatcggggtttcgggaggcaagggctgggcgaaatcggaaatgagcaattcgaggtcgaggggcggagccgaaaccggagggacaaccattcccggttcaaccgcagggccgatgatgtcgatctcccggcgggccgtttcctcgacgatctcagggattttcttgtcgatgataacgctcggggcggcccgaagactttcgattttcttctggatgcgcggatcgtcggggtagagaagccgcaggttctccaggatccgccgggcgttccggacgaggccttgttccaggtaaagctcggccttggccaaattcagccggagcatttcctggtcctgttccgaaatcggccggccggccccgggcgccacctcggcggcctcctgatggagctcgcgccggatccctagagtctccgcttcttcggcgatcccggcatccatcggaaggaggatatagagctcgcggagaatccggatccggtcattgtcccgactctcggaacggtattccgccagaaggacccgaagcacgacttccaggtccttcgtccggccgacgccgcggaagacgccggccagccgctcgagcgtcggaagatgcatccggccggacatcagaatgagcccgagcaggccggcggctttatcctcgtcgcttttctggagaaaatgggatataagcggatcaaagatctccagggcctcatccggccggccgcgctcgatctcaatgattccgagtttcgcccggatgtcgtagttcccgggatcctcggccaggatccggccgtagatttcggccgccttgtccttgtctccctgctcgctgtgcaggagagccatcaggctgagaaggtcggtccggggccctcgcttcttgacgatccggcccagcatttccatggatgtctcgggccgcttgagctcgcggtaaacgcgaacgaggttcgtcaacgtccggtaatcgccgtcggcgacggccagcgcctcgaggaggattttttcggcctcgccgtattccttgcggacgaaaagcagatcggccgcctcgttcaaaacgacctgggcctgatcccctttccgctcctccagatagaggcgggcgagcttcagccgggtcaccagatcggtccggtcgagccgggccctcttttcgtagagggcgatcagcggcttggtctcattccgcttttcatactcatccgccgcttgagtatattgttcccgggcctcgcccgaaaatccgagctgcccgtagagatccccgagccggatcatgacgtccggttccgccggccggatcttgttgaccttcttggcgatggccagggcctgcgaatacgccccccgccgttccagcgtttcgacgttattcatgaaaagctcgatggcccggtcttcctgtcccagctggaggcacaagtctccgatgatatttccgatcgagacatcctggccggatccgtccaggagcttttgatattcggcgaccgcttcctcgattcgtcccgccttgacaaattggcccgcccgttcggagattttggcgcggtcggaagctttaatagtcatggattcagaagagcttcggttggtattgtagattaaacgacatccggtgaaaaggggtcggaccgcggagagccaaggcttcaaaatgagcgcgcgtgccgtagcccttgtgccgctccatcccgtagccgggaaaacggcgggccgcccggatcatgatccggtcccgggaaaccttggccacgatggaagccgcggcgatcgagaaactccgccggtccccgccgacgacggcgtcctgaggccgggggaaatcccggatcgcgaggccgtccaccaggaccatgtcgggcggaacgggcagcgcggccacggcccggcgcatcgcctcctgagacgcccggagaatgttcaagacatcgatctcggcgtttccggccaggccgagaccgacggaggcctcttggcggatccgccgggcgagccgctcgcgtcgcgtgggggaaaggcgcttggaatcatccagccgttcgacccaatcgggcggcaggccggcaaaccaagagaacggaaggatgacggccgcggccacaacgggaccgcacaaagccccgcggccggcttcatccacgccggcgatcagcgtcctccccgcttcgagatgccggcgttcaatctcgaaatcgggcaaggcgcggatcagcgttcttcgcggagcttggccgctttgcctttcagtccgcggaggtaataaagcttcgcccgccggacccgtccgctgcggacgacctcgactttcttgatccagggcgactgccgcggaaaaatccgttccaccccgatgccgaaagagaccttccggacggtgaacgtctcgctcatcccgcggcctttcttggcgatcacgtcgccctggaaaatttggacgcgttccttttcgccttccttgatgaggacgtggaccttgaccgtgtcgccgatagcgaaaggcgggagatcttttttcatcaccttgtcttccgtcacttgtaccaggctcattgttcgttcctttcgttgtcgatttcgtcgagcaacatgcggtcctcgggcgagagcgacagccgggcgaaaaggtcgggccttctccgccgcgtcttctccagcgccttgcggcgccgccaggcttcgattttatcatggtcgccggagaacagcacctccggcgccttcatcccccgaaaatcccgggggcgggtatactgaggatagtccagcaagccctcggcgaacgattccttgcggaccgagccttccttccccacgacgcccggaatgtgccgggcgacggcgtcgacgatgatcatggccggcaattcccctcccgtgaccacataatcgccgatcgagatctcgtccgtggccaaatggagggcgacccgctcgtccacgccctcgtagcggccgcaaatcagaacgacccgaggttggagggcgatttccctggccagccggtcgtcgaacctccggcccgcgggcgagaggagataaacgggcggatcctccgaaccccggaccgcttcgaccgcggcgaagaccggctcgggcttgaagaccatgccttcttcgccgccgaacgggcggtcatccacctgctggtgcttgtccgtcgtgaaatcgcgaaggttatgcacccgcaggtccaaccgtcccctttggacggccttgccgatgacgccccccgcaaagacgctcgggaacatctcggggaagatcgtgattatatcaaatctcatttaagtccaaaaggccgtcaggaggatcgatgacgatccgcttggcttcgatgtcgatgaccgggcagatgctccggctaagcgggatgtaaatctcattccccccgccgtccggatccaggacgagcaacggtgttccacccgtgtcccagactccccggacaaggccgacgggacggccttctttcgtcacgacccggcacgcggccaagtcttcaacggcgaattcatcctcggccggaggggcgacgtcctcatgaagggcgaagatttcccggccggccaggggcaaagcgtcgggaatcgagtcgacgccccggagcttcagcgtatgggcgtctttataaggcgtcagggattcgaccgcgtattcgcggaattcatcgttttccctgacaaagattctaaaaaaaaaccacccgggcggggagcggcgtccaggaccgccttcacttccccccggcggccctgggttcggagaatccggcccaggcgtttcacggtattatttttcgatgatttccaggttgtagcggtgcttcagcttcatcccggcggctccgaggatgatgcggatggcccgcgccgtgcggccctgcttgccgatgaccttgcccaaatcctcgggagcgaccttgagctccagaatcgtggtttgttcgccctcgatctgcgaaacgacgactttgtccggctggtcgacaagagcctgggcgatcaattcaacgagttccttcacgttctcctccttcgggaaaatcgccccggcgatcaggtcttgggagtcgctttctgcggtttggccaggagcgatttgacggtttccgagggtttagctccccggtccatccagtattttgctttggcgaggtcgatttttatttcggcgggatcggtcaggggattataggatccgatgatcgccttcgccttgctttcccggggctttttcgagtcgatgacgacgacccggtaagcgggctggcccttggctccaaatctcataagacgcagtgacaacataattgtgtaatccgttcttttaaaatggtttgtagataatagccaaaacccgcttgaaagtcaaccaaccgatccgctccttttattcttttcccgtcgacccgaaaaccagcgccgaaacagcgcgacattcccggcgcggcaagtccggagatcacagggcggcccgcaggatgccgatcagcgttttttcgtcaagggcgaccggattttgccggatggagctggagcgccccgcggcttcggccaggacgggcaggtcggcctcggtcacgccgaaggctgaaaggcgaggaagttcaagctcctcgacgaaggcggaaagccggtcgccgagggcggccatccgtgttttttcggatccccgtctcgcggggaggaagacctccgccagccggaggcatttggccggaaccgtccggcccgcgcccccggcgatcatggcccggatgttttccgagagcacgcctggaagaacccgcccgcaggcgactccatgggggatgggaaattttccgcccagggccgcggccagtccatgaacggctcctaggcccgcgttggccaggcagatcccgctcaagagggccgccacagccatgtcgtcgcgggcttcgaggacgctcccgtctcggaaggcgggaacgagcgaccgagcggcccggttcaagccttcaagggccagggcgtccgtccacggccgggcgttcagggccaggaaggattcgaggcattgggccagggcatcaagccccgtggaagccgtcacggccgggggaagggtatcggtcaaggcgggatccaccaaggccaagcggggaacgagggccggcccccgcaagctggccttgacccccaacgcccggctggccaggacggcgttgcgcgtggcctcggcccccgtgcccgccgtcgtcggcacggcgatcaccggaacgccggggcggctgaacggccggcctcggccgatcacctcgagataatcgaggacttccccgccgcctgccaacaacccggccacggctttggccgtatcgatcgcgctgccgccccccaagccgaggatgacctccggttcgaacggccgaacccgggcggtcaaggcgtcgacggcttcgacctccggctcccccctgacctcggcttcgagaaactccagcccttcggccgccagcgcgcttcgcgcggcctcgaccgtcccgcctgtcgccggaagggctccagtccggataaacagaacccgcctgccgatctccgcggcccggcgtccgatatcggccgccgcgcctcggccgaagacgatccgggcgggggcggtccattcaaaaaccatggcgggatctcaccaggcggcgggtcgatcctcgggaaagagactcaagtgcttgatcccttcccgcggccgggacatccagtcggccacggtttccttccaagccaggtaatgggcggtttgctgatgggcggcgaaatcgtcccggctccggtagacctcatagagaaaaaaacggccgggctcgtcctcatgccggaggacgtcgaagcgcaggtttccgggttcccgccgcgtcttttcgtgattcatccggacggcttcgatgaacttttcctcgaatcccggtttgatccaaatcgtcacgccgacgacatacatggaattcctccttgcgatcagcgctcccgggcgggaccggaaaccggccgcccgttcatttcaacgacgacatcatcttctggaagatggattttttcatcatcgagcgcatctcttggaactggcggagaagctggttcacttcactcaccggccggccgctgccccgggcgatgcgagcccggcggctgccgttgatcatcctcggatcggtccgctccgcggccgtcatcgaatcgatgatggcttcgaaatgccgcagccgggcctcgtccatccgggccccggccaggttcttgaacggcccggcctggggcaggtggccgagcaccccctcgagggaacccattttcctcaactgacggagttgggaccgaaaatcatcgaaggtgaactcctgccgccggagacgcttggccagggcttcggcttccttgaggtcggtttcttgctcggccttttcgatcaagctcaggatatcccccatgcccaggatacgggaagccatccggtcgggatggaagacctcgagcttgtcgaatttctcgccgacgccgatgaacttgatgggaattcccgtgaccgcgacgatcgaaagagccgccccgccccgggcgtctccgtccagcttggtcaaaatgatcgaggtcaggccgatccggtcggcgaaggtcttggcgctcttaaccgcgtcctgcccggtcatggcgtccccgacatagatcgtttcaacgggcgaaaggacgtccttgacgatccgcagctcgtccatcaattcgtcgtcgacgtgaagccgtccggccgtgtcgacaagcaagacatcgtatccgcggttgcgggtatattgaagaaggtcggccagggccgaccggggcttggccatggccgcggccgtcatctcgtaaaacggcagatggagctggccggagatggtccggagctggtcctgggccgcggctcgcttgaggtcgaacgaaacgaggaggggactgcggcccttgccggccgcccatttggccagcttgccgcaggtcgtcgtcttgccgcttccctggaggccgacgagcatgaagatcgagggcggtgcggaggcgaacgtcaggggcttgtccgttgttcccaggacggaggcgagctcgtcccggacgatcttgatgacttgctgggccggagtcaggctgtccaggacggtctgatccagggcccggaccttaatccgggcttcgaaatccttgacgactttgtaattgacgtcggcttccagaaaagcaagccggatctgcctgagggcctcggacatattgccctcagtcaccttcgcctccccgcggaggtatttcatcgccttttgaagacggccggacaactgatcaaacatgggattctcatgataggggaagaggcgggcaaaagcaaaggaaggcgttttcagggggaaaatgtcgaaaatccgctcctaattcgtgcggcggcccttttcttttgttataattagggagctcatgctgaaaatcggcctctccggggttcgcggagtcgtcggcccgtccatgccgccgacgatggtcatggattttgcctcggccttcggggctttcatcgaccgcaagccggtcgtcgtcggccgagacacgcggattcacagccccatgctccgagcggcctgcgtttccgcccttctctcctccggatgcgacgttctggacctcggcgtctgtcctacccccctgctgcaaaaagcagtccggaggcgcaaggccggcgggggcgtctccatcacggccggccacaatgacgtttcctggaatgccttggctttcatcggcccggacggctcccctctcaatccctttcaaggggaggaagtcctcgattattaccatctcggcagattcgagcgagcggccgtggaccatctcggccggctcattccggtcccgacggccgagacggccgatttctatttcaaggagctcggcgctttcatcgaagcggccgccgtccgggcggcccgcttccgggtggtcatcgacgcctgcgccggagccggcgcgccgtttctagtccggttcgccgacacgctggggttcgacttgatcccgctcaacgacgagcctaacggattcttcccccacgatccggagccgcggccgcggaacgccgctcagtgcgcctcggtcgtccgggcggccggggctgaggcgggctttcttctcaacagcgacgccgggcgcgtctccctggtcagcgaaacagccgaagccctttccgaggaatacacgtttcccctggtcgccgattccgtcctggcccggtgctccggtccggtcgtgaccaataattccacctcccggatgatcgaggacgtcgcccgggcccgccgatgcccgctgatccggacccgggtggggcccgctccaattttcctggccttggcccaggaggacgggatccttgccggcgagggtagcggcggtgtcgccgttcccgccttccagccggccttcgacgccttcttaacgatgggcctcgtcctggaaacgatggccaagaccggccaacggctgtcggccctcgtcgaccgcctcccccggtatcacatcgtcaaggagaaggtctactgtccggcgtcccgcatccacggcgtcatcagcgaaatcgcccggatgttccgcggccgcgacgtcgacacgggggacggcatccgggtggaagacaagcaaggctgggtccaagtgcgggcgtccggcaccgagccgatgcttcgcgtcgtcgccgaggaccggtcccgggagcgggccagggagaaagtcgacgagatcctccggtccctggagcggatgatcccatgaaaagcgcgacgactctgaaaatcagcatctccggagcgcggggaatcatcggcgacagtctcacgccccagctggcggcggccctggcccaggcgttcggaacctacgtcggcggcgggccggtgctcgtcggccgcgacgcccgctcctccgggatcatgctggccgaagccgttgtgtccggtctcctggccgtgggctgccggccggtggacgtcggcatcctcccgatcccttctttcctgtacttgacgaaagaggtccgggcggccggaggaatcgccgtgaccgccagccacaatccccgggaatggaacggcctcaagttcatcagccgccgcggactgtacctcacgcctcagcagacggaggaatacctcgacatctatcaccagggcgccttcgatttcgtcgccgccgggaaattcaggaccattgaggtcttgccccgcgccgccgacgcccatctccgccggctcctcaaccggttcgacggggaagcgatccgccgccgccggatccgcgtcgtcctggactgcaacaacggcgcgggagccgtcctgggaccgcgttttcttcgggagctgggctgcgacgtcgttccgctggcgtgcgaccccaccggggaattcgtccatccttccgagccgactcccgaaaacatcgccggcgtctgccgggcggtgaaaacggcccgggccgacatcggctttgtccaggacgccgacgccgaccggctggcgatcatcgacgagcgcggccgcccgctgggcgaggagatgaccctcgtctgggcggcgagccgcgtcctggaaaaaacgaaaggctcgatcgtctgcaacatgtcctcgacccgggccttggacgacctggccgcccggcacggagtgaagatcttccggacccggatcggcgaggtcaacgtcgtcgaaaaggtcctcgctgcccggccgcgggccgtgatcggcggcgaggggaatggaggagtcatcgatccggaaatccatccgtgccgagacagcttcgcggcgatgggccatgttctggacgccctggcggccggccacaagccggtttcggccctggccggagccctgccccgctatgtgctcctcaaggatcggatcgagggatcggccgagcgcgcccatcgcctgattcgggtgttgagaaaacgatacgaagacaagggaacggtcaatctgctcgatggattgaaagtcgatttcccggatcattggatccacctccgtccctcgaacaccgagccggtcatccgggtgctggccgaggcgaaaacggaaatccgggcccgccgggccctggccgcgctgcgcggggaaatcgccgccgcttggagaaaaatctgatgccgcaaacaaccaaacctgcccgtaaaatgaaaacgaaagccgtgaaaaggggccgccccccggttccctatattttaatccgggccggcgtcgtcctgacgcccgacaaggaaatccgccggggcgccgtcctgatcaagggccgccggatcgtcgccgtcggccgggacaaggaaatcgccgcggccgtccgcaaggcccacgatcaatcggaccggttcacgatggacgtcgtcgaggcccccgatctcatcgccgttccgggactcatcgacatccaccagcacggcggcggcggcgccgactacattgacgggacggtcgaggccgcgcggacggtcctcgagacccacgtccggggcgggacgacgtcggtcctgccgacgatgatgacggcctcccgcccggccttgaaaaaagccctggccgcggtcgacgcccttcggccgcgggggaaacggggttccctgccggcgacgacggaagccggcccggacatcctggggatccacttggagggaccgtttatttccaagaagcggcacggggcccagcctcccggagccgtccgaagaatcgacgaggcggaaatccgggagtacctccggatttttcgcacgcccattcgtctcatgaccctggcccccgagcttcccggcgcccccgcgttcatcaagtttcttgtccgccgggggatcatcgcctcggccgggcattccgacgcttcgttcgaggaagcgatccgcggcttcgacgccgggatcagccacgggacgcacctcttcaacgccatgcgcggcttcttccaccgggagccggggctggccggagctctgctcctgaacgagcgggcttccgtggagcttatcgccgacggacgtcatcttcacccggcggcggttttcctggttctccaggcgaagccggcggataaagtcgttttcgtcaccgatgccagccggaacgcgggaacgaaggaagcgcctcttttgacggccgcgggggggcttttcggcagcaacctccgtctcctcgaggcgctcctgaaacttatggaatggagcggctggtcgcttcaggatgttcttcctctggcgacctccaatcccgcccggattttgggcttggagaagcgcaagggaacgcttctccccggggccgatgccgatatcgtcctgctcgattacaagttccaggtcaaggatgtctggtgcgccggccggagggcctcggtcttcgagaaaaaacaataaagcgatatatcttgtcgattcacattgcttgacagtccccggttcgtagggtaacgtaatgaggattttttccagaatatttcgggataattttaaccgtaagaaaataaagaagatggacttatttttttcaggaggaggatatggctccgaaaatagattttgaagaaatcaataaaatcatcaaacttctcgaggaaaaaaatctgtccgaattcgagctggaaatcgaaggcttcaagatcaaggtcggccggaatgtcccggtcgttgtcaataatcgcccctcgtacgtcgacctcgctcccgccgctcccaactccattcctttcgccggccccgttccggaacctcccgccgaaatcaagggagacgcccatgccgttctttcccccatggtcgggacgttctaccgggcgccttcccccagttccccgccgtttgtcgaggtcggagacgtcgtcaaaaagaaacaaaccctgtgcatcgttgaagcgatgaagctcatgaacgagatcgaatccgatgccgacggcgtcatcaaggaaatctatgtcgagaacggcaagcccgtcgaattcggtcagaagctgttcctgatcgtcccgcaggcgtaaggcgcgatgttttcgaaaatccttatcgccaaccgcggggaaatcgccctccgcatcatccgcgcggccaaggagctgggcatcaaaaccgtggccgttttttccgaggcggaccggacgtcgctccacaccatgctggccgacgagaaattctgcatcgggccggccaagccccaggacagctatctcaatattcccaacatcctcagcgtcgcccaaatcaccaaggccgacgccatccaccccgggtacggattcctggccgaaaacgcccggtttgccgagatctgcgagaccgaggggatcaccttcatcggtcccccggcctcgatcatccgtcttatgggcgacaagaatcgggcccgccaggagatgatgcgggccaaggttccggtcattccgggaagcgacaaggtcctcgaggattccgacgaggcgaaaaaaaccgcccaaaaaatcggctatcccgtcattatcaaggcctcggccggagggggcgggaagggcatgcggatctgccgcaacgccaaccacctcgaagagcagtttcccatcgctcagaacgaggccaaaaacgctttcggggatccgtccctgtatctcgagaagtacatcgtcggagcccaccacatcgagatccaggtcatcggcgacaagaaaggcaacgtcgtcgccttcggcgagcgggaatgctccgttcagcggaagtatcagaaagtcatcgaggaaacgccttcgcccttcatcgacgagaagctccgccggaaaatgatgaaggcggtcgaggacgcggccaagtatctcggatacgaaaacttggggacctttgagttcctggtcgacgagagccggaaattctatttcatggagaccaacacccgggtccaagtcgagcatccgatcacggaaatggtctacgggatcaacctggtcaagacccagatccggacggccgcgggggaaaaggtcaatttccccttcgagctcaagatgaagggtcactgcatcgaatgccgggtcaacgccgaggatccgaacacgttcgccccgtcgccggggacgattgatttcctcgtcctccccggaggggaaggcatccgggtggattcgggggcctacggcggatgggtcattccgccctattacgactcgctcgtggccaagatcatcgcttacgcgccgtcgcggctcctggccatcaagaagatgcagaccgccttggaaatgacgacgatcgtcgggatcaagacgaacatccccctccacttgatgatcctggccaattcggatttcatcaacggaacgtacgacacgcagtttctggaaaaattcctggcccgcaagaacggcgattgatcgttcagccccggcggtagacacggacggcaaaggcgccgtcgttgtcgccggtcacgttctcattgggaccgaggaagaggcggccgtcggccgggatcacggccgggccggctttcccgatggggaaagccacgccgtattcccggaccgttttttccttcgttttcggatcctcgacgatcacgacttcccgtaggacccggccgacaagacaaccgaggttgctttccggcagcggctgctgcatcgtccgcacctggatgccttcaggaccgcaataggcttcctcgttgccggtctgcaggcagatcgtgccggacgcctcaaaccagaattcctccccggcccggacctcgaggccggtatccgtccagccggacgctcccgccgccgtcagcgtcttcaccaggacgaaatcgcccggccggagagaggctttatcccccgtcgatcccccgggaaacccgccggccaggcggatcagggcgaaggcgagggccaaggcgcgcatcatgtttcccggagaatgtcgagcatcgcttgatggatgagcccgttgctggcgcagagctcggggatgtagatgtccgccgggcggccccgcaaatcggtgagccgcccgccggcttcggccaggatcaccgccccggcggccgtgtcccacgggttgagctttaattcccagaatccctcaaaccgcccgcacgcgacgtagcagaggtccaaggcggccgatccgcatcgccggacggcctgggcggccaggagaaaacggttatgggcggccatgttggtccgtgactcacggacgtcgtaagggaatccggtcgccaccaggcttcggccgagctccccggtcgccgagacccggatgggctcgccgttgaggaaagcccctccgccggcctcggccgtgaacatctcgcccatgatcgggttgaagacgattccggcgacgagcgccccgtcgtgctccagggcgatggagacgcagaaccaagggaaccggtgggcgaaattcgtggtcccgtcgagcggatcgatgatccagcggaagccggctccggtgatctttcggagcccttcctctccgaggaaatcatggccgggaaagcgggccgccagccgctcatggatcaaggcctgggaggcggtgtcggtttccgtgacgagatcgatctcccccttgaaggacacggggccggcccggcggtaatcgcgcctgaggatgtcccccgcctcgcgggcggcatcccgggcggcatccaggtaggacgtgtaaccggtcatgtccggctatcatagaccagggagacgcgtctttcaacccgtttccccttttcccgccggccggcggagcggcctccgtgacggcggcggaaatcgatcccgccgcgcttattttctgaactttcgagccgctccatcgtatgaaagggtgattttattcggacaaggctcaatccatgacaaaaaagaaaaaagccgtcttgatcatcgcggccgcggccctcatcggcttcgtcatcctcctcaatctctccacccgaagggaaaaatccatccgggcgacaaccgaaaaagccggccgccgggacctgacatccctcatctccgcgtcgggggaaatcaagccgaaaaagaacatcaacctgtcggcccaaatccccggccgaatcatcaagatcggagttcaggaagggcaggaggtcaagcgcggcgactttctcctcggactggatccctcccagtatgaagccaacgccgaccacgatcgggccttcatccagagctcccaggccgagcggatcaaggtcgaggcccagctggccaagaaccggagcttctatgaacgccaaaaaaacctttacgacaacgagctgatctccaaagagcagctggaacaggccaaggttcaatgggaaatctccgaggcctcgctgaaagccatcgattttcagatcgcccaagcccaggcctccctgaaaagctccctggacaatctctccaagacggtctttaccgccccgatcgacggcatcatcacgagcctccgggtggaggagggcgaagtcgccatcatagggacgatgaacaatcccgggacggtcctcatgaccatcgccgatctttcggtcatggaggtcgaagtggaagtggacgaaaccgatgtcgtcgcggtcgtcctgggccaagacgctgaagtccgggtcgacgccttccccaacgaggtcttcaagggaaaagtgaccgagatcggctcctcggcgctgcagaaatccgggctggcttcgtcgaccacccaggaatccaaagacttcaaagtagtcgtgaccctggagaatccctcccccggcctcaagcccggcttatcggccggcgccgacatcatcacctcccggaaagagggcgtgctggccgtgccgatctcggccctcgtcgtccgggacaagcccgagcccgccggcgggacgtctccaaaatcccgggaaaagacggaggaaggcgtgttcgtggtcgagcacggacgggcccggttcgtccccgtccagaaaggaatcatgggcgagctggaggtcgaaatcgcttccggcctgaccgaaagccagacgatcatctccggaccgtacgacgcgctccgcaccctcaaggacggggacttgatcaagacggacgttcggaaggaaaaaaccgaaagatgagcgcttcccctcccctggtgatcaaggtcgagaatctctccaagacttatgacctgggcaagacccaagtcaaggcgctccggggcgtgtccttcgagatccaaaagggggagatcgtggccatcatggggccttccggctccggaaaatcgactcttatgaatctgatcggctgcctcgacacgccgacgagcggctcctacacattgaacggccagttggcctcggccatgaccgaaaacgagctggcccaagtccgcaaccgggacatcgggttcgttttccaggtgttcaatcttcttccgcgggccacggcgttccataatgtcgaactgcccctgatctacaaaggaacaaagaaaaaagaacgggaaacgaaggtccgggccgccttggccgaggtcgagatgctcgaccggatggaccaccgcccccccgagctttcaggcggagagcgccagagggtcgcgatcgcccgggctctcgtcaacgaaccggccctgattttagccgatgagccgaccggcaatcttgattcccggaccggcggcgaaatcctgaaaatcttccacaagcttcacggcgaagggcacacgatcgtcctcgtcacccatgaccgaagcgtggccgaacaagccggccggatcatccatcttcgtgacggcggaattgagcgcgaggagcggaaaggagcctgatatgacgttcgcccagcggattcaaggcgtttttttcgaaccggcccggacgatggccgacgcggccgcccggcccaaaccgatcgccgcgatcctgattctcatccttgccctgacggccgttttctcttatgtggcggcgccgtacagcgccaaggactcggccgcggccctgaaggacaatgtcaagatccaagaacggatgggcaaggagcggttcgacgagatgatggcccggatggaaaatccgaagccgggcgggctggcctttcgctcgctcgtcgtctcgccggccttcgccggcgtgttcctcgcgatccaagccctgtttctcctcattttcggccggatgttttcgtcggagggcgccttccttcccgttttctccgttcttctccacgccaagctgatcgacgggctgctcggcaatctcgtccgagccgtcctgatcctcatccggaaatcggtgattcaaacatcgaccagcctggcccttctagcccccggcgctgaaatcacgtctttgacctaccttctcctcggccaggtcgacttcttccagctgtggatgttcggcgtgctgggattcggtctcgccgcggcgttcaaaatccccttgaaaaaaggaatgattctttcctacgccttctgggcggccaaagccgcggtgaatatcgccctcggcctcctcagccggtccatgttgggctgagcccgatagggagacacaggctaattcaccttatttccgcgcccggcggagcaaaaccggggaaacgcgatgaatcggcgtttcccttccctctttggactgcgttgacagccccgccgccggacgataaattaaaggcatgtcgaaagaacgcccgctggaaggaacgctggcggatatcccgtttccccgccttttgcacgatctctggagacaggaacgaaccgggcgtctgaccgtccggagcgaaaagggggaacgaatcgtctttttcgacaagggacaccttctcgtcgcccaatccggatctgatcccaaggattttttagccgccttggtccggaaaaaagttctgtcgaccgaacaagcggcccgcgtcgaacggacggcttcgggtcagaatctcaccgttctcaaggctttgggcgagttgggacttctcggcccgatccccctttggagcctggccgaatcctttttcgcccgccggatgttcaccctcttcgaccgggaagacggggagtattctttcgatcccgagtccgtgctcgcgggcggccaccgtctcggccggctccagacccccgacctgattctcgaggggatccgacagatgcacaacgacgcgatgatcgcccgccgcctgccgagcgaggaagagccggtccgcgtttccgccccgtttttcctccccctcctgaaattcgagccgcccgagcgctacgccctccagatcctcagcggcgctccctccctccgcaggttccaggagcggagcgagctcggggcccgggaaagccggaaaatcctattcgccttcctttgcctgggcattctggctccggccgaaccctcggcggctaagaaaactccggccgtctcgcccggggcggaacaaggtcgaatccttgaagccctcaatgaaaaatgcgccttcattttcaaattcgtttccaaggaaatcggcccggtcgccgtcaccgttttaaaccgggcgctcgacgagatccgcccttccctggggccgcttttccaaaaaatggcccttcagttcgacggaaaggtggaagtggacgccgcccttcgcttgagcgtcgagcatttgcccgaggacgtgttccggaccatcgtccgaggctatgacgaaatcctgacagccgaggtgttggcggtccggaaaaccctggggccgggccaggaaaccgcgctcgtccggaatctggagaaaattggatgcgcttgagccgccggcaggtcttcgcccttcttctcctgacgaccgtatggacggccgtcttcatcatccgctttgtcatcctttgaacgaaccctcgtcttcatcctcggcccgacggggtccgggaaaagcgccttcgccctccgcctggcggaagagcgcgggggcgagatcatcagctgcgattccatgcaggtctaccgcggattcgatatcggcacggacaagccctcggccgaggacagggcccgcgtgccccatcacctcatcgacgtggccgacgctgggacgcaattccacgccgccgatttcgccgcccttgcctcggaggcgatcgcggccgtccgcgaacgggaacggatccccctcgtcgtcggcgggacgggcctgtatttcaaagccctcgaggacggtcttttcccgggtccgggacgggacgaggccgtccgatcagccctggacgccgaagccggcgagcgcgggccggaagtcctctgggagcgcctggccgtcgtcgatccggcctacgcggcaaagaccggccggcgcgaccggatccgcatcgtccgggcgctggaagtcttcaccctcaccgggcggccgatctccgagcacttcaaacggaccgaaggacttctcggggacgaacgccccgttaaaatcggcttggaccgtccccgggccgatctctaccggaggatcgaggagcgggttgaccggatgttcgaccgcggtttgatcgaggaaacgcgccgacttctggccggcggcgttccggaatcggccgcgccgttcaaagccctcggctacaagcacgtcctccgcctccttcggggggaaatcggcccggacgaagcggccgccctcaccaaaatcgacacccgccattacgccaagcggcagatgacctggtttcggaaaatgcccggcgtccgctggatccaaccggatgaaaccgatcccgcgtcggttttgccggcgccgggacgggcggagcggcgatgaacaggaccgttctcgtccatctgatgacctcgtccagagaccgttcggaggcgatcgaatcgatggccgagttggaagacctggcccgggcggcgggcgcccggatcgcccggaaggtttttcaaacccgggcttcgcccgacccccggactttcatcggcgggggaaaagtcgaagagatcaagggaatcctccgggaaacgggcgccgacctggtcctcttcgaccaggatatgaagccctcccagcagcgaagcctggaacaagccctggaagctcgggtgatcgaccggacccagctgatcctggacatcttcgcccggagagcccggacaacggagggcaagctccaggtcgagctggcgcagttgacctatcttcttccccgcctgacgggaaaaggaaaagctctctcgcgcttgggcggcggcatcggaacccgcgggccgggcgaaacgaagctggaaaccgatcgccgccggatcgaagcccggatcgcccggatccgccgcgaagtccgttcggtcgccggccgccgggccggccagcgccgaagccggaaggaaagcttgatccggacggccgccctcgtcggatacacgagcgtcgggaaaacgacgctgttcaaccgcctggcgggagaatcggcgttcacctcgccccaattgttcgccaccttggatccccttgtccgccggaccgcgctccccgacggcctgccctacttcatcagcgacacggtcggtttcgtcaagcgtctccccccggccctcctctcttcgttcaaggcaaccctcgaggaagtcctcgaagccggcctgatccttcacgtgatcgatctttccgcgccgaacgccgaggcgcaggccgcctccgtggagaaaaccttggccgaaatcggggcccggggcattccgacgatccggatctacaataaaatcgaccgtctccccgaccgccgcgcttttctcgcccgcaacgagatcgaaaccgaaagcgtctatctatccgcggtgacgggggaaggccttccggccctgaaaagccgcatccgcgctttacttttcgaaggcctccgggtattttatatccgcgtccctcatgaccgggaggatatttgggcttcactcgaaaaacgctcgctgattctgaagcgacgggaaggggccggtcatctcgaggcccgggtcatggccgagccgtctcgcctcattgatctagcggcctatatcgtctcaggagaaccgacgtggtaaagaaaacggctggaacactggcggccgtcctcgccgccgccgcttgcgcgaccataagcccgcccgccgagccgaccatttacctggaaaatccgccggccgagatctccgcggctctctctctggacgaccggatcgccgtcgacaaggtctggaatctcctccggctggagcgggcggacaaggccgaaaaagcggttctccgcctcggggaaagccatccgttctactggacggcgatgggttatatcgccctcctccgcaacgacctgaccgcggccgaggccgattttgtcggctcccttacggtctctccggacgccgtcacgtcccagctcggtttgggacaggtctaccggcgatggggccgccgggaggacgccctgcgatcctacctcgaagtgctgaaacgggatccggagaacgccttcgcccggagagaggccgacgagctgcggacggcgatcgtcgaaagcctgatcctcgaggccgacgcggccgcccgcacgggaaagacggccgcggccaaggaggccttcctcaaggtcctcgaatacgccccgaagcttcagatcgctcacgtttccctggcccgtctgttcacccgggaaaaagactacccgcgggctttgtttcacctcggcctggccgccgagaacaatcccctggaccgaaccgttctccgcgaatacgccgagacgctctaccagatgaaccaattttcccggagcctggacgccttccagaagcttcaggcgctcgatccttccgataaaacggtcgccgaacgcctggaagccctgaaaacccggctgggagtcgtcgatctccccgacgaataccgggaaatccccggcctggaggccgtgaccaaggaggatgtggccgccctgatcggggcaaaattcaatgacatctggatcggagtagccgttcggccgcccgttcttgtcgacatttcgacctcctgggcccggacgttcatcgtcaaggtcgccgcctccgggatcatggagatctattccaatcacacgttccagccgaaaaaaacgatgaaccgggccgagatggccgaaacggtcgtccacctggtcgaatacctgcggaaaaaaggccggacgatcgtcgtccaaatcccgcccgagcggatcaatctagccgacgtccccgccgaccatccctacgccccggcgatcattgcggccgtttcattccaacttatggatatcttctccgatcgcacgttccggcccgaccaacctgtgcccggcgcggaggcgatccgaatcttggacctgctggccggcctggcgaaagaacccgggaaatgagccggacggatcgcccggaagcggaagactgggtttcctcggccctgaccgtccccaaccttctcagcgccttccggatcctcctggttccgctgttcatctggactttcctcgagcggaaaaccatcgagcccctggtcattttcttcatcgccgcgatttccgaccttttcgacggattcatcgcccgtcatctccaccagaggagccgcctgggcacaattctggatccggccggcgacaagctcctcaccgccgcttcctatattctcctgactctccccgggatcggcggtcccaaccgagtccccctctggctgacgatcatcgtcttcgcccgcgatctgatgatcgtcggcggcgttctctgggcgtatttaatcatgggagttaaaaccgtcctgccggtctttctcgggaaattaacgacggccttccaagtggggacggtctttctggtcctgctgacaaaccacctgggaaaacaagccgggtggatgctcgtgttctatgccctcacggccggattcaccctggcctcgtggattctctattatcaacgcggcctccgccttctccgggagcgccgcgccgccgaggaaagctgatcgttctcaagtcatcgatttgtcgatgaatccccgccgaaaggtcatccagatgatcttcaggtccagggtaaaggaccaattccgcatgtaatagaagtcgtgctcgagccgtttctcgatggacgtcccctgccggaggccgtggacctgggcccagcccgtcaatcctgatttcatcttgtggcggagcatgtatttcggaatgctgtcggtgaattccttgacgaactcgggccgttccgggcgcgggccgaccaagctcatgtctccccggaggatgttgaccagctggggcagctcgtcgatgctgtaccgccgcagaagccgtccgactttcgtgatccgcgcgtcatcgggcgcgcacatgaccgggcccgtggccttttcggcgttttggaccatcgtccggaacttatggatcttgaatcgcttgccgtccaggccgaaccgttcctggctgtaaaacaccggcccccgggacgtcatcttgatcaggatcgcgacgatgaggaacagcggagacaggacgatcaaggccaatccggaaacaacgatgtcgaacagccgcttcagcacccgccgggccccgcggagggggacttcatcgaccgagatgaccgggaagccgtccaggtcctggacgttggctttcagggtgaggagctggaacaagtcggggatgagacgaaggttgaccggatatttgttgacgacttggagggcttcgagcatttccgggtaattttccagctcgagggcgacgtagacttcctggatcccctgggcttcgatgaccttgccgaggtcggagaccggcccgagaacggggattcccccgtcgacctggatgattttcccggccggtttgtggttgtcgagaaagcccttgaccacgaagccgagatccttgtattggaacagcttctgcgcgacggccacgcccatttcccccgctccgacgaccaggacgctgcggaggttgaggccgcgggcgaaccgccgcttcatgaagaaatagatttggttgcggaagaacgaaatcgtgaagatcacgccgatgaaataaacggccaaaaagagatgggagagcttgacgatgttcacccggaaaagcggggccgtgcctccggaataggcgttcagatagccggagacggccatcacgacaatcagcgtcaggacggcgttgatcgtgatggagaagaaatcatcgatcttggtccgccggaggcggcttttgtagaaaccctggagaaaaaaaacggccaagtgaacggccaggaacaagggcagaacgaacaagtaagagcgccaggtcgggatccccttggccggatccaccgggatgaaataggaatgaaaacggaaggcataggaataaatgaaggtcgccgtgatggccagcacatcactggccacgaaaagagccgacagtctggcctggtaccggctgatcaccttggttccttgaattcccgccatagggcggccaggcgggtttccatcttcgccttgaaaccgtcccgggaaaaggtccgggcatgagcgcaaagggaggccttattaaaattcaacccccggcatttgtcaagaacggcggccaaggcggcgggggtcggctcctcgaacaacaagccggtctcgcccggccggaccgtttccaacgctcccccccgggccagagcgatcaccggcgttccgcaagcctgggactcgaccgcgcttatgccgaaatcctcctcgccgggcaggagataggcgatcgcctcctggtagagccggcggagatcgtcgccgcccacggatcccaggaactcgaccgtcggcccggccgccgcccggagggagcgcatctccggaccgtccccgacgactttcaacggaaacttgcccaggttgcaggcggccacggccaggtcgatccgcttgtaggggacaagagccgtcacggccaggaaatacttccgttcgggcccggaatcgggcgggacgaaaaattccgtgtcgaccggaggatgaacgacctcggccggccggcgataatatttctcgatccgggaggcgaccgcccgggaattggcgatgaaccggtccacccgggccgccgacgtcacgtcccagttccgcaagccgtggatcatgggcgggacgatgtatttggccggaaaaccgagcttgccgggaccgaaataggcggcatactggttccaggcgtagcggacgggagaatggatataagacacatggagggcttccggcttcggaatgatccccttggccgcgcaatgagagctggagacgaccaggtcgaatccctggagatcgaacgattcggcggcgagggggaaaagggggagataccagcggtaatgccggcgaagagcgggcattccctggaggaagctcgtccggatgacgcgtttttcaatctcggggatttgacttccgggaaaatggaagagggtgtagatcggcgccgccgggaaaatctccgcaagaacctcgaggactttttccccgccccggcgcccggtgagccagtcatggataagggcgacccgcgcgtttttcatgggaatgaatattatagcccgttcgcggccgccaggtccagatagaggcgctcggtctcggcgaccatccgctccaggctgaacgccgccgggatttcgtttcgggctcgttccgccaatcgccgggccaaggcctcatcctccagcaggcggacgacggcctcggccagggcggccgggtcggccggcggaacaagcaggccggtctccccgtctcggatgatttcccgcgacccgtcgatatcggtggcgatgataggttttccgaagccggcggcctcgatgaggaccaggggcaagccctcccagagcgagggaaggacgaagatgtcgaacgccgacagcaggtcgaaggcatccggccgctcccccgacaggatgaagcggccggtcaggccgagccgctcgatccctttccggacgcggctttcaagaggtccgccgccgacaacgagaaaaaacgcctccggatgccggcggaggatatccggcgccgcctcgacgaaatattccacgcccttctggcgatgaagccgggcgaccgtcccgatcaccggcgcccggagtttcagttctgaacaaagagctcttcccctcgagacgcggtccggatcggatgccgcctcgatggaggggacgccgttgcggaccagacgaagccggccgtccggagcgagacggtgccgtcgggcttgggccaggtcggcctcggaaacgcagacgacggccgaggtcgaccggctcaagatccgctccaggaggacggccgcccggcggagcagcggattgcggtaatgaaggtaatggatgccgtgaatcgtgtggacgacgacgggagttccggcccggcgggcggctctccgcccgtagaggccggccacgccgccgtgggtgtgaagcaggtcgaagccttgggaggccagaagccggatgagcgtccgcccggggccggccgccggattctttctgaattccaccggatggaacgtcatcccggcccgccggacctcctcttccagcggacctccgcctccggcgcaaacggagacatcgaaacggtttctattgagattccgggccaaggccagtaaaacggcctgtccgccgccgagcgacggcttgtcgatcatttccaggactttcaggcgtctcacgggattcccctttccggtttcagcagcttccggtacgccgcccgcatggccctcccatcctcgccccggaaacgcccgaggattctctgaaggccgagatgaatccgaagggaaagccgcagcaagcggagggacgccggcgaagcgtgctttcgataaaagagcatctggcttttccggtactccaggcgcgattcgcggggacgtcgacccgtcgtcgccccgcccgcgtggaagacccgcgcttcggggacgaaacgcagccggccgccggcctttcggaagcggaagcaaagatcgatatcctcgaaatagaggaaaaagctctcgtcaaagccgccggccgcttcaaacgccccgcgtcggcaaaacaggcaggccgcgctcagccagccggcctccgccccgcgcggccggcgccgaagcgcccgggccgtcaggggattcttgatgaatttctggacgagctggccgacgaaatccacccggcctccaaaggaaacctggaccttcccgccgccggagaacaagaggggcccggccgcggccgtccgctcatccgccctcacggcctccaggagagccgccgctgcccccggctgaagaaccgcatcggtgttcaaaaagagcaggaattccccccttgactcccggacgccgcggttgttggccgctccgaaaccgggattgtccccgttccggatgatccggacggaagggaaagcggcggcgtcctcgagacccccgtcggtcgagtcgttgtccacgaggatcgcctccagggcgacgtcccgcccggccgcctcgaccgactccaggcaggaagccaagtggagacggtcgttgaaataaacgaggatgacggaaacgaggggagtgctcatccgcggccgtctcccttccccccgccggggaaagaagcgaaaagaggtccgttcgagccggcttccggcggagacgggcaaagaatcgtccgcccgcagacctccagcaggatccgggtgaccccttggacctgtttttcgatcgagaaatcctcccggaccgtccggaagccgttttcaacgacggccggccaacgttcgggatgatcgaggatctcggcgagcgccgcggccagaacttcggggtcccgggattcagccaggaagccgtttcggccgggccggatgatttcggtcaggcccccggccttgaccgccagaaccggcacgcccgcggccattccttccagggccgcccggccgaacgaatcgacgaccgaggcgacgacgacgacgctcaggttttggagcacctccgagagagcgggacgaaagccggcaaaaacgacgcgccgcgcaagatcgttcaggcggacgagacggcgaagatcttgttcgtaccggcgatcggccgccgtcccgatgaaaatcagcttcaggtcgggataccggccggcgagacgggcaaacgccagaaggacctccttttgacccttgcccggatacagcttcccgacgacgccgatcgtccggcttccttcctccaggccgaattcggcccggacgattccgcgccgctcccccgcggcggaacggatctccacgccgttgtagacaagggcgatcttgccggaggggggaaacgcccgccgggttgactcggaattgacgatcacccgggccgagcgatcgagaatgaaccgggtcaaggcccgggatccgcggaaggagtggagaaacgcgcggtcgccggcgaggatttcgtggatcgcccaaacatggggaattcccaggcggcgggcggccagggccccgccgaacgtcgcggccgaattggaaaagatgatcccggctttccgctcgcgggcgatccggccgatccgggcgacggcccgccggttgaggagccgggccgcgggctggcgccagaccttcgccttttccgtcacccaccacttcatcggcacgacgtcgacggaaacgcccgctttttcggccgccggaccgagcggcccgggacgggggatgatcaaggccgggacgaacatcctccggtccaagcggcggagggtttccaagagccaaagctccgcgccgttgagctcggccgaatgagaaacgaacaggacggagatcatgtctttcccgccgtccgccggtaaaatccgagagtggcttcagcggtccggcgccaggggaacagctccgcccggcggaggccgcggattttcaaggattcgcgcgccggactgtccgccaggaggcggatgaccgtccgggcgatctcctcgggatcctcgggattaaagtagagcgccgcgtcgccgccgatttccggaagcgccgacacgccggaggcggccgccggcaggccgcaggccatggcttcgagcaagggaaggccgaatccctcggccgacgaaggaaaaacgagcgcggccgcggtccggtagagggcccggagatcgacgtccgggagataccccgttcggcggacccacgcgccgagcccccgccgctcgatcgcccgatcgacgttttccccgtcgccgccggaccggccggccaagaccagcggaatgcgtccatgcctctcatgaaccagggccagggcctcgattaaggccgggacgtttttcctcggctccagcgcacccacgaacagcagaaactcaccggggaggtcgaaccggcgccggaccgcggccgtttcctccggggcggccgggtcctcaaaaaagcggttcagcccaagcagcgtcaccattattttttcctcgtccaggccgaatcgttcgcggatcgcccgggcgctgtactcggagatcgtgatgacgccgtcggccgaacggagggaacgtccggttttgcggagaaaccgtgttcgggcttcccggtcggccttctccggctcttccaaaaagaacaagtcgcagaccgtgacgatcgcctttcccgacgccgggagacgcagcggcgtcggcgaatgcgttatatccagccggccgccgaagatccggtcgagcctcgggcggccgaacatgtcccaagccgcgttgaccgcccggacgggccagcgcttatcgacaaacgtcagcttctcaaacggcgggatcttggccggcgggaaacgatccttgtaggacgccgagaaaaggcagtactcgttgtcccggtcgagggccgccagctcgaagaggagattcttgaagtagacgcccactcccgtttcctgccggagaaagggacggacgtcgaatccgatgcgcatttttcgtaaatgtatgacatccctccgcgggtgtcaatcaaaggcgggccggagccgggcgcgatgagccgagactttgaggccggccgttaaaagcacccccccggctttcagtccggcgatcgccgcgcctcatccaccgagcggccggcattaaggccggccctccttccgccgtcttccgtgaaaccgataggctccggatcttgcggccgcccgggcgatccggttctccggatccgccgccgcccatctaaggacattttcgtttggccgcccgcctcgcccggcttcgcttgcgtccggcggaggggagtgttataaaggaatccactcaaaagaaaacaggagacgcggatgtctttcgataaaatcgccgcccgcctcgaccttttccgtgacgagatgatcgatctccaaatcaagctcgcctccatcccggccatttctcccgcctccggcggcgagggcgaagcccggaaggcggattttctcatcgcctatctccgggagtcgggaatcacggatatccaagtcatccgggcgcctgatctcgacgcgccggccggctaccggcccaacatcgtcgcccgctaccccggccgaaactccgcccggacggtttggatcatgacccacctggatgtcgttccgcccggcgaaatctccctctggcagggcgatccattcaagccctgggtttcctcgggccgcatctacggccgcggagtcgaggacaaccaacagggcctggtcgcctccatcttcgccgtcaaggcgtttcacgatctcggcctcgcccccgcctccaacgtgggtctggccattgtcgccgacgaggaaacgggaagctccaagggcatcccccatgtcctgaaaaattccgatgccttccgcaagggcgacctgatcatcgtccccgacgcgggcagcccggacggaacggaaatcgaggtcgcagaaaaaagcgtcctctggctgaaaatcaagatcctgggccggcaaacccacggctcaacccccgaacgggggatcaacgccttcaaagccggcgcctatctggccgtcaagctcgaccgtctctacgccgccttccccgagaaaaatccgctcttcgtgccgcccgtctccacgttcgagccgactaagaaggacgccaatgtcccgaacatcaacacgatcccgggcgaggacgttttttatatggattgccggattctcccccattaccggctcgaggacgtcgagggccgcgtccaggcggcctgccggtcgatcgagaaaaagttcggcgtgacgatcaccaccgaatccatgcagagggccaaagccgccccccccacgccgcccggatcagccgtggtcgaagcgctgaaacgcgcgatccaggcggtctaccagaaggaaagccgccctatcggaatcggcggcgggactgtggccgcctatttccgccgggaaggattcgaagccgcctgctggtcgaaaatcgacgacaccgcccaccagcccaatgaatactgcctcatcgacaacatggtcggcgacgccaaggttttcgcccacatcatgatgcaggaatgaggccgggatctcaatgatccgatcgggaggccggatcgaagtccctccattttcttcggccgaggaggccgagcggaatcaggatcgggacaaagaacagcagattccaaaccggaaggcgtattccccttaagccgccgtaaacccgaatgacccaggcggccgaagcgaacaagaccaggtaaagcgggatcatgattttccaatacgcccgggccggatgccgccacggagcgagggcgaagacaaggacgacggcgagggccgcgatccccaggccgacggccgcctcggccgctcggccctgaacgaaaaagatcacggcgaggacaacgacccagagaaaagcgcccagccagccgcagatccagccgatcctctctccctttcggtttcccatgttctcctcctcgaacgaacggccccttggccgtttttccaagataatgccccccgcggcgccctgtcaaccgcggcccgggagccggtccgcattgacagcccttcgttaatccattttaatacgcccatggattccatcggacaaaatccttcctccgccccttccgtttccgagctgccccgcgttctgggggttttcagcatcatcggcatcgtcgtcgggacgatgatcggttcgggcatcttcatcaatccgcccaacgtggccaaggtcgtgggaacgccggagatcatgatggccgtctggatcgtcggcggccttctgactcttttcggggcgctgtctctgtccgagctgggggccgcctactcccacgccggcggaatctacgtctatctccgcgaagcgtacggaccgatggtcgccttcctcttcggctggtcgctgttcatcgtcatcgaatcagggacggtggcctccctggccgtgggcttctcgaccaagtatctcccctatttcgtcgacctgtcgccgtggcagtccaagatcgtctcgatcggactgatcctggccctggccgccgtgaattaccggggcgtccgcaagggcgcgggcctgatgaacttcctgatggtcatcaagttcgtcgccctgatcggcatgtgcgtccttgtcttcctcctggtcaagggaacgccgcggaattttctctcggctccctccggagcggggccggccggaaacgtcctgagcaatttcggcgtcgccctgatcgccgccttgtgggcgtacaagggatgggagacgagctcgtacagcgccggggaaatccgcaacgctcaaaagaagctgccggtcggacttcttctcggcatcgccgcggtcgtctttctctatatcgcggccaacctcgcctatctctacgtcttccccgcgcccgtcatggccgagtcgccgcacatcgccgccgacgtcatgcaggccgcggtcggaccggtcggggcgtcgatcatcgccctgatcatcctgatgtccatcaccgggacctgcaacggccacctgttgaccgccccccgggtcttttacgccatggctaaagacggattttttttccggtccatggcccgggtccacccgcgatacaaaactccccacgtggcgatcgtcgtcctggccgcctggggagccgtcatctgcaccagcgggacgttcgaacagcttttcacgttcgtcatgttcggatactggatcttcatgggcctggccgtgggcggcgtgatcgttctccgaaaaaagaggcccggcctgccccggccctacaaagcctggggatatccggtcacgcccctcctgttcatcctggcgatggccttcctgaccgtcaattcgctcgtccggacgttttggaactcgttcgccggcttgggcctcatcgcggccggaattccagtctatttcttctggaaagcccgggggaagaaagcccgggcctgatcggcgggccgaaaggaatcatcggatgctgaatctcgacctcatccagaccgtcgccttcgccggcgtcgtcctcttcatcggatacgccctctgccgctggatccgccctctttcccggtacaacatcccggccccggtcgtgggcggcctgctggtggccgtcgccgtcctgatcgcccaccagaacggggcgacgctgatctcgttcgacacgacgctccgcgatccccttatgatcgcctttttcacgacgatcggattcggagccagcttctccctgctcaagatcggcggccctcaggtcgtcctgttcttcatcatcgccacggtggcggccgtcttccagaacatcctcggcgggggcctcgccgttctcttcggcctgcatcctcttttcggagtcctcagcggctcggtgaccctgaccggagggccggcgacgggcttggccttcgcccccctgttcgagcaggccggagtggacggagcggcgaccatcgccgtggccgcggccatgttcgggatcgtctccggaggcctgatgggcggaccggtggccacccgtctcatcgaacggaacaagctgcggaaagcccaggccggacggaaagaagcgccggtggtcatcgccgagcaggtcgtcgaggacaagctggccgaggccgaaacggctgccccgggcggcgaggataaggaagcttacatcctgctgaaaagcctggtcatcctgctcgtcgccatgtggatcgggtcctgggtcagccggggtttcgccgccctgggcatcacccttccggcctacatcggagccatgttcacggccgcgatcatccggaatctggacgacctgacgcatgtgttcggtctttcccagcggacgctcgacgacctcggccacgtcgccctctcgctgttcttggtcatcgccctgatgaccctgaagctttggcagctggccggactcgttcttcccctcttcgtcgttctcgccggccaggtcgttcttctcgtcctgttctgtcttgggcccgttttcaagtttatgggcaaggattacgaggccgccgtcatgtccgggggatttttcggcttcatgatgggaacgacggccaacgccatggccaacatgaaagtcctcgtcgacaagtacggccgggcgccccgggcgtttctggtcgtcccgatggtcggggcttttttcatcgatttcaccaacgccctcatcatcacggtctttctcaacctgatgaaatgaggtcctcctcttttcacggagggaacgggagcgtttatttcttcctcaagcgctcggcttgcgctttatagtaagccgcggcttccggctgggaaagggcggctttcgcggcggctttctcataatacgcggcggccttcagccggtctttcatccgctcgtagagaaaagccgggttcaggcaagcctgggaagaatcgggataaacgtccgcgttcagacgggataagaccgcgtcaattgggccgaagaagggggcgccggcgaacggccgtggaggatttatgacttcccggattcggcgtcctcgacctcataccgcttgcggatcgtcgtccagatgccggcgttcttaatgcccagcttctcgggatcgaaatagattccggcgttccggcgctgggcttcgtaatccttcagcgtggccaggccgaccttggacaacaagaggatggcgatgatgttcagccaagccatcaaaccgacgccgatgtcgcccagggtccaagccagcgtcgtcgaacggaccgccccgaaaaaagtcatcaccaggatgaacacgcgggcgacctggatggccgggaggcttttctttttaaagaggtaggcgacgttggattccgtgtagaaggcgtaggccatcagggtggtgaaggcgaagaaaaagagggcgacggccacaaaatagctgccgaatccgggaatgagggtgtcgatgcccatctgggtccagacggggctggcctcgacgcccggaatgttgttgacgatctgaccgcccttgccgtcggcgacattgtacgttccggtcaggaggatcatgaatccagtggcgctgcagacaaacagcgtgtcgacataaaccgagaacgcctggaccaggccctgctgggcgggatgccggacctcggccgcggccgcggcctggggcccggagccctgtccggcctcattggaaaaaatgccccgcttaaccccccagatgatcgccgagccgacgatgccgccgaagacggcgtcggctccgaaggcggaagcgaagatcatctgcaggacgtccggcagccgcttgaggtcgaggatgatgatgacgatggccatgatgacgtaaccgatggccatgaacgggaccatgagctcggccgctttgccgatgcgcttgaccccgccgaagatgatcagcccgaggagggcggcgatgatgatccccgaagcggacggggacagcttcgggatcacattccggaaggcgacggtgatggaattggattggatgctcggcaggaggatgccgcaggaaaggatggtgacaatggagaagatgacggcgtaccatttttgacccaatcctttttcgatgtaataagccgggccgccgcggtagacgcccccgatctcttccttccagacctgggccagggccgattcgatgtaggccgagcccgctcccaggaaagccagcatccacatccagaagagagccccgggtccgccgaagccgatagccgtggccaccccggcgatgtttcccgtcccgacccggccgcccagggccatggcgaagccctggaacgaggacacacctttcttggaggaccttcccctccaaagctggccgaccatgtccttgatcaaccggacctggagaaaacgcgtccggatcgaaaaaaagatgcccgctcccaaacacaagatgaccaggggatagccccagacgtatccgtaaaccgcgtcgacgattttttgcagatccatgcgatctctcctcaggcgggatgagtcaaaagcaaagaagccattctatgtggaaaaaagagaacggtcaaacgatttttactcaatacaccgaatcggcccgtcgaataaggcgtatttggaccgaagagaaaatatgctatcatctccccccttgaaaacacatcgttcgcgcggcctccgggggacactcgttcccgccctgattttggcggcgtgctgcgcgccggcttgccgctcgaaatccccggccgggcccgtcgtcttccgcttcatcgacggcctgacaagcgccggagttctcgaaagcccgctgaaaaacccggaagccgcggccctgggcgagcgggcctacccggtcaactccgccgtcatgaccgaaaccggcgtcggcgaatccgcgttcggcttgaagcgaaaaatagccctgggcctgctgtcgatggacatcctcttcgccccgccccggagcgagctccgctaccggcttcccttcaagaccgagggcgtcctggatttcgggatcgggatcgtccatgacgtccactcggccgcccggctcgccgccgccggatccccaagcggcgaagtcaagttccagatcatcctcgagaatgccggccgcgagacggttctgtacgagcgcaacctcaaacagcccgaggcccggacgtcccggacgatcaaccagctccgggaacgcatccctcttccggtccggacgggcgaggccggattgaggctcgtcacgaccggccccgggggcgttttttcctactggatccagcccgtcctgtacatcccggaaaaaacggctcccaacatcgtcctgatctccatcgacacgctccgggccgatcacgtgggagcctatgggtatgaacgcccgctcacgccccggatcgacgccctggcggccgacggcgtcgtcttcgaaaacgcctattccacctcgccctggacgctgccggcccacgtctccatgctcaccggcctcaattgcgtcaggcatcgcgtctacgccgagcaagaccggatggatccccagaccgtcaccctggccgagcggcttcgggcccggggctacgcgacctgggcgatcaccggcggcggcttcgtcagcccgatctacggattcgccaagggcttcgacgagtatcatctcgaccaggccgacctcatggacacgagtcaagcggccaaggccggagatgacgcggcccggtggatcgaaaaaaacaccgaccggccgttctttctcttccttcacacctaccaggtccattccccctacaaaagcccgatgccgtaccggacgatgttcctccgcccggacgcccgctggagccgggtcgacatcaacaaggtggtcggggggagggcgggcgtttacacggagctcagcgaggccgatcgccacaacgtgatcgccctttatgacgccggggtccggttcaccgatgaaaccctcgtccagcccgtcgtggacgccctccgccggctcgatctctacgaccggacgatgatcatcgttaccagcgaccacggcgaggagtttttcgatcacgggggctggaaccactcccacagcgtctacgacgagctgatccgcgtaccgcttgtcgtcaagatgccgggctcggaattccggggaacgcgccggtcccccgtcgtccgcctgaccgacctgatgccgacgattctcgattatgccggccttccattccgggatctctccctcaacggcgaaagtctccgtccggtcctgaaggagaaagaaacggccgaccgcgtcttcctggccgagctggccgacaacatcctcaactgccagatcccccagcgcctggccatgaacgacgggcggacgaaagtcattctgaaccgccccttctccccggaaaacatggccttcttcacggcacgcccgccggcctttccggccgtcgagctttacgatctcacccgcgatcccggcgaaaaaacaaacatcctcgaccatccggacgatcccgcccggatccggagcttggtgcaaaaagcccgcgacaccgaccgcctcattcccccgcgcggcgagggcaggcattcgcgggtggacaagagcctggaggaacagctccgggccctgggatacatccggtagggcggccgccgccagcgccgctccggccgcggaccgggattacttgccggtccgtttcggcctgaagaaaacgagatagacgatcccgatcacgatcagcagggccccccaccataccccggcgtgcaattcacgcaggacgacgttgtggcggcccggaacaatgagatcgtagatcccggccccgaggatgagaacgccgtaaacggtcagaagcagcccgatgaagaaccagatggaaatcatttttttcgccatgggccggctccttaccagaagaggacattaaggaaaacaaagacgacaaagacgacgccggcccagaaggccggccgccggaacaaggtcaagtgcttttccgagggcaggaccgtgcagctgcggaccagcccgttgagggcgctctccggcttcggcttcgtgagcaggctgaccgcgatcgtaaccccggcgcagatcaagcagctccacagcccccggtacatgttctcggccatcgccttggccccgggcgagagggcgatgatccggagggccgagggatcgaccttgacccagatccacatcccgatcgatgagaccgttccggccagcagcccccagaagccgccggccgaggtggtccgcttccagagcatgccgaggaggacggtcgggaacagcggggcgatgaagaaactgaagagagcctggacatagtccatgatgctggcgaattccatcaccaggtaggccgtgccgatgctgaccaggacgcccaggatggtgcaccaccggcccaccgagacgaaatggccgtcgctgagcggctttttccggagcggcttatagatgtcgtaggtccagaccgtggcgaaggcgctgacgttgccggccatgccggacatgaatccggcgatcagggccgtgatcccgaggccgagaaggcccggcccgaggtaccgccccatcatcaaggggaggacctcgttgtagctgtgaccgcccgtggccaaggcttccgcctcacccaccaggccgggcatgacggccaggcccaggaggccggggagaatgacgatgaacgggaccatcatcttgaagcccgccccgatgatcggcgccatcttggccgagcgcaggtccttggccgccaggacccgctggacgacgagaaaatcggtcgtccagtagcccatggagagcacggctcccaagccgaagacgatgcccgtccaatggattcccatgggattgtcggagaacgatccgatgctccgccagagatgcgtgtaatccccctggaagttctgctggatcttggcgaccatgttcccccaacccccggcctcgatcaggccgatgatggggatgagcagggcccccagccagatgaggacgaactggagaacctcgttgaagatggccgaaagaagcccgcccagggcgacatacagggccaccgtgatcgaggacacccagatgctgaaatggatgtcccagcccaggacgactttcaagacgagggccatggagtacatgttgatgccgctcatcaggacggtcatgaccccgaagcacaaggccgaaaggctccggcttgagtttccgtagcgcaactgaaggtatccggggacggaatgcgtcttggagatgtaatagaacggcatcatgacgatggccagaaagagcatcgccgggatcgccccgatccagtaccagtgggcggccaggatgccgtattgataactggacgcggcccagcccatgagctccagggctccgaggttggccgcgacgaagctcaagccggccacccaggaagtcatctcccggccggccatgaaaaagtcattgcccgtcttggtgaagcgcttaagatagaagccgatcgccagaacgacgacgaaatagagggcgacgatggccatatcgacgccgttgagcgacatcagcgagccgggattctgcatcatgtcctccttgtcatggaaaaccgggagcgtccggaaagggataagaaaagggacgccgggaggggaacatatcgaccggaatcttattccggccggaggcggctgtcaatccggcgaaggcgtttcgatgacgaggaatcccgggctgatccctccggagatgtttgccgagccccggggggcggagagcttgcccgatcctacggttccccccgcggaaggcgacttcgttttttacagcggctctcgatttcgcccaaacgaatcggcttttattttttccagggaggtcttttgcccgttctcccgggccggatttgggccgggatgggaacgccccccctttcccctcccgtcttccgggacggggaggaagacgttaaagcggagggtcgctcctcatgggaaaccggacgaaacgctcggcgttccccggaccggctggatccggccggttcgtacagagcgtccggcgcgtcaggtaaaaatgatgtgtccgccggccgagatctcatagaaccggccgacgttgatgatcgaattcacctgggggcagaaatcctctttcttgagcttgaacatgtcgaccgtggccttgcaggcatagagcgtgccgccggcgtcggcgatcatctcgatgtattcggggacgggcggaatgtcgagcttctccatggtcttcttcatcatggaggtggccatggccgacatgcccggcagaatgccgacaaggctgggcatgtgcatcccgggatttcctaccgtggcgactttgatccggcccattctcttcttgatgatcgcgtccatgccgaaaaaggtgaagaacaggttgacctcgatgccctccatccgggctccgttggccatgatcagccccgggtagacgccctccagccctcccttggagataatgatcgagaccttcttgattttgtcttccatggctcctcctttcgaaacggccggagaatcagacgcagccctcgggctttttcaagccggcgatccgggccgccttcttggccgggccgcccggaaacagctcgtaaagctccttggtggaggcgacccccgacttgttgagccggcggatgctcgggacctggccgttctccttgtattccttctgcatgaactcgatgaccttccagtgagccggcccgagggcggcgaaaccctcttccgcggcgatcgcctcggcgacggtccgcgtccactgggaaaaatcagtcaggtaaccctcggcgtcgacgtcgaccgtggtgttcccataggttttgagaggcatggcgtatctccttctttcatcggcgatgcgatcaagcgcccggagcggccgccgggcgctttttcccggtcatcttcatccgggaagggacgaacgggatcctcctcccccggagaagcaggcgccaatagatcccgcggaaggccagcttcccccagtgattgagccggctgggcttgagcagggggagcggcccgaacacccggaaaggaaaccggccgggcagcggctccgtctcgtagttgaaatcgatcaagatagccttgccccggcccatttcgatgaagcagttggcatggccgtcgaaggccggctcgagaggccggccgtcgatcgcccggagaatgttctccgtcaggatctccgactggaagtggacgacggagccggccttggaggcggggacgtccgtggcgtcgccgagggcgaagatattttcatgttttttcgagcgcagcgtgcggggatcggtggggaggaagcggaattcgtcgcccatccccgagcgttcgatcatctccgcgcccatgttcgtcggaacggtgacaaggagatcatagggcacctcccggccgtcatacccgatgattttccgggccgatgcatcgatgcgctcggcattgaaatccgcgaccatccggatgcgcttcttctccaggagagcccccagggccgcggccgccaccggcttggtgaaggcccccggcaaaggcgtcacgtagacgatgtcaaccttgtcgcgcttgccgtggcggcggagacaggcgtcgcagaaaaaagcgaattccaagggagcgacgggacacttgatgggcgtttcgttaacgtggacgacgagggtgcctccggagaacgtcttgagcttcgccgccagagcctcggccccgtcggccgtgtagaagtcgaagatcgtgtccccccagccgtcgagcatcccgggcgtttcggccggaacaatctcggccccggtcgcgacgatcaagtaatcatagggaaccgtccgcccgtccctcaggacgacttcgtttgaggccgggacgatccggtcgatttcggcttggatgaactcggtctccttggggaggaacttcgatcggggcttgacgatgtcttttttccggagaaagccgaacggaatgaagagaaaccccggctggtagtaatgctcattgtcccggtcgacgaccgtcacggcccactccccccgggggaggcgctttcggagatggctggccatgacggttccgcccgtccccgctccgagaatgacgaggtttcgcatggaatccgctccttggatccggccgaaacgtcttccgaatattcctattaattatatcgatttgctttttaaaatcaacagggattccgccgaagaccggaaaacaggccgcgcccccctcccaaggctaatcccgggggaaccagacccgcatctcgcccgggccgcggttggcccaggcatagtaggggacaagaaggacgtcccgggcccggaccgcgcccagacgcatcgttccccgaagcgcttccctcgtcaagacgacgaccccgttcaatagatccggccgaaactcggccgaaaagcgggcgccgtccatgatcgacaggtcgaggacatgcccgccgttgtcgacggcttcggcgcaatacaccagcggcccgcgctggaaggcgacgcggccctcgtcggccgcgaccgccgccgcggccgccatccggcgcaccggcatcggaagcgacagctcgaccacgtccgctttcttccaagtccggcggagaacggcgtatccgttctcgaggacgaggccggcggcttcgccgttgaccgtcaaggtcggcgtttccgcgctttcatcccaaaagcggtagaggccgccggggacgggctcgttccgggcccagccgggaatccggatccggagggcgaagtccgcctccttttcaggcgaaacggtcaacttgaccgttccctcccacgggtatttcgtctcctgggccaggcccaccttcatcccggccaggtcgatgaccgccgtgttcgccgcaaacagattgacatagagggaatcatcgccgacagcgtaaacatagccggggacggagggcaggaaacggaggatattgggcggacagcaagccacctcgaaccacggggatcggccggcctgtccctggtagagagccgttttcccatccgattccaagggattctcataaaaaaacgacaggccgtccaatcccacgcccgaaatcaggccgttgtacatcacgcgttcaagaacgtcgatgtatttcgcctcgccgtgcagaaggaaaagacgctgctgccagagggcgtggccgatcgccgcgcacgtctcggcataggccgtccgattggggagctcatagggagctccaaaggcctccgattcggcccgggcgccgactcccccggtaaggtacattttccttccgaccacgtcggcccacagacgatcgatggcttggatgtagtccgggcggccgccgagggcggccgcgtcggccattccggcgtagaggtacatcgcccggacggcgtggcccacggcctcctcctgctccggcacgggtttgtggttcaggagatactcctcggagttatagacgctgaacgggtcatcgggggcgtacttttccccttgaaaagagcggccgcgctcgtccaggaagaattccgccaggtcgagccaggcacggtcgccggtcacccggtagagtttggccaagccgatttcgatctccggatggccgggaaagccgcgccgcttgcccgggccgaagacggacgcgagcagacgggcgtttttcaaggccacgtccaggaacgcgcgtttccccgtcgcctggtaatgggcgacggcggcctcatatagatggccgacgttgtaaagctcatggctcacccgaagattggaccagcgctcggccccggcgccgggagcgggattcttcggatcgatcgtccggcaggtgtagagatagccgtccggttcttgggcggcggcgatcacggcgataaggccgtcgagcgtctcggccagcgccggatcgggcttgagcatcaaggtgtaagccgccccctccatgactttgaacacgtccgaatcgttgtatcgctttcccaggaaagatccgggcgtttttccggcggctttgcgaaaattgtccactcgtcccgtttcctcgatcatccggagggcgaacggcacggtcgcggcccggttggtttcgatccgcggcgcccagaaaacgtcgttgaggcggacggccgtgaacggcaccggccggaggggataatccggatcagccgttgccgcgccgcccgccgccgccagggcgatcatcagggccgctcctccccttgttctctttcgcatcgccgcctcctcatatttcggattccgcgccccctccggacggacggattttgtctttctcggccgcgagccagaccgccatcccgcccgcgtcccgatgggcccaggcgtagtacgggatcagcgtcaggacgccgggaacggcgtcttccttcccgttcttcatccggaaggccgtcgcctttccggcgaggacggtcaagcctcttaaaagcccgggccggaactccggcgccggaagcacggacggatcgaaaagcaaattggagaccgtcccgccgttgtcgaccgcctcggccgcgtaaaccagcggaccgcgctcgaccgcgatcctcccggcgtcggccgccacctcccccctcgcccggacgagacggacgggcatcgggagggaaagcgtgacgacatcgccccgggcccatgtccgtctcaccgcccagtagcccttgtccaagaccgcggcagtttcccggccgttgaccttgatcgaaggcgttccgggagcggcgtcgaggtaagaataaaggccgcccggaagcggccggcccagggaccagccggggatccggagcatcaacgtccaggcggccgggccgtccggcgcgacttcgatctcgatgtctccctcccacggatagtccgtcgtctgggtcagccggaccaggccgcgttttgtcgcgagctcggccgtgctccggccgtagaggttcacatagacattgtcgtcggcgacggcgtaagcgtacccgcccatcccggcgatgaaccgggcgacattgggcggacaacaggcgcatttgaaccagggcgtccgccgcgtcccgccgtcggaggccagcggattgggatagaagaaaagatcgccgctcatcccggcgcctgaaaggaaggcgttcatggccgcccgctcgaagagatccatgtatttcgcctcgccggtgagacggaacatgcggtgattccaaagggcgaaggcgatcgtggcgcaggtttcggcgtagcccgtatcatttcccagctcgtagggcggtccgaagccctcgatccctccggccgaaccgatcccccccgtcaagtaaagcttccttccgacgacgtcctcccagatcctttccaggacggcgacatagcgcgcatctccggtgagagcggcgatgtcggccatcccggaatagagataggcggcccggacggcatggccgacggcctcctcctgctccaggaccggcttgtgatcctgggaatactccccgtaaagcttccggccggaagcccggccgcgctcctcaacgaagaaccgggccaagtcgaggtatttcttcttccccgtcaggcggaagagcttgaccagtcccatctcgatttcctcgtggcccgggacgctcttgagctgcgtttcgcccgggccgaacgtccggtcgatcagatcggcgtttttcaaggcgatatcgagaaggacgcgccgtcccgtcgcctggaaatgagccgcagccgcctcgtaaagatgaccgacattatagagctcgtggctcatcgagaggttggaccagcgctccggcccggacatttcgggtggagccgcgggattaatggtccgagccgtataaagatagccgtccggctcctgggcggccccgatccgggagatccagccgtcaatgtctttctccaagtccgggtcgggacgaagcatcaagacatcggaggccgcctcgatgagcttaaacacgtcggaatcgtcgaaaggataaaccgaggccaagcgtccgccgggctctcccccgagagcggccgcggccaagtcgaaattccggagccggccggtctcctcgcattccttcatttcgtggcggatggtgacggagacgacggttttctgccgttccgcccagaagcctccggtgaaccggacggccgcaagaggaacatccttgatggagtaatcgggggacggcgccttcgcgcaggcggcgcctcccaggaccgccaggaccagcccggcgcaggccgcggactttttcatggggaaatcctcccggtgcaaactcgcaaagcggagaacagacgcctcgcggtttactatgatatagaaaatggattattacaaggctccaacaaccggatttttgccgtcataagggcagaaatcggcgtccatccagaagaatttcgtctccgaatcgctccctccgcctcgcccccgccatgccctcgcttctcttcccggcggcggacctggcttggaatccgtccgacaggacggcggaatcctctgccgctccgcttgaccgccccggaggagggcctgctcggccggttcgaagcggccggggcaacggttaaaagatcggccgcgacggaccgcgcgtccggatcccctcagcggcggccggcgaaacggccgtcgatgggaaggcccggcgcgtccggacgcaacgccgtccgccgtttcttgactttcgccggggctgaagatatctttcgatcagcttcggaaaagagagccgtccccagcagaaaaggagggcgccatgcgcacggaaatcaatctcattctcaacatccccaacggcagcgtcacggccacgagcctcggggtcgaggggtacgcgcgacatcggagccccggctcggggaagcatttccgcggcaagaccatcatgatcgacctcgccctcgagggcgaccggccggccttccgattttatgaagaaggcggatggcgggacgccgccggcgacgccgcggccgccctggccgccgtccgctcggggaaacgaacgaagacggccctatccaacgacggcttcaacatcacgccgctcgacgcctaccgcgggattttcctggtcaagacgggcggggcggtcctcccgctggccccgccgcggcgcctgatcgactacctcaagcacggctgccacgaagagatgacgcccgcccaggtggcccggtcgatcgatcgcccggttccggaaagccgggcgccccggctcttcatgattctcgccccgattcaatttcttctcctgacgaacctcgcgcccgaggaatacgcctggtacgcgacccaccgcccgggaaagatcttccgccggctgatgttcgtcgaactggctgcggaacaaccccagatcgcggccgccagccgcttcagcgacgcccgggaggagctggccgccgatccgtccaaaaagaccaagagcatcgtcttcggcgaatgtctcaacgacgttcctttccgggactgggccggataccgcggcgacgttcccggcggcctctacgccggcgaccgggacggcctgtccctctggacattcccgccggccgttccccggacctgggaccgtctggacgggtgagaccgccgcggcggccgcggcgcatcccgacgaagagacaacccgccggggggaaatccgtataaggattcagaaggagaagaagacatggccggagcttcagccgcgatcgttttcgcgatccagaagaaaatcatcggcaaattccgggatcagtgcgcgaccgatccgcgccaagcgatgaccttggaatcgttgaacatcaggaagcgggtcgctgtcaagagcctgatcaagaaaaagatcctcgtcgaggcgcctaacgaccgtttctacctggacgaggaagcggccgaggagctcttcaaaaatagacgctggattttcctgatcgtgatcatcttcgcgatcatcggccttcttgcggcctatttcctcaatccgtaggccgccgcgcgttttcgaccgggacggcccggccgcgtcccaaaggttgccttttccccgccctttatttagaatggctcttcatgcccgacgccgtgaataagcaaacgcgatcggtccggccggttcgtctcggggccgccctcatccccattctcttcctcatcgccgccctttccgtcacaatcatcatcctgaaacaggacgcccatatcccgctgatcgcggccgccgccgtggccgccgccgtcggattatgccacggacacagctgggcttccatccaggacggcatgatccacggcatcactctggccatgggggcgattctcatcctgatgatcgtcgggatcatgatcggaacctggatctcgggcggcatcgtgccggccatgatttattacgggctcaagattctctcgcccggcctctttctcgcggccacgctcatcatctgttccatcgtttccctgggaacgggatcgtcctggtcgacggcgggaacggtgggcgtcgccctggtcggggtcggacaagggctgggcattcccccggccatggtcgccggagccatcatttccggggcttacttcggcgacaagatgtccccgctctccgacacgaccaatttggcccccgccgtcgctggaaccgatatcttcagccatgtccgccacatggtctacacgacgacgccgggatacctgatctctctcgtcttgtacggtctgctcgggcttcggttcgccggaggccgcatcgcctcggacaacatcagcctgatctcccggacgatcgagtcgcattttcagatccatccgcttctgcttctccccccgatcctggtcatcgtcatggtcgtcctgaaaatcccgccgcttcccgccctcctcggcgggaccgttctcggggcgggcttcggcctggtcctccaaggacggacgctggccgaggtcgtcacgaccgccaagtccggattcgtcagcgccaccggcgttcccctggtcgacgacctgctgacccgcggcggcctggacagcatgatgagcaccgtggccctgatcatgtgcgccctgaccttcgggggcatcatggaaaaaacgggcatcctccagaccgtggccggggctctgctcaaaagagtccgccgggccggctccctcgtggccacgactatcctgagctgcatcgggatgaacgccatctcctcggaccagtacatgtccatcgtcatcccgggccggatgtaccggtcggcttacctgaaattgggcctccatccaaaaaatctctcccgcgccctcgaggattcggccactctgacatcccccctgatcccctggaacagctgcggggcgttcatgggagcgactctcggcatcagcccgctgctctatcttcccttcgcctttcttaacctgtccaatccccttgtctccatcttctacggatacacggggatcacgatccacaagcttacgcctaagcaaattcaaatcctcgctgaaaatccggaagccgcggtctaaaggatcccctcaagactcggattccatccctcgagccgccgatcatcggcatgtctcttgcttctgtttacaggagcattccccgaatgatcgttctcctcccggccgccgtggccgggtcggccgcggcgttgccctcctccccccgggaagccgaagaatcggccgtccaccgggccgccctcgacgatctcgaaggctgattcgaaggccgcgtcgaacgcatggaccggggtcttcatccccggccggccaagggcttgttgaagtcgatctccggaccggacgggaaaaggcggccgagccgaccaaggacatcatcctcgaatacaccgagcgaggcggcggaatccgcgttccgctgatcggcgccgcatcgagatcacgatcctcgacatgaccgaaacgacggcctaagtcaggagcgacaactcccggttcatcgatttttttcaccccggccaaggccaaaggcggggcctggaagatcgtcagagtccttttggaagaaaacccgcgtcgacccggaaaaaaaacaatctttaatgattagtaaacgaattttacatcagggaatccgggagatgctcccggaaagcccgttatggatattcccggggctcccggaagccccgggacggcgccttccccagaagacgttttttgttccggacagccgtgaacaaaccgcgggccaggacggcgatctcgccgtttgccggctcgtccccttccagccgggtgccgtccgcctcgagaataaaccgcaaggttttcgtcgaccgggccacggccacccgccggtcgcggcggtcgcgcttcatccaagtgatctggacgatcatgtccggcggagcgtcttccctcggaaggacgatcgagacggcgatatccttatacgtgtcgtcgtcgccctccccgatgaagaattcctggcggatgaatcgttcgccgggacgggccggcatggtctggacttcctcgtaaatccggcggaagagatccgaaacctcttgttccagaacgaaaacgacatccgttccggccggccccgcgatcataaagaccagggccgccgccagccgttttcgtgtccgaagcgaaaaagccgacatgagccgttcttgccctttgagataagggtaaatcggaaaaagcgtcgcgtcaatgaatccggacttttaaaacagcttcccgggccggcgctccttggcacattccttgcaggtatgaaaagggacaaggagaaatcaaatggcgcttgagagggaaacggctttgatgcttatggatctctgggcttttgcctatacccagaacccctcccggaagacgaagaatgaattcgagagcgcttgccgcctcggcgacgccctatctttacccgaggtgaatgtcttccgggagctcgtctccgggctcgagcaggaattggttgagctccaagccgactgaggctgttcgaactcgggctgagggccgcaagatcaaacgccgcgaataaatccggcgatgattcctcctcggcctcgaggccgagttttcctcttcccaaaaaaatcccggggcccttcggggccccgggacgatgaaatcgacggatcaatcagaaggaccgccctttatttgatctcctcgcccgtcaggggatcgatgagattgagacggtggaccttgcccagcttgtccaaggggccggcccatttgtcgccgccgtcgttgcacggctcgaagtcgccgacgatcaggatgaccatctgatccgggcggatgtacttccgggcgacgtcctggacccgatccttggtgacggccttgatcttgtcccggaaggttttgaactcgttcatcggcttgccttgcatctccaggttagcgaaagcggtcatcgtcgcttggggcatctcgaactggctggagaagctgtcgatgtaataactgacggccgtgtccatctcctcgtccgtgaccggctccagtcggatgcggttgaattccgcctggatcagggaaacggcatagccgaccgtggacgacttggtctgaacgtagccggcgaacgtgcccgggaagccccagcgggtggtgaaccggctgccctggttgtaggacaggccttcgtccgaacgcaccttggtcgtgatgcgagaggtgaagcttcctcctccgaggatgaagttcatcacctgcacggccgggtaatcggggtgggtgtcctcgaggccgagatgaccgagactgatgtagccttggttgatgggtttctggatgaaatagacgcccggctccggggacggaaacgacttggaaaacgccggtatcgcgggcttccgtcccttccaagcgcggatgatcttgttgatcccggcctccaggccggccttggaaaaatcccccgaggcggccaggatgacgttacccgggacgaaataacgggcatggaccgctttaaggtcggccggggtgacattctcataggatgatttcatcggccggcgggtcaaggcatgccggccgtacaggagcttttcgtattcccgattcaggatcatccccggctgatcgttggcctggcgaagctgctcgatcgcccgggccttggccagggcgaagggcggctcgcggaattcggggttcatcaggacgtcgaagaacagggccaagccctcgtccaggtccttgctcaggacgaacaggttgagggacgaggtccgttctccaacggcgaatgtcagcgatccgcccagaaaatcgatccgttcctcgatggacgcgccctcgcgggtcttcgttccgccccggatgagcgtgtcgccgagcaggacgtccaatccctccttgccttcgggaacatagagactcccgaaatcgatcaaggcggaaatgttgaccgcgggcagggaccggtcctcctggacatacccccgcaagccgttggccaggaccgtccggaacgccttgggatcgggcggctcataggtcagggcggggaattttaaatcggacggcttcgtcacttgagccaggcccgaggcaaggacgaggatgaacacgccgatcatcaagctgattgtttttttcatcgccgctttcctcccttaccggcccgtcgtccgcgtgtagacggcggtcaggctgttgtccttgacgaaatatttcaccgcgacgcgcttgatgtcgtcgttggtcacgttctggacggcctcattgtcggcgaggatcgagcgccagccccggtgaagctcggcccggccgacggcgctcgccagtccggccgaaaaggacaagctgcgaacgaaattggcctcgctccggttcttgattttttgaatttcatcgccggtcacgccgtccgtcttgatgttctcgatctcggcccagatttctctctccagatcctccggcttgacgcctttgtccagacggggcgaaccgctgaactggaacgcgccgacgtaccattgggaccggtggaacgccgcgaccgagacggccagctgtttttcccggaccaggatcttctccaagcggcctgttccgccgcctccgccgcggggaccgccgaagccgccccggccgccgccggcgccgaggatgccggccaggacggtcaaaggcgccgcgtcgggatggccggccggaggggtatggaacatcatctgaaggctggtcggagcggcaccttccccgtacatccttttctccgcgtactggggaggctccgacgtccggatcggctcgacgtcggggccccgggggatgggcccgaaatatttctcggccaaggcgaagatgtgatcgggtttcacgtcgccgacatagatggccacggcgttgttggggatgtagtaccggttgtgaaattcgatcatgtcggccttggtcatcttcttgaggtcgtccatccagccgataacgtcccagtggtagggggaagcggcgtaaaaggcggccccgacttgttcccggaacaggtagccggggctgttctcgctcagccgccgctcttccatcacgacgtccttttcggaatagaattcccgaaaataagcgttccgcatccggtcagcttccaggagcatttgaagctcgaccttgttggagggcagagtcacgtaatatcccgtgctttcctggctcgtcgaggcgttgaggccggtgccgccgttcttcatgtacaactcccagaggtcatccttgacgatgaaggctttttcggcggcggtcagctcatcggcttttttttggagctcgacgattttggccggatcgccgtccggcttccaatacttttcccggtagatttggtccatgacctcgtcgatccgccggtcgagggccgcatccttctcgaaatcggtcacgcccatcattttcgtgcccttgaacatcatatgctcgtggacgtgggcgatgccggtgatgccgggccgctcgttgatcgatcctaccttgtaatagacatggccgacgacgcggggcacgcccggattggggatcaccaggattttcatcccgttccccagggtctgctccttgacgtccagggtgatcgacccggccgcggcgagggcggccaggacgagcaccgcgagcgaaagcgtcacgacgcgcttcatgcggatcctcctcctcgtgaaattgaaatggtcgggagccggccgggacggccggaaaacagaaaccgctctcccttcttattagacgccccgggccccgtcttcttccctcatcggaagcggcccgatcatcgcccccctcatgggagggacgataaaaaaaacgattcataaaaagaggtcccggcggcgtttcctccggccggctgaaagacgatcgtcggtctcatcgaaaaacgaatccaccaaggccgccggagggagcagccgcgaaaagcggggaaatccctccctctgaagcgttcttgattgaaatcaatgaattcccggagtcccggcttccctgaatcatttgattttctcataagttaaagacgaggggccttggtggtaagtaaaagactcgacgcctcccgtttccgattctttgaaaaccaggtaaaccaaaggagccacgcggaaaaatcgttttccctccgcatcagggggacgcagctcgtaggttttctgtccggagattttcaacgccaggctgttgttcttgatgacaatctccagggtttcgtcgagctcgtcgccgtggtactccccaagaaatttccggagctcttccaggggaatctccggcggcaggacgattccctttcgcggcagctcgaaggacatcgccccccggcggaagatcatggccgtgacgccgaattcgggccgccggctgaaggaaacgccggcttggggagaggcggcgagggcccggaagccctcggcgtccggcggacggagctcaagggcgccctgtcccgggatctccaggaacaggcggccgtcccgggccgagacgttccattccgcgtccgcgaaagccccgaaattggcgatatagacgcccgcctcttccggcgccgccgatttgtctgaaccggctggtttccaggaatcccgaagcgcccgggccgcggccgcggctctttcgacgcaggcggccgagaaatcgtccaacacccgggccgcttccacggtctttccggccttccgtagttccgtggccgacttgaggacaggcgggagggcggcggcgaaggattgttccaaagcgtcgaattcctttcggacggccgcgagccggcccggccggtcgagattgacgaggtcggtcaagtcgcggaagacccaccagtaggaatcgggcgaataccggtcggtcggggccgtctccggcgggacgacgcgcttccccgccgttccggcggccgagaggaaggccggaagctctgttccatgaacaaagaacgggacgaaaatcccgcttgaggggacggacgcgcaccaccagaaaacggggagtccgccgccgtcggcgggaagcgaggcgacacaggagctggccgtcgcatccaggtccaggctcgggtcggtggaccggtcgcgggcgatccgcttcatccaagattcgtcgatcgatccggatttttcccggagaagcccaagggaacagttcgcccggacttgggctctctcccgggcgatttcttgatcccgtccctcggccgaatatgcctgttcgaaactgaacgcggcttcggagcttcccgtccaccagcctttctcccgggcatgggccgcaaggtcggccgacgacaagtcaagggaaccgcccaggctcagggtgttggagatcgaggccgttccgccctcgatcctcttcgccgcccagcggattccggccgtttctaaaatccaggcttccctcggatcggcgacgagataagaattgtcatacgcgccttccagcctttggccgggaaggccggagccgaactgcccgtatgtttccgtcaaggccgcgatcgtttccaccgcttccttggccgtccggcttcgctccaggccgaggcggacaagatccattccggtcgggcccggcttcggtccccggctttcccgggcggcggcgatcgcttcctgcaacggcttggtggaaatgccttcgttcccgatgacgacgccgaactcgttgatcccctcctcgtatccccagcaccaatacgggccggagccgagggtggcgaatgtctccccggcctgggggatggaaacgcggccgaggtcgatcatcgcgccgaccggccatgatttccgcggatgaagggccagcggctggctgtcgaaaaccgtccgatcgctgtttttcgcaaacagcacccgcccccgggacacggcgtccctgagggccacccaagtgtcgcaggcgaaccccgccggggcgaagagaaagccgatattcaggcccaaaacgaaaagagcgagggaagcagtctgttttttcatcggataccccccggccgccgggattaaaactcccggcgggcgtaaaacctcgtcgaaagaaagagggacacgagaaaggggatgaagacagccgccgcggcggccaagacaaaaaggggcgtccccaaggagagccggagaacccggacggccccgaaaataacggcctccccgccgcccgaagcgaaggcgtccgagagggcggccttgagcccggccgcgcccagcgcggcgcaaaggacgccggcggccgtgaacaggagcgttccgcggccgaagccgaagcggtgatagaacggaaggtagagagacaggaaaaacgcggtcagcggaaaaaacaaggccgccgcttcgatcgaaagaagcccggggaacccgccggccgggcgcggaacgtgcatcaaggcgcccgcccagccgatgatcccgaagaccatcgcgccgccggcggccagcaggacggctcccagaagataacgggcgccgacgatcgacgctctcgagacagggaggctgagatagagaatttcggttttgttccgatcctcgaggaaaaagaccgtcgcctggccggccagggcaagcgcaccgccggccgccaggatgaatccggccgaaaagaacggctgaagcgagtaaagagataggacggccgctccacagagcagaatccaccgggccgcgagcagatctttcccgacgagcttaagcatggccgtttcccttgctcatgaaaaacatgatgtcctcgagggtggccgtttcgacgatcgcctcgcggccgaaccgccggcgggcttcgtcggcctcggccgtcagggcatggacgccgcaggcgctctgccgaatccccttgaacaagggccggttctcggcggccaggagctccggcccgcccttgaccacaacccaggccccgagaatccggtcccggggcgaggagaaaacgatccggccgccgcggatgaaagtgatgaaatcggcaattcgctcgaggtccgaagtgatatgggtggagaagaggaccgatttgccttcatcctggataaaagccgatagctttcttaaaagttcgcgccggaagacgggatccaggcccgaggtcggctcgtcgaggatcagcagttcggccttgtgggacaaggcggcggccagggcgaacttcattttcatcccccgcgacagggtcttgaatctttttcccagaggcagctcgaactcttccgccagccgccggaaacaagcgtcgtcccagtcccggtaaaacggggcgactgttttccggacatcagccagggtcaagtgttcgtagaaaaacggcgtgtcgtggacgaatcccaaccggcttttgatctccatttctccggcgatattgtccaggccaaggacccggatttcgccgccgtcccggcggatgaggttcaggatgagcttgatgatcgtcgttttacccgccccgttggggccgatcaagcccatgatgtacccccggggcagggagaaggagacctcgttcaaatgaaacccgccgcccgacccggcggaatcgggcgccggccgggtcaggcggccggacgggctgtaagacttggaaaggtccttgatttccagggcgcagtccatggcccctccttaatattccttcctccggaacaaggccaggctgagggagaacgagccgtaggaaaacagggccaggagggagagaaccgcgaagacggcgggcgccgggccgaaagcggcttgaatttcggccaccgcgttaggaaccaggcgaaagagcgtcttgatcaagccgatgccgacggagctgcggaaaaccatgagaaggacgccggtgatctgcagaacgacgagaaaaacgagcagcccggcctggccgaaacggacgaacaaaggcatcaacaaaccgaaatagacggcaatgaaggccagggaggaaagaaccatgcgaggcccgaaaaccgtcgcggccggaagcttcgctcccggaaccacggccatcaagagggagccggcggcgaacatgaggagcatcaatatccagctcagaagaaaccgggcccggaggtattcccggcgggtgacgggaagactgagagtgaacgtttcggctttgaacttgtcctcccggccgaatagaacgaaggggacgatgacgtagaggaacgcgcaaaggacggggaggagcgtcgtgtggccgatccgggagcccatataaccgatatagagcggatagacgagtccgactcccaaggcgaatttcttatggagaatgaaatccttgcggaacagtttaatcatgggaagctccggaatgcaggaagaccatgatgtcttcaatcgaggcccggtcgaagacggccgaggggaaggcggcccgggacgctggaatatcccccgtcaaggcctccaccccgtagggcgattcccggacggcccggaacaggggacgacggacgggatcaaggagctcgggcccgcccttgaccacggcccatttatcccggatgtcatcccgcggcgccgagagaacaacttctccatcgagcagcagggtcacataatcggccgtcctctccaaatccgaggtgacgtgggtggaaaaaagaaccgccttccggccgtcttggatcacgccggcgagacggtccagaagctcccgccggaagacggggtccaggccggaggtcggctcgtcgagaatcagaaggtcggcgtcgtggctgagggccagggccaaggaaaatttcatcttcatcccatgggacagggccttgaatttctttccggccggaagctcgaactcccggagcatcgcttggaacagggcggggttccagcatggatagaaaggcgccacgacggaggcgatatcccgaagcgggacgtcctcgaccagggccggcgtctcgtggacgaacccgatccggttcttaactgctttttcatcggcgaggttatccaggccgaagaccttgatcgcccccgcctgacgccgaaccaagttcaggataagcttgacgatcgtcgttttgccggcgccgttgggaccgaccagccccatgatcgagccctcggggacggcgaacgacacgtccttgagggcgaatcccttgtaggacttgcggagtccggagatttcgagggcggcggccatcagatattctccttgaacagaagacggagcatgtccgccacctggctctcttcgatacccatcagccgggcctcgtcgacggcccgggccagcgcttcctcgacgactttcatcttcttctcccggagaagttccttattctggacggcgacgaaggtgcccttgccccccaccgtgtcaaggaagccctcggcttcaagctcgtcgtaagcccgcttggtcgtgatcacgctgatttggaggtcttgggcaaggcgccggatggaaggcaaggggcttccctcctccaagtcgccggagaggatctgggccttgatctgttttccaatctgctcgtagatggggtcgggcgaggagttggaaatgatgattttcaaaaccggggctccttccgttctacttgtatcatttgtttatactgtttatatatcacaatcacagtatagccggcgatttttatttgtcaagtattttttataaaataagaaggcgtttcaatccgcctggaatcggaggctctgaccatgaaaaatgcggtaatcgcttcacttttcctcgttcccgcccttctcctgactttctttcccgccggatgttccggtttctcttccgattccgaggcggcgctggaagcggcccgggtagcgatcttggaggaattcaaccgggttaatatcgagctgcgccgggccgccgagcgcctgggagcgtcgggcttgaccggatgcgacgcccgctcagccctcgaggatctttatctcgccatcccctcggccgtggattgcgccgccgtcgactcccgcgggatcatggtgacgatcgagccggcgtcctaccgtcaccacgaaaacaaggacatcagcggccaggagcaggtgaagaggatgctggatcgccgcgaaccggtcatgaccggaatcttcctgactgtcgaggagatcgaggccggcgacgccgaatacccggtcttcggacccgagggggcgttcctcggctccgtcagcctgcttttttcgccggagaagctgctggacggcgctctctcccccgtctccggaaagaccgacggccttgtcgtgatcgagacgggcggacgcatcctccgtcattcggatggcgcccgcgtcggaacaaaccttttcgcctcggccggcttcaagagcgacgaacgcatgcgccggcttggggagcgactggccgccgagctcgagggacgggacggcccgacgggcgcatcctggaaaagcgtcgagctttacaacggcttctggcggatcgtcgacctgccgtttcgctgatattcaatcacaggaagccgtacttctttccgtactccagcatctgggcgacgtaatcctcgggcagcgagatcttaacgtcgacgatcttgccgcttccgtccgtgacgggcgtatagacgggattgatgaagccggcgtagggagccaagttcagcttggcgtaccgggccaggacctcggcgtggagttccggatcgatcttgacgccgtaggcctcgacaagattcttggcggcctcgtaatcgccctcgctcgtgatccgttggatctcggccaaaagccggccgtagagcgtccgcagcttccggtaatcgttgatcacgaaatacgtcttgccgtccttttcgatccggctgatgacgttttccggcatccctttctcatagacccattgggagaccagcgcccggctccgcatgtgggcctgctcgatcgtccggcccggctggatccgggtcatctgggtcaggaggccgttgcggatattggcgtcatactcggccttggccgcgtcctcgttcggcagcaggccgagctcgaggatcttcggatccatgatgtaataaagagcgaacaggtcggcccgggcttcctcgaccggggaatggtagttcttgagcgcttcggagctgacgccggggagaagctggcccgagccgtggcccaagacctcgtggaaatcggtgtgaaggttgccggcttgcccgccgtacgtccggctccggtccagttcctcgggcgaggcggtgaattcggggccgaagccggaggccagcgaggactggttataagcataggtgatgttctccagggtcacggacttggagccgtgattgacccggatccagttggcgttgggcaggttgatcccgatgggcgtggacgggtagcagtccccccccagcatggccgcggtgatgaccttggcggccacgcccttgacttcctttttcttgaatttcgggtcgaccggcgagttgtcctcgaaccactgggcgttggccgagatgaggtccgcccgcttggtcgcctccaggtccttgaagttgaccagcgattcccaggtcgctttccgccccagcgggtcgttatagacctcgatgaagccgttgacgaaatcgatccgggagtcgagatcgccgacccagaggatgttgtattcatcgaaatcattcaggtcgccggtccggtagtacttgatcaaagcttcgatcatttgcttctgccggtcgttttcggcgacgccggccgccttttccagccagaaaacgatctccttgatcgccggcccgtacatcccgtcgatcgaggcggcgatctcggcgacccgcccgtccttcttgacgaccttcgtgttcaggccgtaggaaacgggggtttcgtcctttggatcgatgaccttctcgtaataccgctccacctcggcctgggtgactccttcgtagaaattaacggccgattgaaccactaaatcccgcgaggaatcctgggagaccttcttcgcatcgaccgccgggtcgaaaaggatcggctgaaggaaggcgatgaactcgtccagcgactgccccgcggccgccggaaaggccgctccttccgagcccttcaccagcccggcgaaatagtccggctcgatctccggcaggaacttgtccgtcgcgtaatggtgatggatgccgttggaaaaccagacccgcttgacgtaggccatgaacttgtcccagcgcggatcggtccggtcgcctttgtagccctcgacgatcgcgtccagcgttttgcggatcgtcaggttatgccggtagttctggtcaaagacgatgtcccggccgcagagagccgcctccgagaggtaatagaccagctccttctgggacggcgtcagggcttcaaagccggggacttggtagcggaggatcctcaggtcggcgaactggtcgacctgccagcggaattcgggggcggcggccgcgggtccgggctcgctcttcttgcatcccgggactagggccgcggccatgatcaaaacaatcgaaaacaggacgttcgaacgggacatgcgatcctcctcatcggcgaatggaacgggaatgacatcacgggaaagcatatcaaaacgcccgcccccctgacaatcccgcggaagagccggccggcggattttttcccttttccttgatttttttgctaagatatggggcttcagtccacggaacggccttccgacccgcgccggaccgcccctttccgcgaggagaaaccatggacccgtctcccgccggaacccatccccgcccggctcgtctttccgcccgcagcaagctcttccggaccaaatcactggaccaatgcctcgaggattccgagcggcccgaattcaagctgaagcgcactctcgggcccgcccacctgatcctctttggcatcggggccatcatcggggcgggcattttcgccacgatcggcacggccgcggccggcgacgctcatcgccccggcgccgggccggccctgatgatctccttcgtcatcacggccgtggtctgcggcttcaccgccctgtgctacgccgagttcacatccatcgtccccatcgccgggtcggcttacacctattcttacgccaccctgggagaaatcgtcgcctggatcatcggctgggacctgatcatcgagtacgcggtcggaaacatcgccgtggccatatcctgggcgaactatttcaagaccttcctcaagggattccatatcaacgtgccggactggctgtccatggactataggaccgcggccaagatcgtggatgaaaacggggtcaaggtcgtcttccgggacgctccccacgtcttcggcgtgccgatcatcttcaatctcctggccgtggggatcgtcgccgtcatcaccctcatcctcatccggggcatccgggaaagcgcccggttcaacgccgtcatggtcgggatcaaaatcgtcgtcctgaccttcttcatcatcgtcgggttcttctgggtccaaccgtccaactggacgccgttcgcccccaacggctgggccgggatcagcgccggagcggccatcgtctttttcgcctacatcggtttcgacgccgtctccaccgtggccgaggagacgcggaatcccaagcgggacctgcccatcgggatcatcggatccctcctcatctgcaccctgttttacatcgtcgtctcggctgtcttcaccggcctgatttctaccccggacctcaagatgaagctggcctccgagcaggccgagccgctgaccatggccctccagcacgccgccccccgcctcggctgggccgtgggcatcgtcgccttcggctcggtgatcgcccacacggccgtcctcctgatcttccagctgggccaaccccggatcttcttcagcatgtcccgcgacggcctcctcccccggaccttcagccatgtccacaagaaattccggacgccccacaaggcgaccatcctgacgggcgtcttcgtcgccttattcgccgccttcgccagcatcgacgagatggtcgatttgaccaacatcggaacgctgtttgccttcatcctcgtctgcagcgggatcatcgtcctgcggaagaaagacccgggccgtccccggccgttcaaggtgcccggcggatggctctggagcgggatcatgtacgcggccgtggccctcgtcgtgatcctgtttgtccccgcgtccgttccggccaagattcttcttctggccgcggccgcgaccgtcttcgccctcgcccgaaacatcatcttccccctgctcggcgtcctgtcctgcctgtatctgatcttctacctgccgccgacgtcatggctccggttcgccgcttggctcaacttcgggttcgtgatctatgtcgcctatggagccatccacagccggctgatggccgccgacatgaagaaacacagtcccgagcatgaggccttcacggcccgcgtcggaatcattctcctcgtgatgggaaacgccctgctgtttttgacccgcgccttcgacctttttcgggcagcctacgtcaagctggccgatccggccggatggagccggatctccgcggccctggctcaaatgctccacagcgggcaatggacggaggtttcgcttttcctggtcatccccctggccctcaacactctcgtcttgtgcccgctgatcatccggcgggccgccaaggccggcggcttctcaaagaaggataaaaaatcgcgggcggccgggaacgcggccatcgtcatcgccgtcctgagcttgatttacctggccatcgttcttttttaatcctggtctcccagacggtcagaaacgtccgcggcggatcagctcggccggcggacggcgctttttggggccgggggagtcggccgggtagcccagcggagtgaaggcgaccgggacgagttcggaggggaggttgaggacctcgctggcggccttcggatcgaacgccgcgatccagcacgtccccaatccctcgtcggccgcggccaggatgagatgatccatggcgatcgtcgcgtcgacctcggccgagcaccagccgtcgtgccgccgcctccagctttcggccggaagcgcgcaaacggccagaacgaggggcgcctggacgaaccacggccgcccgtagacgcggccaagctcctcttcccggccccgggtaggcacaacgacgatccggaacggctgtcggttgcaggctgacggggcgagacatgcggcttcgagaacacgggcgagcttctcttcctcgacgggacgcgggtcataggcccggacgctgtagcgacggcggatcagatcctgaaagttcatggcgcgttctccctcggctattgcggccagattctcatgtatcgatagagatgggaatggaaaaagatccggagaaaggtcaagacgacgagagcgagggaaaaagcagccggaaaccaccgttctcctttcgccaaataatccgcggccttcggccggaccttgaagaagacgagaaggccggctaaggccgtaagcggatacgccgggaaaatataccggtccgccttgcggtccgagagggaaaaaagaaccgccgcaatcaggaccgacaggagcaggaaccgggcgaatccatcccgcggaaaaggccttttcttcctcaaggacgccgccccgtcgtaaatcaataaaaacgtccacggcgcggcgaaccaaagaatgcgggccgcgtaccaggcgaaattataggccgcgtgaagcgggcggaaggccccgcccaagctccggcctccctggacggcgaaataactcgaccaaaagcccagctgagtcgtttcccggaaccaaacctcgaacaaggcggccgccgccagggcgatcagatggccggcggcgatccaagaaaacgtcttccggttgcgggccgccagcagccagaacaacccggccggaagggagagccaaaccgcgctgactcccttgatcattacggccgaaaccagggccgcagcgaacagccaaccgccccaacgagaatcccgcaggcggaccaagccgtagattccggccaggacggccagggccagaggaggttcctggttggcccggatcaagtactggagaaaggcgggcgtcaggatgacgccccagaccgccccccagcccaggagggaatctccccgtctctcagccagcttgaaaatcaaaaacaggctcgacagcagatatacgaagttcgcccagagagccgcccggtcggccttgacgcccgcttgaatgaagagcgccggaagccagaaaatcccggggggatgctcgaaaaaaagcccctcgttgcccccgtgtccgccccactgcggcgcgcaccattccccgtacggcctccgggccagcttctgcgaaagggagctgtagcaggaggaatccgaatcgcggtattcataagggaagacactgatgatgacaaagagagcggccgccgccggggcgaaaacagcaagacggaaaaaccggccggggctcgtcgccttcatggggatttatcgtcagattaacaaagccgcccgggcatgtcaaagctcccgttccatctcgtattgccgcgcgtagacggcgaatcccgccttttcggccaaagcggccgtcgccgcgtcggccgcttccacattaatgagtttaacgggcgccggcccgccggatacatcgtctagaagacggtccatcaggcgggcggcgatcccccgccgccggaacgccggatcgacggcgatgttcgtcacccagcgcaattccggataataagccgcaaacccgacccatcggccgtcgaggcgcaccccgtggattctcagctcgtcggggatgcgggccagggaggcgaagctgttttcccaggaggggagccaatcggcgaaggcggcggcggggccggccgagccggctccgccgggggatattttttcctcccggctttatccgcggacggcgctctcccgccgtctctcaccagattcccgggatcagccggaacctggtttttttcatgtagtccgcgtatccatcgaggtcccggaggagaacgcgctcctcattcaggatccggatggggaaaagggccgcgatgagcccgaaggggatcaaggcccaaaagcttcccagagctaagggcgtgaataagtagagcagcagaacgccggcatacatgggatggcggacgacggcgtacggcccgctggagatgacgttttgtccggcctcgacctcgacgacccgcaagagaaaacggttctcccgtatcaccaagacgaaaatcccgtatccgagagccaccatgacgtcggcgatgacgaccaggaccagagggacggccgaccaatcccaacgacggtcgaacccgatgatgagaaacgcggcggcgaataagataaagccggcgagggagaattttttctgggttttttccttctccctcgtccgcaggcggcgttccatgacttcgggatcatgcttgaaaaaatagatcccgacgccggccatcggaatgaacaggatcgccaggtaagcccaggcttcccagaagcgcagcgtcccggccggaaggaacagcatgaggcccagaaccgccagggccaggacatacatccttcccagtttcttttttaacgccgggacatcgaccttgttttcgacgcggggagcgttcgatccgctcatgatccgtctccttcccgccgtcatttcggccggagatgatgcgcccggccgttctccccgagggcttggggaaatcccgcccgcgcgttgtccatccccgccttgaaacggccggcgccggccttctcaaacaaaacaaagaccatgaccggcgcggaaagtcaagcgaatcgctcccgggaaaaggatttattttttgtacaggtccccgcccttgtcgtcgtagatgaggaaggcgggaagatccttgacgacgatccggcggaccgcttccatccccaggtcggcgaaatcgatgacttcgctccggatgatgtgctccttagcgatcagggcggccgcgccgccgatcgttccgaggaagaatccgccgtgttcccggcaggcttcgacgaccttgggggaacggtttcccttggccagggtgattttcgaagccccggcggccatgagggccggcaggtaaccgtccatccgctgggccgtggtcgggccgaagctcccggaggccatcccccgcggcgtcttggccggcccggcgtaataaacggggtggttcttgaaatagtcggggaggcggcccgtttccttgaacatcttccagatccgggcgtgggcgatatcccgggcgacgacgagcggcccggacagccggaccatcgttccgaccggcaaggccgacaggtcccggagaatttccgcgatcggccggtccagatcgaccgccgttgctccgggggtcgaaccggagggaatcccctcgaggaacctcccgggatctttctcgagctgctcgataaacagcccttccgcggtgatcttcccccggcagtttcggtcggcgttgcaggaaacgccgatccccaccggacacgagccggcgtgcctcggcaggcggatgaatcgcgcctcgtggaccaggaaacggcctccgaactgggcgcccaggccggtttcctcggcgattttcgccagccgtccctcccattccgcgtcgcggaaggcgattccgcttttctttccccgcgtcggcagggaatccaggaatccggccgaggccagcttgaccgttttcatcgtcatctcgggcgagagtccccctagaacaacggccagccggtagggcgggcaggcggccacgccaagggcccgaacgtgctcggctaggaaagcctcgagcttcttttcctccaggagggccttggactcctggaacaaggccgtcttgttggacgatccgccgcccttagccatgaaatagaaatggtattcctccccctcggacgccaggaggtcgacctgggccggaagattcgtccccgtgttggcttcctcgaaaacggagagcggggcgacgagcgaataccggaggttccgcttccggtaaacgtcccggaggccggacgtcagggcttcttcatcccggccgtcggtcagaacacggtgtcccttgaagccgaccacctgggccgagccggtatcctggcacaggggcagaacgccctcgcccgcgatggccgcgttcctgagaatcgccccggcgacgaagcgctcgttgtccgaggcccgcgggtcgtcgacgatcgcccggatgcgcttcaagaaggccggccgcaggtaaaaggccaggtcggaaaaagcttccgcggccagcagaaccaagcccgcatgatcgacggcgagcgcctcccccccggagcacttcacccggcggacaaaccggtccgaaacccgccggtatcgcgtccggtccggccgctgcgggaaaagcttgaaaggcttgggggcgctcattctcgtctccttattctccatatccttcgagatactcctcgatatcgatcatttcctcgaacccggccgaggatttctgccccaccaggccgacgatgtagtactccttggtccgggaatcgaaacggtattcgtgcagaagccggaagttttcgatctctccggctgttttcacatgagtccgggtcccggtgcagggcatggcgtgccggccgatgcggatgcggttttcgccgcaggcggcgatcggctcgttccgggcgatgacctcgttgaccttgcgctcgagctccttgaggtcgacgttgggccggtggttgaaattgaggacgaatccctgccggacgtcggagtggagcggagggaacgggaaatggtaatcccgtttcaagatcgaacaggtgatgtcttcggccgagtgggccatcagccggtacttgatcgtccggtcgacgatgtccttgatcgcctggggaaacggaccgaaaaccgtcggccgggcgacgatgatctcctcgccgatgccgaacagaacctgggcgttgtagccgagggcttggtaaaccaggtcgaaatgctcgatgatcacccgccggccgtgggtaacggccttgtggatgacctcggccagctcgaacttctggtggaaagccagctcgtagcggacgtcgatgtgaaacgtgtgcccggaaaaggcgtccttgggatcgaagtcgatgagcggcgtcggccggacgttgatcccgtcatcgtcgttggtcagctccaatccggggaagagccccttgatgagggtcgatttcccggagccctccgcccccaggacgccgatcacgagatccgtcggggtgaggtatttctgggacagctcggccgcgaccaggtaaaggcggttccggccgcgcggggcgtaatacgtggcgtagatgagcgtttcccggtgaaccgtccgctgcggactggacttcatcatgtccggcctcctccgcgtcagaacatcaggctcaagagcggcgcgtgctgctgggcgccgtagatgtcggtctcgcccgggtggccggacggaatcggccgcttgagggtgaccttcagggccttggccggctcgaagtaaacgatcttgaggacgtcggcgggccggcagcggtacagtcgggcgattgtggccttggtcacggcgttcgaccgccggaacaggtcatagcctttccggtccttgaaaatgatgtccagggtcagctcgtacgggccgctgtttttcgaccggatgaccttggccacggataatatgctgcgtttcatgggacggctcctcgtctcaaatggtgacgatcttgaccgggaaaggggtccggccggtcaacggcatcaggtggtagaccgaaaattcgaacgtctctcccattctgacatccgaaggcgaaaaaggaaaggccaggttgcccgccgtcgagatccggcccgggtagccgtaatggaggagagtcgagcgggtgatgctgcagagcgaatcggccgcctccggcgtcgatccgacggcctcgatgacgatcccaagctcgtggctccggatcttcgtctcgggctccaaggggcccatgaccccgtccttgccgtagacgtggaactggatgcggccgtcgattttctcagccttgaggatgtcgcggacttggccggtgacggcttccaggatcgcgtcgatctccttgatcatgatgggatcccgcgtgccggcgaccgagatcgtccggaaaccggtccgccgaacgccctcgagcttgacgtaatattcgggcgtcgggacatggcggcttccccgaacctcgacccggccgccgggcagggcggtgaacgtgcaggcggtcagatccagctcgccgccggggcctggaaggtggtagggatcggttttttcgtagagggtgtgggcggccgtggattcgggagtgaacgtccgggccggattgagcgtttccaggatgaaggaatccccgcggagaacgcccagggcgcaatccgcccccgagcccggggtggccgcgatggccgcgcactcgaggatcttgcccatgtggagggccaaaccctcatcgaatccccgcatgaccggaagggcggcgaagaccgccggatcatagcatcgtccggccaggacgacctggcatcccctccggagggcctcttggatcggttcgacgcccatctgggcgacgatgtggagggagtcgtccagcattttttccgtcaggggcgggacgtaggccagggggacgatttcccccttgcgaaggtgtttccggatgcgctccttcggaatgtcggcgtagatgatgcccagggtgaaggtcaacttttcctcccgggcgatttcccggatgatcgcctcgcaccaatcgacatggggacgggcgccgctgccgccggccgtgccgatgaccacggggatgccccgccgcacgccttccctcagcataaaacgaaggtcgcgcttgacgccggaccgattggtgaaggccttcccggctccgagataatacgggccggggtcggtcgagccggcgtcggctccgatcaagtggggtttgcgggccaggccggcccggaacgatttctccggaaagccgtagccgagaatggcggtggcggaaagaacacggaattctttttcacgggaagtcatggttatttcccctcagggcgggcccgaagcaccgccagaatgcgctccatctcgttgcggacgatcataaagccctcgtcgaatcccatcccgggcttggccagcagacgttcggcccgggcggccacggccgcgtggacgcaggcgcgggccgagacgtccgactcgttgcaggtgccgccctggtaggcttccatgccgtgcctccggcagtaaaggacgctctcgatggtgttctggatcccgcccaggtcgggcgtcttgatttggaccatgtcgcagcaggcggcgtcggtgaaatcgcggacgtcttccaaggtgttgcaccactcgtcggccacgatcttgaccgaggagccgcgccggcggagagtctcccggaccttcccgagaagctcaatctgccgggccttttcctcggcgtcgaccggcccttcgatgtacagcgggaactcggccgaatcctcctcgagcgaggcgaggtaatcggccactcgtcccgggtcgagcccgaagatttgtccgatcgtcccgtagacgtcgatatggagggtcggacggtaggagggttcggtccggaacgcgcggatccggtcggccagccagcggatgtacgcccgaagcagctccccgttccgaccgagcttttcgtcgacgttgttgatcagggcgtggggcaggacgtccacgcctttgaggatcatcttgtcggcgttgacgtagcggtcgtccccggtctggccgaagacggggacgcgctcggcgacgaccgggagattgtattcctcgcagatgatctcggccatgagccggtgacggtcgaacgcccgggcttggaggagggcttgggacagtccgtagcggacggcggtatggagccgcacgccgtcgaattccaggttttcgacctccccggccatcgtccggaacggtccgatctcccgcccttcgagcagcggccggatgcgcgtctcgagcaggggcaggtaatccgcggccaggaagagcggatcgcgccctccggctccggaatactgaaccgcggcgcaatcccctccggcgacggctccgttctccaggacgaggagaatggacaagatttctccggccacccgtacggacttgaaatggggcgtggccggctgcccggtgtaaaaaaatccgtcgtggccggccccggccttgatggcccgctggtcgtcgaaatagaaggcggacgacccgggcacgaacagcgttttgacaattttcatttcggcctcccgatcagtttgctcttgctgatggcatagatatcatcggtcaccatctggaaggtgaccgcccggccttcggccttggccctctcggccaggcgttccttgtggaaggccatgatctcgtcggacaagggaagattgcctttggcgaagaggcggataaacccctcgttgtcgcgggccggaagaacccggccgcggttgaagatggacggggcgaacggcacgtccagcaggccgccggcgaacgcccggacgatcccttggatcgggtcgccgcccgaggcgttctccacggcgttcatcaagcaagccacttcctcccggatcaagttcttctcccggcggatgatgtcgttgtcgccgcagattatttggtccgtcagcatggataaaatctggcgggtggttttgaggccggcggcgttggcttccttggtcggaatcccggcggcctcatggggcgacttgacgatgattttttccacgccggccgcggccgcgacgaacgagccgaggctgatgacggcgaacgccttggcctcgtcctcgggaaatccgcccatccactgatgaaaaacgatcgtcaggtcgaaatcggtgaaaccggccttttcgaaatattcgccggccagttcccgcagcgaggagagggcggccaggtcctggagaacgttgccgccctggccgtagccgagagtgatggatttggcgccttgttcgagggccaggagaccctccaggatggccacggtgtgtccgataaacggcggcaggagggttccggtcagcggcccgaacggctcgcggttgatcgagacgccgttttcctcgtaccagccgaccagccggtcgatatagcgccacgcccggagcgagtccccgagctcgactttcttggcgtacgggatgttgtaggaaatgccgccgccctcgaagctggtgaatccgccggccagcgagatctcggccaggagccgggcgtcaggcgtgccatggcggacttggatcggtttggtcacggcttcggtcacccggcggcagccgcccaggccgtggttcaccgccggaaagccgttgagaagggaatggccggcggccgtcgatttctcgatcccgacggccgcttcctcgtaccggttctggcgggtataggcgtcgatcgtcgtcggaagcaggtcggccgtgccctcggtctccaagaagcgcaggagacggatgtgatcatcgatcagagccacgcccgcccggggctggatcaaggtccggcccttggccttggccccgctcatcgcccgggcgaagttcttcgcctcgggaatgtcccgttggtagcggagccctccctccaagtcgacgtccttgccggtcggccaggttgccagaacggatttgcgctgggtcaagaaatccttccaggccatgggttcgtatctcatgcgttcatccttttaaaacacggagtccgccgacggccgtccgggcggcggcgtcgggataatccccggccaggttcgccagcagggggaagagatacccctcatcggcgtaagccgcgggggaaaccggaagcaggggttgggaatcggcgtcggcttggccgggggcgcaggcctccaggagaatcgcggcgttttcggtccgggagagatatcccccggtcccgatcaagcgagtgatccggcggagatccttgccccgctgaacgtgaaagccgccctggggcgtgtaaacccggctgagcgttccggcgtgacggagagcggccgcccggacgcaggcggcggccatcatctcgtcatacgcccgctcggcgccgccttcgggccgcgactccggttgagcggaaacgcggtggatgtacgcgtcgaaatcctcgatcggacggccggcggccgccaggcgcgaggtcaagtacgcccgctcggattcccacaaggcggcggccgagacgcggagtccgaggtcgccctcgaccgtccgcttgagaaggggttcgtgcaggccgcgaagcaggaccgaatcccctccggtgaaggcctccgtgtgggagtagaagtccgtggtcgccccgcccatgtcgacgagaccgaaatcggaccagcccggctgggaggccccgatccggcggacgagctcgaagacggccagcggcgtcggccagggatcgcgaccggtctcgcggacgacggtcgacagtcccttgccgtcgacgatccgcttgaggaagatcttccggatgacttcgcgggccggctcgatctggatcgtcccgacctcgggcatgacgttatcggtggcggccgccgccttgccgtcgagcaaggccaggacccggtcgcggaccttggcgttgccggcatagaggatgaacgcggcggtcgaggaccggcccaggagctccgcgttgcggaggacgacggccgaattgcctccgtcggtgcccccggtgaagaggatgatgtcgggttggagggcttcgaggccggcgatctcgtcggccgcgagctcataggaatacgtccggacgatcttgcctccggccgaatacgcggccatccgggcgatcgaaagagtcaagtcggccgtcagcccgagagccgcgatcttaagaccgcctcgggcggaggaggacaagtaaaccggaaattcctccggccctcggccgccggggccgagtttctcccggacccggccgaaaccgacggccaggttgtcggccgtcgtcggcgtctcggcccgggagagaagccggaaagcccccgcctccagggcgaacagggcgcccttggtgtaggtcgacccgatgtcgatcgaggcgagggccgagggcgtcatggacggctcgcggcggcgatatcggctttcagcatcttgacgacctcggccaggtcgacctgggggcggaagacgcggttgaagcccatgtccaagaacttcttctcgacctcctcatagggcgttttgccgaccacgaggttgccgccgacatagaggagaatgcggtccaggccgcgctcgatgcatttggcccgaaggccttcgcagtcgatttctccgtgaccgtaaagagaggagacgaggatggccgcggcatccgtctcaacggccgcgtcgataaattcctcctggctgaccatcactccgaggttggtcacatgaaaacccgcctcggagaaataggcatccaggatcttgttgccgaccgagtgacagtcggccccgatgacgccgagaacgatattttgcggattcatcagacgctccttttttcctcgtccaggagcgttcgcagccgctcttcgacatgaaggagcgagccccgctcgatttggtaatcgaaggggatgatgatcccgccccgctcggtgaacgcctggagagcgggcaagtgctcccggtttttctgcagggaatacccggccggaacgatgaccgcgtcgagcgcggcgatgaactcgtcgagacgctcgagctgggagatgaagagggttttgacgccggtggaggggatgtcgaacgtccggagatggtccaggatgatcgcctgaaactttctcgattcgctgaggatgccgatccgctgagccggcgtgagccgggccaggctgatgatggacgtccgggtcggggcgacggccacctggacggccttgctccggatttcggggaagcggtcgatcaattcctggtaatgggtggtggtcgtcaaaacgaggtcgaagatctcgagacgggcgcccgccccgggatcctcgaacaagtcgtccaggtcgatccgagccaggttgacgttggggatcaggagaaactggcgctcgaaaatcgttagggtttcgggattgcaatcgatggcggccaccgagagattccgcaggctgtcctcccggcccagcaggcggaggtcaaagaacatccgaatgtcctgggcggaaaacttaaggcgacccagttgatccaatagctcgtcgatcagccggatcgcccggtctttgcgatcctcgaccggagcgaccgcttccccggcgacgaaagatccgcggccggaaaacgcttcgatgagcccgcggcggacgagctcctcgtaggctcttttaaccgttccccgggccgttccgagttcctcggcgagctcgcgctcgggagggagcttgtcgccgggaagaagaacgcggttttttatctgctggtcgaaaaaggagatgatttgctgataagcgggcggagcggaagagcttttgtccagcttcatcttttccatgatttcctccaaatggactaatccaccttataatggcctaatccttctatagaccatttttaccggcatgtcaagaattgctggaaacaccggtcgttccggagtataatattttttatgaagaaaggcggatccgccgcggggcgataccgatccagcccttggcatgcgcttcaattcgaatctccgactcctcttcgggcgagggaaatcctggaagccgccgaatccgccgtctcctcgggccgccttccggcggccgcctcggccaaggaatacctgaacctgacgtcgagccggacgtttcttcaggcgctcggcgaaccggacctgttgaaccgatgggcggagacggtcttcgccttcatccgtctcaccggctacaacctcctcgacttgttcgaaagccggatccgggaacagcctcacaagatccttttccaagacatgtccgcgtccacgcccgtccaatggacctacgaacaggtgggccgccgggtccgggagctcgccggctcattctacgccatgggccaggaggacggagcggagccccgggtggcgatctacgcggaaaacaacgtcgaatgcgcctcggccgatttggcctgcctcctttacgacattctggacacgccgatcaatccccatttcaacatcgacaacttggtcgagatcttcgacgctctgaacatcacgatcgccctcaccgaccggccggaccgccggaaaatcctgggcgaagtccgccgccggacggcccggccgttccggatcttgaccgtggccccggccgggaagccggaaaatgaaaaggacggcgtcctcattgaatatgccaaacgccggccggttcgttccctcgaatcgcttctcgaggcccgccgccgccggccggtcaacgaagtcgccacggtcatgttcacctcgggctcgaccgggcggccgaaaggcgtgtccttttcttcctaccacctggtctccaagcgcttcgcccgggcggcggccctgcccgacgtcggcgacgacgaggtcttcctgagctttcttcccctctttcacacgttcggccgttacctggagcttctcggcatgatcttctggagggggacatacgtcttcgccgggaatccctcggccgacacgctgttcaccctcttccccaaggtcaatccgacgggattcatcagcgtccccgtccgctgggcccagctctacgagaggtgcctggaaaagctggacgagacctccggcgccgaccggaagagcgtcatccgctcggttgtcggccagcggctccgctggggcctgtccgccgccggttacctggatccgagagtcttccggtttttcgaacaggagggcatcaacctttcgagcgggttcggcatgaccgagggcaccggaggaatcaccatgacttctcccggccggtacgtcgacaacacccacgggctgccgcttccgggcgtccgcctccgcctcggccgagacagcgagctcgaggcctccggccattacatcgccccttacctggaagcggccgcgccggaaagcctcatccccttcccggaaaatccggagaccgactactggcttcagaccggcgacatcttccggcggctgtccaacggctattaccaaatcatcgaccggatcaaggacatttataaaaacaaccggggccagacgatcgctccccgcaaggtcgaggataaattcatcggcgtccccggcatcaagcggacgtttctcgtcggagacgggcggcccaccaacgtgctgttcatcgttcccgaccgcagcgacaccgtcctggcctcggccttggtccaggataacggccgggaatattaccggcggatcgtcaccgcggccaacgccgacctggctccttacgaacgggtcatcaatttcgccgtcctcgaccgcgatttcgacgccgcctggggcgaggtgactcccaagggttccttcaaccggaagcggatcgaggagaatttttccggccggatcgaggagctctaccgcaaaccttatcttgagctggccggccccggcggaaccgtccgcatcccgctgtggttcttccgcgacttgggcatcctggaggacgaaatcacgcgcgacgcccgcggcctccgcgaccggaaccggaagctccgcctgccgttgcggccgacggcccggccgaaagtctggctggtgggcgatctggaatacgaaatccaggggacggtcgtcgatttaggcttgttcgcccgccagccgattctttgggccggcaatcccgccttgatccgcttttccccctgcaaggaaggctgggacctgccgctggagccggcgacggaccgcgtcttccttcccgaccggcgcgtccgtctcgccccgacggaggatatcgcccagccgtccaatatccggaacactcccctcctccgcctcaatgaaatcctcgtccggatcctattttccggacggaagccgctcgacggccttctcgacgagctggaaaagcttttccaggagccggatctccgaaccacgaacctcatccgcagccgtctccgggcccttgccggccatccggccgaagacgtccgctgctgggcctaccgcctccttctcctcgacaatccaaacgtcgattacagccggcttctgccggccttcgtccagtcgggcaagccgttcctcaatgcccggagcatcgagggaatcgtctcggcccggccgggcaaaagccgcctggattcactccgccggcggatgatcgcctaccgggaaacgatgacctggccggccaatccggtcacccgactccaattcgaccgcatcctccggctgctggcgaacctgacccgggttcacccggaattcttcggctccatccgggcggagctggcggcctgggctcttcatacggccgatccagggctggccgcctcggccgaaaagctcctggccaagctcacacacgggatcgaaaaagacggcaagaaagccgccttcggcgtcttgagaaaagaagaccggctggttttcgaggaagggctcggtcccgccgagatccgccggttgaaaacgcttctcctcgggacgacgttcctccacgagtccatccggttcgccttcggcccggatgatttcaacccgagggacatcccggccgccggcatttggatttcccgggcccattccgtctcctccttccccgattaccggatcagcctgaatacgacctccagccgccattatgacctgaagcttttcctcaaagggcggccgtggtcggaccgcgaatggcggacgattctctggtcggccttcctggccgaccacccggaggagacggcggccatggctccccttggggcaatccggcttggggaaggcgccgtctcccggagatacatcggcgacctgaccctctgggaaaagatccgtgaatacgccggccgccgggcggcgggcgcgcctccgcccgaactggcggtttggcggaagctctacattgaagcgatgtccgtcttcttccgggcctggaaaatgaccggccgccggatcgtgccgggccccgtttcccccctcaacgccatcgtcccggaaatcgagtaccgggacgcgacgatcatcgcttctctcgactcccggacgccgtaccggaacactctgtcgattgtccgtccgctcgtcgaccgcttttaccgtcggacggccgccgattatccttggatccgggagcaaacggacttggaatggattttcgacgcctgctacaacgccctgggccgtgatgaagcggcggcctttttcgtcgaacttcaaaacgacctcggcggggggaagcccgcctcaccggagctggccggcctgcgccggctgctggccgagtaccgcgcccggttcgaaaaaagctaccgaatcccgctggccgggctcaacgccgtccgggcctttcaggaatgggaggcggccaatccgaaggccgactcccgggaccgggaacgaaaggtcctcgatcttcaccggaaatacgacctgggccgcttcccggagatcgtccgctaccatctctaccgccacacctatttcgccgggcggagcttgaaggaggaggagctgttcgaccggctcctggccttgatgtcggagaatcccaaggccccggccgtccggcacgtcgagctgtccgatctccaagccgccttgaacgacgagagggaccgggccgtcttcagccggatgatttttccccatctcgagccggaccgccgtctcgacgtcgtcgtcgagggcgaagagggggcggagcggatcgtcgtccggagctttcttgtcgaccgccggggcgaaacgtacgccttcagcgaaacaaccgacccggccgacatcggccgcctctatcggctcttctacaaggagaatttccccaaggtcatttcccaacaagaccggcatttcatcctccaagaccgccagaaccgcatcgtcggaggattgtgctaccgggtcatgtcccggtccgtcgttttcatcgatgcggtcgtcatcacgtcccggctgaagtcaagcggcttgggcggagccgtggtggacgatttttgcgggcggatggccggccagggatacacgacggtcctgacccatttctaccttcccggctttttcctccgccggggattccgcctggacaagaaatggggggccctggccaagtcgatcggctaggattcgaaattcccggcggcttccggctggtagaggactttcttgatcttgaatttacggagtccgcccggcaccttccactcgacgacgtcgcccttgcgaaatccgagcagagcggttcccagggggaccaggaccgagatttttcccacgctgaaatcagccgccagcggaaaaacgagcgtgtattccttttcctcgcccgtcgcgacgtcctggataaggacccgcgagttcacggtgacgacgttcgggtcgatttctttcggatcgacgacgacagcccgatcaagctcggcccggagctcctggaaagcgtttttatcgagatccgagggatccggatcgacggaagtcaacgccttcaaccggtcatagtcggtttgggtcagggtgatggtcttggccatgggagactccttcgcctttttttcgtgattggatgacaggtggacccgctgtcaatggcaatataagtcaagacagggaattatgcaagccgaacggctcgtggtagaatcgggaacaatgaagagcaagagagcgaaatcaagaccgcccgccctccagggccaggttcaaatctacaccggtgacggaaaaggaaaaaccacggcggccctgggcctggcccttcgagccgccggccgcggctaccgcacgtatttcggccagttcatgaaagcccggtcctcgggagagcgggccgccgcccggcggctcggcggcttgatcacgtttgcgaccttcggccgtcccggcttgatccggaccgccggccggccggatccggaagacgtccggcgggcgcgccgagggctggacctctgccggaaggcgatgctttccggccggtatgacatcgtcgtcctggatgaaatcaacgtcgcccttcacttcggcctcctcggcctgccggacgtcctggcccttctcgacgagaaacctccgtccgtcgagctcgttttgaccgggcgccgggctccggaagcgctcatccggcgggccggcctcgtcaccgagatgaaggaaatcaagcattatttccaggccggcgtccccgcccgccacggcatcgaggattgattccccggccgcgaaacaaagaaaattccatggattccctctataaaagaggcggattcgcggccgaaatcatggaccagtccaaaacattgacttttcaggcgcggaaaggcaaaatacgccttccaaccccttgttttataaacatttaataatcgacaagggaattgccgtatggaggattcatccatgaccctgctcgagagtctcaaggaaaaagcgaaggcgacgccccgccgcatcgtccttcccgaaggcgaggagccccggacgattaaggcggccgcccagatcgccaaagaacagctcgcccaagtcactctggttggcaaccgggcgaagatcgaggccgtggccaaagaacaaggcgtcgacgtctccgggatcccctcggtcgatccggcggcgtccccgaagttcgaggaatacgtccaggcttattatgagatccggaaagccaagggaatgactcccgaggaagcccgcaagctcatgtccgacccggtctatttcgggacgatgatgctccacaagggcgaagcggacggcctcgtctcgggcgtggtccactcgaccggcgaaaccatccggccggccctccaaatcatccggaccaagccggggatcaacatcgtctccagttcgttcgtcatgatcgtccctgactgctcctacggcgacaacggcatgttcgtcttcgccgactgcgccgtcatgcccgccccatccgacgtcgagctggcccaaatcgccgtcgcctcggccgagaccgcccgggttctctgcggaatggatccgaaggtggccatgctatccttctcgacctacggcagcgccaagcacgagctcgtggacaaagtcaagaaggccgtggccgtcgccaaggagctcgcccccggcctgaagatcgacggagaaatgcaggccgacgcggccattatcccgaaaatcggaaaggccaaggcgccgaactcggcgatcgccggccaggccaacgttctcgttttccccgacctccagtcgggcaatatcgcctacaagctcgtcgagcggctggccaaggcccaggccgtcggaccgattcttcagggcatcgccaagccggtcaacgacctgtcccgcggctgctccgtcgacgacatcgtccatctcacggccatcaccgccgtccaggccgccggcctgtaagcggtcaagaatagatcgaacgcgtcacataggagaattccatgatcgttctctccctcaactgcggcagctcctcggccaagtaccgtctgtacgattacgacaagaaggtcaccctggccaccggcatcgtcgagcgcgtcggcatcggcaaaagcttcattcagcaggccggtctcggccgcgcgccgatccagatcgaccacgactgcgccaaccacaaggacgccctcaagctcatcatcgacacgctgctcgacccgaaggtcggcgtgctcgatgacctgaagaagatctcggccgtcggccaccgggtcgtccacggaggcgaaaagttcaaaaaatccgtcatcatcgacgccgcctccctcgacacattcaaggctctctacagcttggcccctcttcacaatccgcccaacgttctgggcatcgaggcagccatggacgtccttccgtccattccccacatggccatcatggacacggcctggcaccaaaccatgccggcccacgcctacatgtacgccctgccctacgagtggtacgagaagtacggcgtccgccgctacggcttccacggcacatcgtttctctacgtggccaagcgggccgccctgctgctgggcaaggatcccttcaagaccaatctcatctgcctccatatcggcaacggcgtctcggccaacgccatcaagaacggcgtgtcgtatgacacctcgatgggcctgacgcctctggaagggctggtcatgggcacccgcgccggcgaccacgacgcggccatcgacctcatgatgatggagaaggagaacatcgcaccggccaagatgaacgacctgttgaacaagaagtcgggtcttctgggcatcacgggcaaatacaccgaccgccgcgatgtccagaaagcggccgaggccggcgaggctcgggccgccctggccatcgagatggagtcctaccggatcaagaaatacatcggggcctacctggccgccatcggcggggccgacgccattgtgttcacggccggcgtcggcgaaatgtccgacctcatccgggaaaaatctctcgacggcctcgaattcctcggcatcaagctggacaaggcgaaaaacaagctggccaaaacgagaaacgccgaaaccgagatttcggccgaagactccaaggtcaagattttcgtcatccccaccgacgaggaacgggtcttcatcgaggacgtcatcgccctgctccaggggacgtacgacgaacacacccggttcacttaccggttccagcatcccgactacgtcaattcccagcgggagcaggatttcgcggccgattgcgcgaaaaaacccggcttggataaaatccaggtcaagccgaaaaaataaaaatccggtttccccgcgctcgtcccaagccccgtccctccgcggacggggctttttttaggaaggaccggggcattctctttttccaaagaagcggaaaagggtgattttacggcgggacttttgatatgatgaagggcaacggcctggtctcggccggggagaaggatcacatgaaagccgcctttttgaccgccccgcggaaagtcgaaatccgcgacgtcccgaaacccctcctcaagaacgacgacgatgtgcttcttcgaacggcgctcgccggcctgtgcggcagcgatcttcactatttcacggcggaccgcatcgggggcgaagcggtcccctatccggcggtcgtcggccacgagtgctcagccttcgtcgaggccgtcgggccgtcggttaaacagttcaaagccggcgaccgggtggccgtggagccgtcgatctcctgcggaacgtgcgaccaatgccgggccgggcggccccacacgtgccggcatgtctcttttctcggccaccccggcgagcggagcggctgcctggcggaatatttcgtcatgcccgaacgcaatcttttgtccgtgcccgagacgctgacgatgacggaagcgatgctggtcgagccgttgtcgatcgccctccacgcccgggccctggccgtcggaacgctcgggccgtcgatcggagtgctgggaacgggaccgatcggccttttactcgtccaggttctcaaaaccgagggccacggggacatctttgccaccgaccgctccgacgcccggattgcggccgcgctcaaagccggcgccgcctggggcggcaatcccgaccgcctcgacgtcgtctcggagattttcaagcggaaaccgctcgggctggacgccgtcttcgaagcgtccggcgacccggcggcgatcgaacaggccgtcgagctggtcaagcccggcggctggatctaccagattggaatccccccggacgaacggatttcctacctttcggcccggctgcggcgcaaggagatcggcctccggttcctccggcggcagaaccggtgcgtgaatcagggactgatgctcgtcaaggccaagcacctggacatcgactggctggccacccacaccttcaagatcgaggaggcggaaaaagccttcgccacagccgccgaccggaccgacggcgtcctcaaggccacgatcgtcttttaacgccccgggcggcacccaacctcattctcccgctggcgccgcggacctcttcttcatgttcccggccgcgaaggatatcagtccccgtatttctcgaagagcgcttcgaagcgcggatccccccgcagcgggcgccagaccgggtttgctttcagccagggcgcgctgacccagcccggccgggagaggaggaactcgagctgctcgacggccttctccgtgtccccgagcaacgtgtaaatgtgcgctaagtcgatgacatgggatgcgccatagacggcgtctttcgacatcggcagcagttcgacgccgcgttgtccttcgcgcaccgcctcctcccgcaggcccagcccggcgtaggcaacgcccagggagctgtgatagcggccgtcctcgggaacggccaggacttcgcgctcgagcagccggcgggccgcctcaaatcctttccgggcgaccgccgtatccccggaagcggcatagagctccgccgccaggagcgctttgggaagcgcctgaatcttgttgcgaatccattcctcgggcttcgcttccatgcggccgatggcctcggcgctccgcccctcgaacgcctcctgatagaaccaggcccagtcggcccattcatggtctttcgggacgccttccagcgcggtccgcgcgtcggccaacccgtcgcggcctttccagctccagagcacgaacgccttcgcgaggtacgaccaggcctggtccggggcgagctcgatcgcgcggtcggccccatcgaccgcctcggggtagaggcgcatacaccagcaggtttgagcgacctcgatcatcgcggaaccgtcgcgcgggctcagcgcggcggccgcctggaaggtctcgagcgccttcggccagtccccatgcaggcggtagagctcgcccttggcgctcagcacctcgacgctgctgggcattccgcgcgaggccgcctcgaactcggccagggcagccgccgggtcgcgctccacccagaggcggtagtagccggcggccaggcggacctcgggggcgtccggcgccagcccgcgggcgtggtcgagcgccttctggctccgctcgcgccgctcgggcgtgatgtcgtagcggagatacacgaggcgcgcgttcgctctcgtcagctcggcccaggcgagggcaaaatcgggatcaagggccacggcccgctcgaagtcgtcgaccgcggcgagccaggtggccagcgtgaagtggggctgccggacgaggaagcggccgcgcaggaacgcctggtaggcgtcgagattcccggtcggccggcccgcccgcgcgccgcgctcgtcgtcgaggagcgcgacgccgaggtgggagacgacctcgccggcgatccgggattggacgctgaaaatgtcgtccatgtcgaattcgtagacgtcggaccagaggctggtgtcgtcggccgagcggatcagctgcggcgtgatgcgaaccctctcgcccgccgccggcccgcgcgcccagcggaccgtgcccgtgagcaggtagctcacgccgagctcgcccgcgatctcccgcgtgctcttggcgctcccggcgtactggaaggcgctcgcgcgcgacacgaccgacacgctccgcagcgcggcgagccggccggtgatctcgtcggtcacgccgacggcgaagtaggcgtcgtcgctcccgcccaagttttcaaagggcaggaccgcgatcctctccccggccgccggtccggccgccccccgccgggtcgcgccggttctccggacgctgaagatcacggcgccggccgccaagagcaggacggccagcgtgaccgccgccgtccgcagccgacgcccctttccgacgggtttccggccgacggcgcgcgccgccggcttggcgacctcccgcaggctgaaggcgaggtcgctcgccgactggaagcgctcggacgggtccttctccaggcagtggccgatgacgcaatccagctccgcagggacctcccccctcgagagggtcacctccgggaccggctccttcaggatggccgtcatcgtctcggtcgccgtgtcccgtttgaaggcgcgcctcccggtcagcatctcgaacaggatgcagccgagcgcgaagacgtcggagcgcgcgtcggcgggctcgccccgcacctgctccggcgccatgtagccgaccgtgcccaggatcgtccccggcgtcgtgccggagggcgtgagcgacagcgtttcgagcaccccgcccggcccggcgccggtccgggccaggccgaagtccaggatcttcgcccgcccgtcgcgcgtcaggaagacgttttcgggtttcaggtcgcggtggacgacgccggcggagtgggccgaagcgaggccctcggccaaggccgtcgcgatctcgacggcccgacgccacggcagcgcctcgcgtcccaggcgatccctgagcgtcgcgccctcgaggagctcggtcaccacataggcggtctcgccctccttgccgaagtcgaagatcgacagaatcgccggatgagagagatgggccagggccttggcctcccgttcgaatcgggccagacgcttggggtcgcgagcgaccgcctcgggcaacaccttgaccgcgacgtcccggtccaggcgcgcgtcgcgcgcccggtagacctcgcccatccccccggcgcccagcggggcgagcacctcgtacggcccgagccgtgatccgcgcgtcagcgccatgggccgaaccccttctatggataggaatttcgtttttcgactgcccccgcgacaatccccgttttgtcgcgaaatcccatctttcccactgaaatgaggataatttagagcaccaggcctgtcaagcccaattgaaggcgggctgttatggatcagcgaatgcgcatgactcggaatgagccgaaaatccgccagaattctctctcgtctctatcagggacttaagtcggcgatttaaaaccccagatgctccgtccggcggatgatctcgttctgaaggtccaccgagcaatccaggaagtagtcgctgtagccggccacccggacgatcaggtcgcggtacttctcgggatgggcctgggcgtcgcggagcgtttcggccgtgaccacgttgaactggacgtggtgggcgtccatcttgaagtacgaccggacgagatggccgagattccggagaccctccgcatcggccaggagctggggcgtgaacttctggttaaggagcgttccgcccgtccggatgtggtcgatcttggccgcggacttcaggacggcggtcgggcccttgcgatcggcgccctggacgggcgagatgccctcgctcagggcctcccccgacttccgcccgtcgggcatcgccccggtgaccttgccgaaatacacgtggaccgtggtcgggagcatgttgatccggtagcgcccgcccggcttcgtcgtcggccggtcgtcgatcgcggcgaaataggcctcgaatgccgcccgggtgagtccgtcggcgtaatcgtcgtcgttgccgtacttttaaataccgcataccttttgtcctctccacttctgcggggtttacacggatttccttacactctcgtcgttggtttcagggaaaggacatcatttgaaatccgccttcaggtccgctggaaagcctgcgcttcacttccgacccgcccactctttcagcagttccaggtattcgggaaggacccggggccactccatggcgtccggagacgaggtcagcggatcgacggccttcttcatgacatggttggccttggcaaagatccggatctgaatgttcgggcggttcagcctttcgagttgacgcctgttttcagcggcgtcgatgaacatgtctttttctcccaggatgaccagagtgtcgacggaaagccgattccaaaatgaatagagatccgtcaccctatccttccagtaaaaccctgaaaaggcctccggcgtgatgtggacccggtcatgcaggctcgtttggttcatgaaggagtgtttggcggcattgtccaggatgaaccgttccacctctctcgccgatttcccccgacggatcatccgggccacctcgttatggctgtcctccaggatgcggacctctcggtccgaatagcccagtcgccgaagccgcaggccgtcctggtagatggaggattgaagcacgcaagtgacttccggagagacggcgattaaaaacgccgggatcggcgacttggaggcgatgataggaagcaggagcgccccctgactgatgcccatcagcccgatccgccttttatccacccgggcctggcggctcagctcgtcgaggcaagccgcggcatcatcggcgaaatccgaataagcggcggaatggtatgcgccgttggatttcccgcttccccgtttatcaaaaacaagggaggccacaccctgacgggcaaaaaaatcagcatagaaagccatgtctcccttttcccgcgatagcgatccgggtaacaagatcaatcccgggcagagagtttgtttttcagggagatacagatgggcatcgagtttgattccgtggctggggatagtcaggtgtttgatgaggtaggggggaatggggggagagtcggatattcgggtcagttggaaaggaatgtccagccgttccaaatcaggcaaggcccctccggtttcgattttcacttgacctttgagggcgtcctttttcaggattccggaaaaggaaaagggaaaatccaggtcccggtatatgaaggtcacggcgctatcggttcgttggataaattccaggggggcgtcgaaaatggtcagttccgggatgcttagtgttcccgcggcgcctttaaaccggatggccaggggggtggcttggttatggagttccatggccccctcccaatatccgcccatttcgccggtttgcccgggaagagtcaacgaaaggacgatcgtagccgccgtttcaagcaggatctttttcatattcaactcctaagcgcggatggtacgatagactgaaaagtcgtcagatggaatgggacattggtcccgaaaaactgaacgggaccttggtcccgcttgtccctttcttcaggaaggggcgtttcccggtcaaaagaatgatatgatggggctggatggatatgccgcagactcaaccctttatggtcctgctcgtgtatggcttgttcctgttgatttctgcggtccaggtcttttattcctacaggatccggaaacggttctcctttcgcttcgtccggatgtttttcttctttgtcgtggcttataccgcattcaatttcctcaatctcagttcaaagattctttacgtttccgttttttcggaaaaagaggggctgtttacccttttggccgcgctgtttctctatcccctgatggcggcggtctttttttcctttttgctcctggccgactccctgggaccgcggcctataccccaatgggtgaggtccctgttctggatcgggcacggggccgtttttatcctcctttttctgtctgtcctcgccattgtcgacacgggattcaccgatatcagccgaatgagcgttcgtatgtttatcgtgatttcttccctttccctgatatgtccggcgctctggatgggcctgcagaaacgggcgggacgggacgagaagaccctcgccatcggtcggatactgggattttattttctcgccgctttcgccctgttaaccctgttgatcgatttgttccatttccccttccggttctttggaaccctatcccacgcctattatttcatttctatgctgatggttgcggtgcccgttcccgccctggtctttctgtccggccggttgaaaaaaaattggatttcgcatccggatgacggggaaacgccgccccgtccgaagaaacggctcgagggcttgcctctcactccgagagaattggatatcatcaatttggtgcttgagggaaagaccaatcaggagattggccgaactctgtttatctccaccaaaacggttaaaaacaatttgaccgagattttcaggaagttggaactgaaaaaccgggtccaattggtttcgtttctgttgagcggcacggattctctgaattcgtcttcctccccgaaatctgatatttagtacccgttttacttacggcgcacgggcgcgacatgcggaggagcgtcatccatgagcatgaattccttcggtaaatccgttctcgttctgagcctgctgatgatcctgagcgtttcggcctgtcggaaagccgaatctccggcgcccccagtcgccgaatccgcgaaaagcgaggtctccaatggataggaatttcgtttttcgactgcccccgcgacaatccccgttttgtcgcgaaatcccatctttcccactgaaatgaggataattaagagcacaaggcctgtcaagcccaattgaaggcgggctgttatggatcagcgaatgcgcatgactcggaatgagccgaaaatccgccagaagtcccctttataagggaacacattacgaaaaataatcaaccgaagggtcggcgcttcagaatcccaggtgctccgtccggcggatgatctcgttttgcaggtcgaccgagcaatccaggaagtaatcgctgtagccggcgacccggacgatcagatcgcggtatttttcaggatgggcctgggcgtcgcggagggtttcggccgtgacgacgttgaactggacatggtgggcgtccatcgtgaagtacgcccggacaagatgccccagattgcggagaccttcctcgtcggccagaagctgcggcgtgaacttctgattgagcagcgttccccccgtccggatatgatcgatcttggccgcggatttcaagacggccgtcggacccttgcggtcggaaccctggaccggggaaatgccctcgctcaggctttcccccgctttccgcccgtcgggcgtcgctccggtgaccttgccgaagtagacatgaacggtggtcgggagaaggttgatccggtaagagccgcccttcgtgttgggccggccgtcgacggccgcaaaatacgcctcaaagacccgccgggcgtggtcgtcggccgtgtcatcgtcgttgccgtatttgggcgttttattgagaagccgctggcgcagatcctcggccccggcgaagtcggcgtccagggcggcgatcagatttttcatcgtaacgattttcttttcgaagacgttgtgcttgagcgaggccagcatgtcggtgatggatccgagcccgacgccctggatgtagcaggtgttgtaacgggctccgccggcgtggtagtcccgcccccggcggaggcaatcgtcgatcaggatcgaaagaaacggcgcgggcagaagagtcgcgtacaaccgctcgatgaccgcgttgccggcgatcttgacgtcgatgaaatgacggagctgggcttggaaggcgctgaagaggtcgtcgaacgtctggaatcccgccggatcgccggtccgggggccgagctgttttcccgtccggggatcgaagccgtctcggagggccacctccaggaccttgggcatgttgaagtatcccgtcagggtgtaattttccttgccgaaggcgcctgattcgacgcagcccgaagcaccgccgtttcgggcgtcctcgacggattttccttgccggaccagctcttggacgatggcgtccgtgttgaacagggacggctggccgaagccggttttcacgattttcagggcccggaggaggaacttctccggacttttcttggagatttggaccatggagctcggctggaggagccgcatttcctcgatgacgtcgaggagaagatacgtaagctcgttgaccgcgtcggagccgtcggctttcaccccgcccaggttgatcagggcgaagtccgtgtacgtcccgctctcctcggccgttacgccgaccttgggcggagccggctggttgttgaacttgatccagaagcactggagaagctcccgggcggattcctccgtcaacgtttcctcctccaggcctttccggtagaacggataaagatgctggtcgaggcggccgggattaaaggagtcccaggtgttgtattccgtgatcactcccaggtggacgaaccagtacatctggagggcttcctggaaatcccgaggagcgcgggccgggacgcggtcacagacttcggcgatccggagaagctcttttttccgggccgcgttcccctcccgggcggccagctcccgggctttctcggcgtgccgccggccttggatgatcagggcctcggcggagattcgcatcgcccgcagttcttcccgcttgtcataggccagcggatcggcgagaaaatccagccgggccgtttcggcgtcgatctcggcaatgaagtcctccatcccctttttgtaaattttgtcgtcgaggacggtatgaccgggagccctctgttccatgaactcggtgaagatccccgcggcgtaggcgtccttccaagcgggggggagaacctccatcatccggtcgcggatggaccggccgcgccagaacgggatgatttccttctcatacaaaaggatgaccgagggatcgcatttgaagaaggttttagggcgggagtcgaggatccgaagatcctcgacgctgtggcaattgacctcgggatacgtcggcgtggccttgggggctggaccgcgttcgccgacgatcaactcgccgtcttcaaggcagacggtcttttcagccatgatccgcttgaaggccagggcatgggccacggccggcgaacaccggcccgcctcggggctccgataaaaggacgtgagaagggcggcccgctctccggaaatcgaaggaaccgccgccaggctcctctcccgcagctttttcacccgctcggtcatcacgatcaacctccgatggaaacgttgaatccggcctcggcgaacgcccgccggatgtcctccatccgcccatcggaaggaggctcgaaaatctcgaagtccgccgcccggccgaggttccggtatttctcttctccgccccggtgatacttcagcaagtcgacgcggcggacggaggccagggttttcaggaaacggatcgaggcgtcgatgttctcctcgccgtcattaaccccggccgccaggggaatccggacccggacggcccggccgcgccggttgagccggcgcagattctccaagatgcgggcgtttcccgttttcacaaaacggcgatggaccgcctcatccatggtcttcaaatcatagagaataaggtcggccagatccgcggcccggtccagaatgtccccctccaccgccccggaggtatcgagagccgcggccaatccgcgaactttcaaggcttccagcagggccaaggagaactccggctgggccagcggttcgccgccggaaagagtcactcccccgcccgacgactcgaaaaatacgcggtcgcgttccgcctcggcgacgagatcggcgaccgtcgtttgacggccggcgatttccagggcgccgtaagcgcaggcgtcgacgcatgctccgcagcggtcgcagagggaacgatcgacggtcacgggatctccgtccgccccgggcgacaaggcgtttttcggacatgccttgacgcaggcgtgacaacgcgcgcaccgggccgaccggaggagaagctccggacgccggtcgatgccttccggattgtggcaccagagacaatgaagcgggcatcccttgaaaaagatcgtcgtccggatgccgggaccgtcatgcacggcaaaacgcttgatatcgaaaatgaatccttttatggattcattcggaactaagttttttttaggggccatgatgttttctaattactgtatttacaacaagttatcctttcttatatctaatatatcacttggtgaatatttagtcaaccctaaaaaatgatttttttctttcttgtccggatgatttgcgagtcaataaaaccgcggagggcgaagccgtgtcaatcccgcggctgactccccgccgcaaaatagacgcgttcctatcggcccgtgaataagctagattttctccccgcagaacggacaaatccgccattcgggccgggtttcctttccgcaccgggagcaggccgccggcttggccggcatgataaggggcggagactcggcggacggattccccggagcggccggctcgggctcggcgggcggggccgacggcggcccttcccgcttgacggatttgcttgagcggacgatcgcgtagacgatcaagccgagaaggtgggtgaaaaacacgaggacggcccacaggatccccggcattcccctccgttccgcgtcgccgtgaacccaaacggcgaccatgatccagagaaccaggaaaaagaggccgaagaagccggtgaggccaaaccacggccagaaccaggtcccgccccagtgccgaaggccgtggccgaatccttcaacgattcccagggggatcaggatcagcgcccgaagaaggccggcggccatgaggaccgccaggatgacgagaacgatgcccaaggttttcgccgaagacgagttcatttgttttctcccatctccttaaacgaaaaggggctggaaaagttcacttcaggacgagagcctcaatgaagaattccatcatccgctcccggttgagggccgtgtgcccctcatcgggcccgatctggacatcgaagcttttccccgcatcttggagggccttgatcaggagcatggcattggttgggtggacgttgttgtcggccgttccataatagatcatgagccggcctttcagatcgttcacatagcgcatcgcctcgcccgcctcgtagcccgccttgttctcctcgggaagccccatgaaccgctccgtgtagatgctgtcgtactgaagccacgtcgtgacggccgacatggcgcaggccgcggcgaagacctccggatgccggaggagggccatcgccgagacatatccgccataggacgtcccgaagatgccgacccggcttccgtccacgtacggccgggcgcggagggcggcgaccccggcggcctggtcatcgacctcgacgatgcccagcttgccgtaaacggcgtccagggcgcgccggcctctccccccggccgtccgcgaatccaaggaagccaccaggaagccgagctcggccagggcgctcggcgcggcgaatgtctcccgggcgccgttggtttccgggccggcgtacacgctcaccagaagcgggtatttcttcgagggatcgaagcgcgagggaaaaaataacaggccgcggagcggcgtcgttccgtcggccgcggcgaacgtgaacagctcggccttcttaagcccgagctcgtcgaacttcgccgtctcgctccggacaagatcggccacgatcctcccccgggcgtcaaccaggcggctgaacggcgggacatcgtgggcctggcaggtgtcgatgaagtgccggccgtccggcgaaaagtccacggtatgatggtaagcaggatccgtcagccggacgtcgttccggccgtcgagtgaaacccggtggagctggagcatcatttcgttggccccgtcgcgggccagataggcaaggctgtttctcttctcgtcgatccggacgattccggccgcctcgaaaggatgccgggtcaggacggcgagccgcgttcccgacaaatcatacaagtcgtaatttttaaaaccggtccgggccgaggcccagacgaaacgccggccgtccttcagccaggccagctcgggagcgatgtcgacccagccggaaggccattcctcgcggatgatcgtccggcattttcccgtgaccggatcggcggccgcgaattccaagacgttctggaggcggttcatccggaagaaaagaagctcccgggaatcgaccgaccaggagacgttgtagacataatggccgacgacgtcgttttcgaacggccggccgtcgcggacgtcgatcaccgtggtttttttcgccgccggctcatagacaagaacgtcgacgacgggattaggccggccggccttgggataagcctcgacgtcggcccgggaatagggccgggtctgatccgcctggaggacataatcggggacccggctctcgtcgaagcggtaaaacgccagcttggtggaatcgggcgaccaccacatggccgtgatctggttcagctcctcgccgtacacccagctggccgagccgcacttcgtccggagcttttcgtcgccgttggtcgtcacggcctgttcgttctttccgtccggatcggaaatccagaggtttcggtcacggtaaaaagccttggttttcccgtcgggcgaaagagcctcggtgaattgacggcctcgctccaggccgccgggccggcggcggaccggttcctcggctttttcaggggcggggccgagctcggtcagcgttttccggcggatgtcgaagcgaagccttttcccgccgcgggtgaatgtaaaagccttgccgccgtcctcccaggccgcccggacggttcccggtttgaccgctcccttgatctggtccttgatttccgcataccggtcatagccgggatacgttttgagccggtcctgggccggagccgggccggcggcccaaaaagccagcagaacgatcaggaatcggacgggcgcgggcactctcatggacaactcctccgacggcggccggcaaccgcggccgttcgtcacttcgctgaaaatttgaagaccgtcatcgtccggtacgtctctcccggccgcaggacggtcgatggaaattccggacgattgggggaatccggaaaatgctgggtttccaggcagaaaccccagtgcttcccgtacacccggccggccttcccggcgatcgatccatcgagaaaatttccggaataaaactggagtcccggttcgacggtccggatctccatcacccggccgctctccggctcaaagacccgggcggccgaggccagggtcttccccccggaattcaggacataattgtgatcgtacccgcccggaaccgcggcgatccgggatccgatggacacggaggtccggaaatccatcggcgtgttttccaccggcgcgagaagaccggtcgggatcagctcggcatcgacgggagtgtagcggtcggcggccagctcaagctcgtgcccgagaacgtcgcgccgccccccggtgaggttgaaatagccgtggtgggtcaggttgatgacggtcggcttgtcggtcttcgccacataagtaatgatcagctcgccgccggccgtcagaacgtacgtcacggagacgtccaggtttcccggatagccttcatcgccgtccgggctgagggtggtgaaccggacgccgacgccggacgaatcctggacgggttcgcccttccagaggatcttgtcgaagcccctgacaccgccgtggaggtggttctggccattgttggcggccagcgtgtacgtgtttccgtccagcgcgaatcggccccgggcgatgcggttgccgtaccggccgacggtcgccccgaagtacgggctggccttgagatagccgtcaagcgtgtcgtagccgaggacgcaatcggcgagggcgccgtcgcggtcgggccattccagggaaacgagcgtcgccccgtaggtcatcagccggaccgtcaatcccttcccgtcggccaaggtgtaaagatcgacggccgagccgtcgggcagcgttccgaaaacggtcttgccgacgctcatgttcgcccctccttttcctgtttccgcggccaccggcggcgccggcgggccttccttccggcaggccgcgagccccaagaggagacccgctcccaggatcccgatcatcgcggaaacggcggtttttctcatggacgcgtctccttcgggccgcggttcccccgggccggcccaagcccatgttaaataacagatttccccctcaaagacaaatgccgcggcctggaaaaacacacttggagaaaggaattagcgacgattcgggacatggtgcggaaggggggacttgaacccccacagccttgcggctataagctcctgaggcttacgcgtctgccaattccgccacttccgcgctcgggaggttttttattataaggcctctttggctttatgtaaaggaccggggaagcggctttccgtccgcttgacaatcctccgccccgtctttatctttaatctacatgacgctctcgcacgtcttggacggcgtcttttccattcccgtattccagccgttcatcgctattcccgataaggaggtttcatgccctctcccttccgtgaccggatcgtcgccctcagccgcttccacggcggccctcttctgacgacttcgttctttctcgacaccaacctgtccaaacgaacgcgccgggagatccttctggccgcgaagaacatgatcgccggcggccgggcggacatcgcctccatggacgtgtccagggaaataaaatcctcgctggagaaagatctggccgcccttgaagcctacttcgccggcaatctgtcctcgaccgtgccggggctggcggcttattcctgctcgggagccggcttttgggaagcgctcgaccttcccgaggcgccgttggaccgtctcgtcgtcgatcgcaatccttacatccggcccgtcacccgcattctcgaggaccgccgccgctttctcgtcctgacgctcgaccgccgggaagcccggtggtacgacgtgtacatgagccgcatcgatccgctgtccagtctctcctcggacatccccaagaaagtcaaaagcggaatctcgggtcaggaggccaagcggatcgagcgtcacgtcgaggcccttgtccgcgcccacctcaagcgatgcgcccagacaacgttcgacatcctgaagaaagacggcttcgccgggctttggctgggctgccccgacgccctctaccgcgatttcgaggggatgctccattccttcgtccgggaacggatcaagggccgcctcaaagtccggcctatcgatcctctcgatgtggtcctccgggaagccgaggatcttgagcggacgctgaaaaaaagggaggaagaagaccttctgaaaatgctcatcggcgagatcgaaaagggcacccgggcccgctccggtctgcgcgactgcctggcggccctcaacaagggcgaagtccaaaccctcgtcgtcacccgccaccatttcgtccccggaaagcattgcccccgctgccgcttgctctttctggacgagctccggtgcccggcctgcgagcgcaagaccgaaacgcgtcccgatatcgtcgacgaggcgatcgaatcggccctccaccggaaatgcgacgtcaagtacgtcaccccgccttcgcggctcgaccactacggcaagatgggggctctgctgaggtataaagcttaggaccgcgccgcccccggggatcgaagcgcttctttttaacggcgcgggagcttcgaaaaaaatcccccgcggtccatccgggccgcgggggacgcgatatccgtctcagtttttcgccgcggttttcttgaacctcactctttcaaagagactgtacatgaccggaatgacgaacaaggtcaggaaggtcgtcgaagtcaacccgcccaggagagtgacgcccaaggggctgcgcatctccgcgccctgcccgcgggcgacggccatgggaaatactccgagaatggtcgtcaaggctgtgagcaggaccggccgcagccgggtcaccgccccctggaggatcgcttccttgatctccatcccgtcccgccggagctggttggtgtaatcgatcatgacgatggcgttgttgacggccactcctgccagaaggatgatcccgatcccgaccgccaggttgagagtgtggccgaacacgagcaggccgagaacgacgccgatgaagcacagcgggatggtgaacatgatgatgaaggggtgcttcagcgactcgaactgagaggccatgaccatgtaaaccatgagaacggccaggagaaaaacccagcccaaggttttgaacatatcggtcatctgggaataggagccgccgatctcgacgaaatatccggccggcagttgctcgtccagacccttcatccgagtctgaacatcccggacgacgccgcccagatcgcggccgacgatattgccggtgacggaaatgcggcgggactggttgtcgcgggtgatctggatcgggccggtgcccgactggacatcggccacctggtccaaggagatggtcgttcccatcggggtggagatggggatgtcgcggatggcggcgatcgtctcgcggaactcgtccttgaaccggacccggacgtcgtattcctcgccctcttcccggtagcgggtcgcgacttggccgagggtcgccgtctggacggcggattcgacctgggcgacggtcaggccgaagcgggcggccttatcccggtcgattttcaagtggtactccggcttggactgggacagggaatgggtcacatcgcggaggccggggacgtccttcagccggacgaccaggccgtcggctatttcccgaagtttcgccaaatccttgccgaacagcttgatctcgacgggggcggccgctccgcccatcatcatcgccgacatgtccatggattcgaacttgacgccctcgaacttgggaacccgcttgcggatttcctcgacgacctgggaatcggacagccggcgctcttccgtcggcttcaatccgacgaagaagacagcctcgtgcggcccggtgggattcccgaaaccggcgtcgccggcgttttcctcggccgaggagccgatctgggtcgacgtgatctggacctccggacggccccggatgacgctttcaatcatggtcacgatccggttggtttcttcgagcgacgtcccgaccggcgttttaacgctcataaccagcatgcctcggtccatcgagggcatgaattccgtccccaagaccgggatcaggaacagggagagagcgaacacgcccagcgttccgaagatcacgatcttgcggtggtgaagggcccactccagagcctggcggtatttgttccgggcgccggtgaagtcgcgcccgatcgtcttccggatcgcctgggcgtctccttccttccgctggaagagaacggagcccatggccgggacgatggtcagggcgacgaacaacgaggcgacgagcgagaaggcgaccgacaaagccaatccccgggtcatcatcccggtcagcccggtggcgaaggccatgggaaggaagacgacgatcgtcgtcaaggtggacgcggtgatggccatcccgacctcggaggccccgagccgggccgcggatagggcgtccttgccctcctggatatgacggaacatgttctcgatgacgacgatggcgttgtccaccagcatcccgatgcccaaggccaggccgccgagggtcaggaggttcagggtgtagccggcgaaataaagggcgatgaacgtcgtgatgatcgacaagggaatcgccacgccgatgatcagtgtcggccgccagttcatcaggaagaagaagatcagggccacggccagcaagccaccctgccaggccgtcgccgcggtgcccttggtgacgtgctggatcatctccgactggtccatgatctgaaggaacttgacgtcggggggcagggttttcttgatgttctcgagctcggccttgacggccttgccgaccagggcggtgttggctccggaccgcttgctgaccatgagatagacggccttctcgccctcgatccggccgataaagcgggtttccttcagagtatcccggacgtcggcgacatcccggacgtaaatcggctggcccttggccgtggagccgacaatcgtgttgcggacatcgtccaacgactcgaactcgccgatcgtccggacgagaaaatccgaatgccgctcgaccaaatagccggcgggcatgttcatgtttccggccatcagggccccgaggacgcggtcgaacgccaggccgaaggaagccagggcgtccttgttcacgtccaccaggatttcccgggtgtccatggaatacgtcgtcgccgcggcgacgccgtcgaggcgctcgaacctccgggcgacctcgtcctcgacgatggttttcagctcggacatggatcgatcgccgacaacgccccagaaaatgaccggaatctgggccatgttgaacttgaccacgagcggatcgctcgccgcttccggcaggaagcccttgtaaagcccgattcggtctcggacatcctgggcggcgaaatcgaggttggtcccccattcgaattcgacctgaatcgccgacgtcccctcggacgtgatcgacgtgaccttcttgacgccgttgaccgagccgacgacgccctccagaggcttggtgatgaggttttcgatgtcctccggcgaggcgcctcgataagtcgtgacgacggagacggtgggatattcgaggtcgggaaagagatccagcccgagtctcgagaacgaaatcaccccgacgacgaccaggatcagggcgatcatggccgtcgaaacgcggcgtttgacggcaaaattagggagttgcatggatgactaccttttgatttcgaccggcgttccctcgacaaggccgaagttgccctcgacgatcacctggtcgccttccttcaaaccgtcgatgacctcgatcatcgtcgtgtttttgaggcccagggtgaccggccgcttgaccgctttgccgttttcggccgtgaacacgtacgaatcggacaagacggctttctgatggacggctaatgcgttctcgtgggagttgacttcgaacgtgacggatccgaaggtgcccggccggaggacgagcccgggattgtcggccaggatctcgacccggaactttttcgagaggggatcggccgccaggttcacgacggaaaccgttccggccgcttccgccgagccggagcggacgacggccttctggccgcgagccaagcggaggatgtcgtcctgggtcacctcgacgatgattttgacgcggccgtaatcgacaagagtcacgacgccggagccggagcttccataaccgcccatcatcggattgagaatgtcgccgacttcggcgttccgggaggcgatgacgccgttccagggggcggtcatcaccgcctgatccagggcccggcggatcagggcgacggccgccctggcctgggccgcctgggcctgggcggcctcgtcggcgagcttgacttgttcaaactgcgtttcggaaacggcgttttcagccatcagccggtccatccgctccttgttgcgggcggaattcttggcgttcgcctcggccatggccgccgcggcttcggcctgctggagctgaaggagaatggaagccgtgtccagctcggccaaaagctggcctttctggacgaactggccttcctcgacgacgatgcgagcgaccttgccgctcgtctccggagtgatattgatcttgcgggcggcctcgacgacgccggtgaacgtcatcttttctgaaatccgctgccgggagacggtctcgactttgaccggcatggttccctgcaaaagggacgcggccgcggcttccgcggcggcgggcgtttcgtttttccggcaggcggccggaacgaaaacgacgacggcggcgagcagaacggcgggcaaacgatgtttcaacatgggctgactccgtttattcttcatatcgatccgagcctgttcccatcgacttctcgatctgggccagggcgacggcataatcgtacaaggcttgaacatggttggttttggcctgggacaaagcgacctgggccgaactgacgtcgagattggtggccaggccttcggcgtagttcaaatcagcgatccggacggcctcctgagcttgttcgacgtttttttcctgggaaaaaagggactcgcgggcctgcctcaaggccaggacggcttcctggacctcgaacttcacggaatcgatcagccccttctggctgtattccagctgccggaaggcggccttggactgggcgaccttggccgcgttgccgaaaccgttgaagatcggaatgttgaggacgagattgatctggtaatagctttcccagttttccttcttgagattcaggtgatcggaccagtagttgtaggcgccgccgacagccaggctcggaaggccggcgcctttgttcagcttgatcatttccgcggccatcagcttctggtagttgagctggttgatctcgggccggcgggccagggccatgacgatattttggtcgacgtcggcttccacgtcccggaaagccagctcgcccttgaattccacggatttctggagatcgaggccgagctgcattttcaagccgatttcggcggtggccagggcattacgggcccggatgagctgcggcttgaggttggccaattggacttccgaccggagaaggtcgaacttcgaggccatgcccacctcggcgagattcttgacgttggtatagtgcttctcggccagggccacgccttcctcggccactccgacgaaggagcgggccaggagatagccgtaaaaagacttcttgacgttgaggaccatctcctcccgggattggcggatggcttcgcgggtcgcctcgaggttgtaattggcggttttatatccggcgaccagccgtccgcccgagtagaggggcaggctgaagctcaaggcgaaggtgtaagcccgggtgaaatccatcttgacgcgcgtcggggatccgcccggaatgaacgagggaaactcgatcgtgaacacctttttatccaggacgtcggtgccggaggcgttgagcgtcgggaaaaatccggcgaccgcctccttgagggaggcctcggcctggtcttccttggcccgggcggccaggtagaagggattctgggcaagagcgagtttcagacagtcctccagggtcaggagcattttttcctgagccaaggccggcccgcccgaaacggccgccagaaggatcagggcgatcaatgcgcgaaatcggttcatggctgcgtctccttaagaatcagcctgtgattcggttttgaatccacgaaggatgaactcgtggatgttcttgatgtctttatcgatatccggtttcgattcacggaacagctggtcgtgctggtacccgagaatcacggcggtgagaaagcggaccatgatctccaggggaaacgggcggaaatccccggaggcgatcccctcccggagaaaccgctccaagtgcccggtcatcgcgcggcgggccgtctgaagccggtggaaaaaatctttttccgtttccgaggccgccatcgctccggtttcagccatcgcccggaagatctgcatgtgagacggattcatgatgaacgcccgggaaatgttcgctttctccgcctggtaacggaggatttcccggagaagaaggagaagtttggcctcgggcttgaccggcttgatcaagatcgcggccagccggtcgttcaagtcctccaggtaatggatgaggagctccatgacgagctcggatttgccttggatatacttgtaaagggtcgccttggaaaaaccggcttcggccgcgacatcgtccatggaggaggccgtcaagcctttcctcccgataacgatctcggccgcgtgaaggatggcctcccggttcctccggcggcggtcgagctcccggaggctccgcttttcggataaagacttccggctcttctgaggtttcatttttaaactcttaagtttactctttaaaccaatgagtataccggcgcaggatagcaagaagagaaggggcttgtcaagaggattttttccttcgcattggaaatgtttttccgttcattctacaatggagccgcatgcgtccggcggccaagatcctgaaagcgggcgctgcggtctgcctgctttccgcggccgtttttctcgcctcgggcggggccgccctcccctgtcccccccaagcctgggacatccggatgacgatcacggtccagggcgagtacgctctggagggccgggacggcgcctccggacgctacggaatgagattcgtctggaggggcggcctcgaacccgacgacgaggattacgttctcatccaccacgggacgaaactcgaggaatggagagtggaggaatccgccgccggtccggacggaatccggctcctgaccacccgcgattacggagtcaagcctgagctgggcgtcgcctacatcctccgaaaggacggcggccttcacctgaattttctcatccggggattcgaggttccccgctctcggccgtccgaggccttttatctccatcttccggcctcggccgaaaacaccgaccgtccggaaggattgaattacgccctcttccttcaaaaaggatccaatgcgatcgtcttggacgaccccgcggccagccggaaaacgcaggaaaaatcatttcactggacctggttccgccgctccggcgtcctcggacgggatcccgccttgttccaaatgaatcgtcacgaggccgacgtgaccgtcgtcgtgactccgcgggcggactccggtccccggaccggtcaagctcggggatgaaacttgtcgtaaatccggcggaggcgctcgcggctgacgtgagtatagatctgggtggtggtgatctggctgtggccgagcatcatctgaacggagcgaaggtccgccccgtgctcgagaagatgagtggcgaaggagtgccgcaggacatgaggatggactttcggctggaggccggcctcccgggcatgccctttcagcattttccaaaatccttgccgggtgaacggctctccccgcctggtcaggaacagctcgtccgcgcccttttttgaagccagggcgggccgtgctttttccacgtaacggacgacggcggccgcggccgtttttcccaggggcacgatccgctccttcgcccccttgccccggcagaggatgaactcatccttcagccggacgtcggccgtccgcagcccgaccagctccgaaacccgcaatccggaggcgtacatcacctcgagcatcgcccggtcgcgaaggccccggggatcccggggatccggttttcccaggagggatttcacttcggcctcggacagggctttgggaagcgccagccatgttttcggcgacgtcaagtgaatcgcgggatttttatccaaccggccgtcgagaagaagaaagcggtagaaggccttgaggacggagatgcggcgggcgagcgagcgggccgacaagcccgcccggctctcgtgccggatgaaggccgccagatccgattcccgggcccggtcccaggacgttttttcgcgggcgaggaatcgcaggaaccggtcgatgtccaagccgtaggcttcccgcgtgttgggcgaaaggcctttttccacggtcaggaaacgcaggaattccgcccggatgtcgacggaaggcggagccgggctcatcagagaaaagtcaggttttcgcgctcccggccgatcgtggtcaaggggccatggccggggagaacctcgatctcgtcgggcaaagtcatcagccgctcccggatggatttttcgagctgtttttggtcgccgcccggaaggtccgtccgtccgagaccctcgaagaagagggtgtccccggacaggaggaatccgtcgtccaggagactgatgctgccgggggaatgtcccggcgtatggatgacgcggagagcgccgcggccgaccttgatctcgtcgccgtccttgacgaacttgtcggccggcggggaatccttggccccgatgaaaaggctcagctcgagctggttgagacgcgagggacggtctttatcgcccgcgtgcatgtaaagggggatgtcgtacttgtccttcatgtcccggttggccccgatgtggtcgatgtggccatgggtgttgagaatggcgaagggtttgaggttttcctcggcgatgaccgggaaaatccggtcggcgtcggccccggggtcgacgatcaggcaatcccgggtctcctcatcgtagacaagatagcagttggtctcgagcggaccgaccacgatcatctggtatttcatccgatctccgtcctgagggtcatcataggggttattctccgcccctgtcaagttggacgagaaccggttttccggccggccggagatgggatataatgccggacgtggcccacgcattcccctggcaactcgaagtcgcccgccgttccctgaagaaaagggaaaaaatcgatttgatcgaacagcaggtcgatgtcgggccggacgaccggtgtctcgacctcggctgcgcccagggaatcctcagctggttcttgaagaaaaaaggcgggaggtggattcatacggacctggatttcgaaaaccttctgaccagccgggacctcctcgaccggggcttcgtccagatgggcgtgccggacctgccgtttaaaagcaggtccttcgaccgcgtattctgtctcgatttcctggagcacgtcgacgacgatctcaagacggccggcgaaatcgcccgcgtcctcgttcccggcgggaagctgctcctcgtcgtcccccggacggggccgttcatcctcatgcagaaaatacgcccggccgtcggcctgaagctcgaattctacgggcacaagcgggaaggctacgctttgcccgccctccggatgcttctcggccgggccggcctccggatcacccggcacgccttctattcccggtttttcacggaattcgtggagctcgtgctcaacgccctgtacgtgaatttcttctcggccaagccggaggccaggctccgcgacgggcatatccggccggcgacgccgggggaattcgccgctcaggcgaagcccttccggatttacaagctcgtctatcccctgctccggctcgcggcgaagctcgatacgctgcttttcttcacccgcggctacgccctgatggtctgggcggaaaagaccgcaactcccgaggaggatccccatggccgtcgtccttgatgggaaaagcctgaccctggagaagctcgtccgcatcgcccgggagggcgagccggtggaagtcccccccgaggccatcgccaaaatcaaggcctgccgggagatgcttgaagagaaaatcaaggcgagcgagatcatgtacgggatcaacaccgggatcggagagttctccgaggtggtcctcaccgacgagcaggtcggccagttccagaagtacctgatctacaaccacgccgccggcatcggcgatccggccccggtcgagcacgtccgggcggcgatggccggccggatcaacgtccatgcccggggccgctcgggctgccgcccggaaatcactctgaccctggccgaaatgctcaacaagggcgtcactccggtcgtctgccggaaaggatccgtcggcgcttccggcgatctcgcccccatgtcccaggtcgcccttcttctgatgggcgagggcgaagcgtattaccggggcgagcgcctggccgggcgggtcgccctggaacgggccggcatcccggtccccggcctccaagcccgggacgggctggcggccatcaacggctccaatctcctgacggccatatcggccctgacgctctacgacatggaccggacgctgaaacaagccgaaatcgccgcgacgatgaccatcgaagccctgatcggcaatttgaagccctacgacgtccggctccacgaggagcgcggcttcccgggggccgtccggtcggcccgggccatcctcaagtgtctccagggaagcgacttaaccaccggcaaaatgaaaaccaaggtccaggacgcctactccatgcggtccacgccccaggtcatcggggcggctcatgacgccttggtccacgcccgccgccaagtcgaaatcgagctcaacgccacggccgacaaccccatcttcctgactgaaaacaagctcaccctgaccggggcgaattttcaaggcactccggtcgccctgcccatggagatggccggagcggccttgaccatggtctgcgtcctgagcgagcgccggctcaatcgcctgaccaaccccgccttgagcgtcggcctgccggctttcctgacgaagggcgcgggtcttttttcagggatgatgctcagccaatacacggccgacgccctggtcgtcgaacagcggatcctcagcgccccggcctgcatccaatccatcccggcggccgccgatcaggaggatttcgtctcgatggggatgaacacggccctgaagaacctccagatcctggacaacgcctacggcatcctgggaatcgaattgatggccgccgcccagggtctcgatttccgcccgttcacgcccggcgccggcgcccgggcggccaagggcgtcatccgcagacacgtcgcccgcctcgacgaggaccgtcccttgcacgtcgatcacaacaagatgaaagccctcgtccagtcgggggagatcctggaagcggtggaaaaggccgtcggccccctcggttgaacatgaaggaaacgtctttgatcaagccgtcgatggacgtatttcttacgtccgacgccgcccggatgctggaagcggtccgccgcctcgttccgaaaaaaggcggccggggttttcttctcggccatcgccgcggcaaccgcgtgtatgtcgaggccgttctcccctccccctcctccgcctggccgtcgctccggtccttttatgaaatggatgccggactggggaggaaaatcgtcggttttttcctcatcggcgcgccggcgaccgcccgcgcgccccttctccggccgtttggaaccggcaaggttcttgttgaaatccccttgccgggcgggaaaaagcggccccccgccggatcgttgatcgattaccacgaccggtttctcttcaagaaaatccgcgtcgtcgtcgagcggccggttggccggccggaaggaaaacgcccatgaacggctctctctcgatcgaaaaacgccgggaccttctccacttagcccgggaatcgatcgccgcccgcctgacgggagagccgacgccggccctgacaacaaaggacccgctcctggccgaaaagcgcggcgcgttcgtcaccctgacccgccggggagagcttcggggctgcatcggctaccccctccccctcaagccgctggccgatgcggtcgtggaaatggccgcggccgcggccttcgaggatccgcgtttcgagcccgtgacggccgaagagatggacgaccttcacatcgaaatctccgtcctgacgcttcccgtcccggcggaaaagccggaggacgtggtcgtcggccgtcacggaatcatcgtctcccaaggagggcgcaagggcctccttcttccccaggtcccggtggagtacgggtggaagcgggaaacgtttctcagccacggctgtttgaaggccgggcttccccccgacgcctggaaaaaaggcgcccggatcgagatcttcgaggcggaagtcttcggcgaataattatttcagcttattctggatcttccttaattccgctttcgcttcctgtttgtacatcgcgtccttgcccgacgcctcgggcaggtccacgcacttccggaattccgcggccgcttccttgtagtcctccacgacgacgtaggtccggccgagctccagatgatgatggatgtcgtcgggcttgatctcgacggcctttttcaggtacgtcagcgcttcttcgttggttcccttgggcatcttgccgtacaggatgccccccagcagccgcttggcgccgccgatttcggcgatcgtccgatgccaccggccgagggcgtgatacgcgccgtcgttgttcgggtcgagctcgatggatttttcgatctcggccttgatctccctcgacatcgcgattttttccttgttgcccaaacccaaggcatacattcccagcgcggccgaaagctggaaatgaccgttcgtgtcattgggattcacggcgatcgccttccgggcgtattccgccgcgtcctgataatactttttctgcttctcaaggccgcccttggcccggacgttgaccaggtcggcgacgtcgaccatcgagccggacgccttccagagcgcttcgtagttttccggctcgagctcgagcgccgccaggtaggattcgagcgctttcgcgtcgtctctctggtcgcgggcgtcatctccggccttgatgagctcaacggcggtctgggccggggcggagacggccaaggccagcagcagggcaacggacaagcacaggaatttcttcatttttcttccctccatgatgaaaaacgatacagatttatcttttgagcggacgtttgtcaagacgctgaacctgtgtcttaagacaaggtgattatctttgcttttaaacgaaacgaatcctattactatttttgtagcggccggggctgcgggtcggagcgggccgcatcgcggttgagcaccgggtccgggctcagacagcgataccggtcaggcggataatgccgggctccggaataatccatcccgttggacggctcccgctccttgcccgggaatttcaatgccggatcataaggattgacccgggtcttctggatccccccgaacgggtcgaaggccgccgtgcccgcggccgccgtgatcatgcggttggaattgatccggccggatgtaacgcaaccgtatttcttgtcttgcggccggaattccgccatgagccagttccccggatcgatgaaatcgctgaggccgtcgccgcgatcatcgtcctccgccatgagctttccgtcaaaggagtgaacccggagcgttgtttttcgtacatgaaactggaaaggagaacggccatgaacgaccatatcaaaatcatcggcatcctctggatcatcttcggcgccctgagcctcgtagccgccggcttcctgtttttgattttggtcggggtctcgttcattcccgacatcgatccccaagctcccggaatcctccgtttcatcggcttcttcctggggtcgttcctggccttgatcggcttgccgaagatcatcggcggatacggcctcctgaaggggtacgaatggggccggatcctcaccctcgtcgtctccttcctgagcctgttcaacgtcccgtttgggacggccctggggatctattcaatcatcatcctgttgaacaaggaaacggcctcgcggttccagaaatcctcgccgccggacgttcgcccctagccctccgccccactctcgaaaaaccggtcgacccgggcgtcgaattcgatcatgagacgttccgcccggagacgctcctcctcccggctctcgggcggcaagccgcggggaatctcaatcggctcgccgtaaacggcggcgatccgcgtaaaggggaagaacatctcgaagcggtcccagctgcgaaggatctttttccggcgggcggaaaaggaaaaggggaccatcgccgcgccggtttcggcggccagcttgaccgcccccggcttgaattgtcggtcgggccccttcgggccgtcgggaacgatgatgacctcgccgccttcgttcagttcccggaccatctcgatccaggcggttttcatcggatgagagccggacccccggatgagggtgtagccccagccgtccatcagccgggcgacgaattccccgtcttgggacgggctgaccagggccaggattcctcgcttgcggaaaaagaacgggacaacgaagatttttccatgccaaatgagcaaaacgaccggccgccccgacttcctcagggcccggtacgggccgtctccgacgatcttccagcggcacgtcttcatccacatccatatcaggaacttccccgggtgctggatgagccacagccggaatttcgtcttggcggacatcgtcccccatcttagcgaaaacgccggccttgaacaatatcgatcatgccagccggtccggccgccgtcggtcgacccaaaaacccgcggcgaatcccgcggccccggcggccaagccccaggggacggagtacggccaggccggcaggcccaaagacacgattcccgaggattcgaggaagctcaaaacggcgaatccccctcccccgcagacgctgaaaagcccggccgccggatattttgcttttaaaaacatcatcgccgccccggggatgaaaaatccctcagccaggatctccgacgacagcccgatcgtcttgaggatgttacggagcttcagggcgaccagaaaagcgaaggccgcgatcaacaccgtcgccgtcctcccccagaaaacgggccggcgtttagcccggggatgaatctgctcgatcacgtctcggttcaacacgagagccccggcgttgacggccgtgtccatcgtcgaaagaatcgccgccaggatggcgacgaagaccaagccgccgaggacgaaaccggtccggccgccggcgatatcggcgacaagaggccggacggacgtcccgcctatcctctccggaaaaaggggaagggaaagaacgccggtcgcgacgacaagcaggtaaaagccgccgagggccgcggccgtcgccccaagaccccgccgggccgcggccgcgctccgggcggcccggatccgctgcaaagcgatgggcgaaatcgtccaggccatggtaaaagaaagggccatcaagcctttcccgccgaaatcatggaaaaggttgaaatacccgttttttccggccgccgccgcccggaccgcggccgaagtccacgacgatgccccccggatatggaaaaagagcgccaggacgccggccgaaagaagcaggaattgaagaacgtcggtccagatcaccgagcgcaggccgcccaacgccgtataaatcaggacgacagccgcgccggcgccgatggccccggcataagacacgccgagaaaatccttcaggaaaagccccagggccgacatctgggaagcggccagcatggccatgtaccagacgagaagcccggaggcgagatgccggaccgttcggccgtagcgaagctcgaccaggtctgaccacgtcaagacgggaagacgatgaaggcgggaagcgaacaaagcggccaggagaaggaccgtcgccactgccgggacgccgacgatccagatcgcgttcaccccgccggcgaaggcctcgtcgacggataccaaaatcgaggtcgccccgaaccaggaggcggtcagggagacgcagatgaggccgctcgaaagacgcctcccggcgaaaaaaaagtcctcggcgcttttcatccggcgggaaaaggtcaatccgacggccaagagcagggcgaggtaagcgacgaacaggattagaaattccggacgcatgccgagggttataccagaaagatccccggccgatcaaccgtgttataataccgggacgatgagaccgggcgaagggaatttcggagggctcgacctgtggaggacaatcgcgggagccgttttttgcctcgccggcctcctcctccccgcctgggcggacgaagacgcggcccgggacgtcttcttaaggtcggaacgggctctggccgccctcaactccttccaagccgatttcgaacaggcatatttttccatgaccgtgtccgagccgcttcgggaaaagggccgcctgtcctaccggaaacccggccggatgcggtgggaataccggagcgggtccgggcaaatcatcgttctcagcgacggcgtcatggagacgcttatccccgaggaaaaccagcttatccggcagatcatccccgacgaccaagccgacggggcgttgttcggccttctttcgggacggaccgggctggccgacgcctaccggatcgaaaacaatcccttccccggagccgaagggcccgttcatcaactcaagctgactcccctcgaggagggggaaaccgcctatctcctcgtcgagatcgacgcccggacgttttttctccgccgggttgttttattcgactgggccggcaacaagaacgaattcactttttcccgactgaaaaccaacccccgtctcgggccgaatgtctttgtcatcgaggtcccggacggctgcgagattattgacaatgtcgatccccggcggagctgaactttttctctcggagcccgtataaatgcctgaggataaaaggtcctccgggtccgacgatcccaaactcgtccggcggtgcctgcgcggcgaccggaaggcgtttgagacgatcgtcctgaaataccagcagccgatgctcaactacgtgagccggatggtccgagagagagagatggccttggacgtcagccaggaagtgtttctccgcgcttacgcggctctcccgtcgtatcgttcgcagtataaattttcgacctggctgttccggatcgcgtccaattatttgatcgatcattggagaaaaaagaaaatcaccgcgatctccctggatcagccgctggacgacaccgaggacggctgcactctccaagtcgccgatgagaccgcgtccatcatcctcgagatggagcgcaaggagctccggctcaggctggaaaaggccatggaccggctgccggttcatttgaaagaactgttcgtctggagacatatcaacggcatgagttatgaagagatggccgaaatcaagaagctcccggtcgggacggtgaaaaaccgggtgtttcaggccaaggaaatgatgcgcgggctgcttgaggagatgccatgagctgcccatccgtcgaccgcctgtatgatgacctggacggcgccctgaccggggcggagaaagaggccgtcgagcgccacctccagtcctgcgaatcttgccggcgcgcccgcgccgtccgcgggcggatcgccggagcggccgcggatcttcctccatttgaggttcctccggacttcgccgtcggcgtcatggccgggatcgccgcccttcccgttccggccgcgaagaaactccatcccggcctcgtctggacggcggcggccgccgccgcggccggcgcggggatcggcctcggcatgattctcgccggtgccggatcggccgcctggctctcccgaatcggtcccgcgttcggagcccagctccgcaacgccgccgccttcgcggccaagggcgggaagctcctcttcttgggcggaaaaatcatcctcggagtctcccgcggagttctcgaattcctgcgatcgacggccgaaatcctcgggccggacggccgggccgttctcatcggcggaactctggtcatcttgatttccggcggcgtattcctgcgccgccgactccccgtttcggagagaacgcatgaaaaataagatcctggcccggatcggcgccggcttgatcgtcctcgcggcggcgggcttgattcccctgccggccttcccgcagaattcgccgatcggctataaaaaagacatcctgatcagcccgcagagcgaacaaaatcagctcttcacctggggcgggaccgtgaacatcgaaggcaaagtccgcaaggacgtcctggccgtgggaagcgaagtgacgatcagcggagaagtcggcgattccttcgtcggcgtcggcgcccgagtgaccctgaagccgacagccgttatccggaaggatctcctgatcctcggcggaacgctcgtccgggaggaaggaagcgtcgtccaaggggacacggtctactttaaatccgaggagctgcgggagcgttttctccagggcggcgtcggcggactgctcggggcggcgtatctcccgatcgtcctcatcatcaagatcatctccttagccctctgggccgtcctcgcggtcatcgtcgccggtctgttccccggaaacgtgacccgggccgccggcgaaatgcgccgctccctcggaacggtcctcttaaccggcctcgtcgcctccgccgcgttccttttcctgatggtcttcgccgccgttctcagcgtcatcctgatcggcatccccgtcctgatcgccctctcgtttgcgggaatcctcatcaaggtcttcggacggatcgtagtctacttcaccgccggccggctgaccgccggcgcgttccgccggacctcggtctcccccatcggcggggcgcttctcgggctggccgtcgtcggcgtcctccgattcattcccctcgtcggcggagcgctgtcgtttttcctgagcctcctggcttggggcatcgccttgcggacgaaattcgggacgacggataactggttccggaaaaccgcggcccccgcgccccaagcgccattgccgcccgggccgaagcaatcctgaacgaggatcttggaaataccgaaattccccgccgccttgacgccttcggaaatcagggagaagaagagcgcggatccgtccgaggatggggattccccgggaattcagatctgcatgatttctttttctttggccgccgcgatgtcctcgattttcttcgtgtaatcgtcgatcgttttctggagctcctcgaggcccttgaatttatcgtcctcgccgatctccttttccttctcgagctcctcgatgaaatccttggcttcacggcggagattgcggagggcggttttctcctcctcgagcattttcttgaccttcttgacgatctcccgccgccgctcctcgtcgaggggagggacggggatcttgaggagctttccatcgttgatgggattgaagccgagatcggccgatcggatggccttgtcgatcgcctccaaaacgctttgatcgtagggggcgatcgtgatcaggttcggatcgggaagaccgatccgggccgtctgattgaccggcgtcagaacgccgtaataatccaccttgatgtcctcaaaaacgccgagattggcccggcccgtccggaggcggctgagctccttgcggaaatgctccatggaggccttcatcttgcgatcgcaatcctgtagaacatccttcaccatgacggcctcctccttcaatacacggtcgtcccgatgtcctcgcccaggacgacccgctggatattgccccgctttttcaagctgaaaacgatgatcggaagcttgttgtccttgcagagcgagatcgccgtggcatccatcacctcaagacccctcttgaggacttcgatataccggatccggttgaaccgcttggccttcggatccttgagcggatcggccgaataaacgccgtcgaccttggtcgctttgaggatggccccggccttgatttccagggcccggagcgcggccgcggtgtcggtcgtgaaataggggctgcccagaccggcgctgaagatgatgacccggcccttttccagatggcggagaacccggcggcggatgaacggctcggcgatggcccggatctccagggctgagacatgccgggtcatcactccgatcttctccaaggcctcctggagggcgatcccgttcatgatcgtggccagtaggcccatctggtcggccgagacgcgctccactccctcggccgctcccctcacgccgcggaagatgttgcccccgccgatcatgatcgcgatctggacgccgagagcatggacttccttgatttcctgggcgatcgcctgtgtcgtccggaaatcgattccaaaggcttgccttcccaggagagactcccccgaaagcttgagcagaacgcgttcgtaggcgggcttgggcgcgggcatgcctcctcccgttatttcgaaatctggtaccgggtgaaccggccgaccttggtgttctccttgaatttgctgatgaactgggtgatcagatccttgatcttttgcttatcgtcccggatgtacggctgctcgagaaggcaggtttcctcgtagaacttggagagcttgccctcgacgattttctcgacgatctcggccggttttttggaatccttgaactgctcgcggatgatctcccgctccttttcgaggacgtcggccggcacgtcggccggggcgacatatttcggcgccgcggcggcgatgtgcatggcgatgttcttgacgagctcctggaactcctcattcttggcgacgaagtcggtttcacagttgacttcgaccacgacgccgatcttgccgttggtgtggatgtaggatccgatccggccctcgcgggtcgcccggtcggccttgtccgcagcccgggcataaccctttttccgcaggatctcgatcgctttttcctggtcgccgccggcttcctcgagagcccgcttgcactccatcatcccgatgccggtacgctcgcgcaattccttgaccatctccgccgtgatatccatcgtgaactccttgtcgattttcaaccccgggcccgcgcccggttcatccgccgactcaaccgagatcgagcgccggttcctcggccgcggccgcggcttcctccgcggccttgtcctcgagcatcgatttctcgatccgggctttcttcccgtcgagaatggcctccgcgatcttgttggaaaacagctcgatcgcccggacggcgtcgtcgttgccgggaatgggatacgttaggccgtcggggtcgccgttggtgtcgacgatggccacgatcgggatcgccattttccgcgcctcttcgagggcgatcgtttcccgcgaggagtcgatgatgaacatcgctccgggaatgccctttaaattcttgatgccgcccaagttcttgctcagcttgcggtagactttctcgagcttggattgttccttcttcgaaagaagatcccagcggccgtcttcccgcatctcctcgagctcgaccagcttatcgatcgatccgctgatgacccggaagttcgtcaggagcccgcccagccagcgctggttgacatagctcgattcgcacttctgggccgcatcgcggacgatatcctgggcctgcttcttggttccgacgaacaagatgtccttgccgctctcggcgacgcttttgacgaaagccaggctttccttgaagaccttgatcgtcttctgcaagtcgatgatgtagatgccgttgcgctggccgtagatgaattccttcatcttgggattccagcgcttggtttggtgcccgaagtggacgcccgcctccaacagttccttcatcgtgactgagaccacggtttcctccgttaacgcttgtggtactgcggggctttacgggcgccgagcaggccgtatttcttgcgttccttgatgcgggaatcgcgggtgaccaggccggccgccttcagagccggcttgagctcccggttatactcgatcagggcccgggtgatccccagccgaacggcttcggattggccgtggacgccgcctccctcgacccgcatgaagacgtcgaatttgtcctccgtcgaggtcagggccagcggctgcttgatcttcagccggtgggattccgtccggaaataatcctcaaacacccgggggcgtttgttgacgaacaaggtgaaatcgcctttgccggaccgcaggaagacccgggcgatggatgtcttccgcttgcctgtgccgtaatactgaatgagactcactgcgtcggcctcctcgttttagaaccggtattcctggggattctgcgcggcgtggggatgttcgggtccccggtaaaccttgagcttcttgtataccgcgcgcccgagggtgttcttcggaatcatcccccagacggctttcttaatgacttcctcgggttttttcgccaagaggtccttgagaacctcggttttgatgccgcccggatacccggaatgacgatggtatttcttaagctccgtcttccggccggtcacggcgattttttcggcgttgacgacaatgacaaaatcgccggtgtcgacgaacggggcatactgcggcttcgcttttccgcgaagaagaacggcgacctgcgtggccaaacgtcccaggactttgccttcggcgtcgaccacccaccacttgcgttcgatggcatccttttttgggacataagtcttcatcggctgaacctcaacaagagatatggaaactctgactccaggtttcgctaaaataaaatgatgcaataagatactatttccgggttcagatgtcaatgaaaaaaaaccctcctccccgacggagccggagaggagggcgggatgtcctggaacaggcgaaaacgcttactttttaagctctttttccagcttcatccgttcgatcgcccgagcctgggcctctttgaacttttcgccgtagcggtcggcttcggccaggtagcggctctctttttcggggaaaactttggcatgaatgttgatatagagcatcttcatgtaggcgaaggaattggcgaaggtcggatcgatctcgatcgccttgagaagagcctgctcggcttcgccggccacttcggctttttcgaagtcggacagaaaattctggagctgatacgctttgttgaaccggttgacgccgatcgtgtagagaacctcggcgttttggggctcgatgctcaggcgtttctggtgatagtccagggcccggtcgaatttatccttgaaatcggccgtcggcaggttgtcgtagtagttggccatataagcatagccctggaccgcgtcgggatcggtttcgatgcggcgaagatacatctgctcggccttcgtcttgagatcggcgttctcgccggcgtaacgcttgtagaactcggccgcgatgtaatagttgttcatgttgcccggatcgagctcgatgatccggaggaacatcttctccgcgctggggatatcatgaagcttgtcgtacatgtcccccagcgagtagatgatttccttgttgtccgggtcgatttcataggccttgaccagggcattgagggctttggccccccgcagcttgttgtcatccgaatccttgcccggagcgtagatcatcttgtagctttcgccgatgtaccggaacgcttccttcaagttgggattgaacttgaccgcttgttcatactcttcgatggccttcggatacttcttttcattgaacagagcgtttcccttgttgaagtaataattggcccgcagattgttgacgttcagcttctggcaagccacagtggaaacgacgatcgccacggcaaagagtccaatgattatgcgcgacgcgcgaatcctcgacatcttgacctcctgggacagcagtcccttgatgggaatagactccctttataaacaaagacgcccggaaagtcaaatcacgggggttttccgggggcgggaataaaaccgaaaaaccgggcttccgccgccccgcccgagggcggaagccgtttctcctccgccgtccgagcggcgaagcagccatcggttcggcggagggctatcctttcagctttgggccgcggagaagaatccggatggggcttccctcgaacccgaattcccgccgcatcctctggatcagatatttttcataggccggggccatgggctcccggacactggcgaaggccgcgaaggtcggcggcaggacggttttttgagtcatgtacttgatcgagaaccgccgcccccgccgggtcatcgggggatgttcggaattcaggacggcgacgaacttgttgagaacggccgtgccgatcatcttccggccgttgcggaaaacgcgctcagcctcctccaggatccgggtcacgtgccgaccggtcagggcggaaaccggaatcaaaggagcgtaattcacgaaatcaagccggctccaaagcgcccgctcgacctcctccatgaccacgtcctcctcgtggaccaggtcccatttgttcaggacgatgatcagcggtttccctgaatccagggcgagggcggcgaccgtcccgtcctgccgggccgggaactcggtcacatccaggaccaggcagaggacgtcggccaagggaatgtttttccgggccttgatcacgccggcgctttcccgctcgtcggcgaccttgccgaaccggcggatgccggccgtgtcgacaagaagataggatttcgagcctcgacggatcaaaacgtccgtgctgtcccgggtcgttccggggatttcgctgacgatggccctctcctccccgcagagccggttgaccagggaggattttccgacgttggtccggccgatcacggcgatccgcagcggccgggggccggcgtcctcctccccttcccgcggcggcgggaggagggaggcgacggcttcttccagggcgccgaggccgcgcttgtgctcggccgatacgaacagaagacgcggcgcgcccagccggtaatattcggccagctccggtctcgccgcgtccgtgtcgatcttgttgaccgccacgacaaacggccggcccagcttccggagcgaccggagcaagtcctcctcgaccggcagaaggccccgctgtccgtccaggagaagaatgacgacgtcggccgacttcgccgcggcccaagccttggccttgacctcgacggaaaagggctcggccggggaatcgagaaagccgcccgtgtccacgagttcgatccggcgttctcccaggcgggcttcgccggcgatgaaatcccgggtcatcccgggcagcgaatggaccagcgctttttttcggccgagaaggcggttgaagagcgtcgatttgccggcgttgggatagccgacgatcacgacacggggaagggatctcgtttcaacggacatggccggcgccttccggtcaatctccggcgatcttggagaaatcgggggggatcggacgactgatggcgatgtgcccggccagcgtctcccgttcctcgccgtcgaccaggagacagaccttccggacggatttcaaattgatcgcgagggaatcgacgacggcgtagatcgtcgcgatctcggcgctcgatccggacggatgccggtcggcgaactcgcgggaaaaatcgacataagcggtcccgtccttggccacatagacttgaataagcttggtttcgggcgggatgggggaaagaagccccgtccgggatccccggatgagctcctggatgatctggcgggcctcgaaggccggggcggcggcgtcggcgacgatctccctttcctcgggaatcagggattcgcgttcctcgtcgacaaagaggagccgcaccgtccgtttcggccgcgaatcctccggcatcgtctcttcctcggccgccgggccctcggccggccggatttttttgagggattcccggttgccgctcatgaagaaaatgagggccagtccggccacggccgcggctaaaaccagaatcaggatggaacgagcggatttggccatcggcgggttatttccggggatagagcttcaggtagcggacgagcccccggtgaagagcctcggcaaggtgatcctgaaagaattcgtcgttgagcttccgctcctcctcgggattcgagatgaaggccatctcgaccaggacggccggacaggccactccctggagaaccttgaagccggcttgtttgattccccggttctcgagcttgagggccgcgttgatctcctcctggatcatttcggccagccgctggctctgccggatataggccgtctgggccatatcccaaaggatcattttgacttcgtcctgggcctcggccggaatttttttgtccagctcgccgctcgtgttttcgaggtaggccagcctccgcgtctcctcgtccgaggcgttgacgttcatgaagaacgtctccgcgccgcgggccttgttccggaccgatccgttggcgtggatgctgatgaagagctgggcgtcgttgttgttggccacggccgcccggttttcaagggagacgtcgagatccttgtcccgggtcatgatgacgcggtaggacatggttttttcaatcaaagccttgagcttgaggctcacggccagggtgacatccttctcatgggtcccgaaccggcccttggctccgacgtcgagcccgccgtggcccggatcgatgacgatattgcgcagggccgcgaccggagcggcggaaaaaccggttccggaagcggcgaaaagcaaggcggacaggacgacaagcgcggggaagacgggagaagaaggcctgaaatttccagaaacgatcggcggtcgagatttcatatttctcatcccgcccgcattttaacaagaaacaacgcccgaaaccagagaagaggtggtggaggcggcgggaatcgaacccgcgtccgaagacattcagcgggaagagtctacatgcttatcctcttctttcatctcgcctcgcggttcccgaagaggaaggggccgctcggccagcctcgatgttgtttcgctccccgggctcaaggccggcccggctcgctatcccacgggttggcgctccggggacccggtgggagcgggtccggggaacggccgcctaactaattaagcagcgagaggaagtgtttctgcacttacttgggttccaccgtttaacgagagagatgggatctcggcatgcctctttcgcctcattatctccgtcgaatccatacgccccctttccaaagattttgggacactctcagtataggggcgggagggcgggaagtcaagaaaaaccccccttaaaaatccgctaacgccctcatttcattggggaacctcgtcccatttgccgaaaccgggaccggccgggcttttatagaggaggccgtgatcccccgttccgttgtcgttgtacacttcctggatgacggcgaattcgccccagatgtcgggaccgatctcgacgccgccggccgtgtgccagacgccgttcgtcttgaccgcgtcagccggaacggccacgattttgcagaaataattccagctgtattccctgccatcgccgccgggatacacgccggactgatggttcgtcagccaagcgcccgatcctttgtaggaaggaaagccgaaatgccggtcgagcttgccgtcgccgtcgcagtccttggtggagagccaagcctcgttccatttcatgatcaggttgtcttcgcggtacggccaacaccaaacgccggccgccgcggggttttccgccaagtaggcggcgtcgtccccctcgtagggagggaagccgtagcctcccaaataggcattggcataggaaccgctgaacatgcgggcctggaagttgtatccgaacacatcgtatcccggagcgagggggtgtcccgcaagataatgccccggagagtagaggacgatccccatggggatcgtcacgcaaccggacggcttgcccgccgtcccgttgtttcgggccccgaggccagccgcggacaggccggcgatcagagccaggaccacgaaaaccgacaggattgttcgcctcgttttcatcaacccctcctttatgggatttgaattcatcacttcattcgggatccgttctccagcttttcgattttccgcttgagcgcctcgatttcgtccttttgctcccggacggtcttcatctgttcctggacgatcttggtcagcatcgcgaccacgtccatcgccgacaggcctttccggccgtttgtcgccaccagggcggggacgtcctcggcgatgaaacccaggcgggtttcctctgggttcgccttgtagttgaacttcaccggctcgagagcctcgaaggcttgcattgcttcctccgaggccaaggcgacgatgttctccttgaactcgcggctggaaccgtccacccaagtcgtgccgtcgcagtaggccccgccgattccgacatccagcaaatgcgtcggcgaagcgccctgggtttgaatcgcgacatttccgcagaggctcagcagcttgccgctgaaatctccatagatgagaaggcccagcggtccgttgtcgttcgcgacatagagcttgttggaacccgtttcgtaataaccggcccggttgccgataaagacgttccggctcccggatgcgcaggacatccccgcctcgttgccgacgaagacattccggctcccggcattgtcatgcccagaccaatcgccgagaaaaacgttttccttgcccgcggtattattataaccggcctcggacccgacaaacgtgttgccgtaaccggtgacattgtaatatccggcgttcgcgccgacgtacgtgttttgatagccggtcgtgttggcccgtccggaattgacgccgacgttcgtattattggaaccggtcgtattggcacttccggaattccagccgaaaaaggcgttgcacacgccgttgatattggcttgtccggccgaggcgccggcaaagacgttgtatcttccgaccgtattggcggttccggccttgaagccaagaaacgtgttgtcatgaccgatatacgtcgagttcgcgccgtttgtctggccggcgcctcggcccacgaacgtgtttttgtatccggttgtgtttttttggccggcccagctgccgacaaacgtgttatcatatccccccgtgttattccgtccggcgacgttccccacgaacgtattatcatttccgccgttgctgtatcccgcggcatgccccatgaatgtattgtcatatcccgtcacgttcatgaatccggcggcgcgcccaaaaaagctgttatatatcccggtggtcgccacgccggcggccaatccataaaacgtgttcatcggcccttccatccccaagacatcgttcccggactcgtttgccaagccggatctgttgtttgtttccgccgcctgatccggttttccctcggagaagccggtcccggcctgagagtctccagccagcccgtcccgcgcctccgctacaacgccccagaggggctcctccaggacgatgaaacggcatccctccgaccaacagacctggacgccggccgtcgccccgacataccaaacataggttccgccgtcggccaatcgctcatccgccgtcggcgtccaggacaaagcccgccccgggatctccttaacgaggacggccggagctaaaacggccatgctctcataagggagggcgttttcgcccattgcttcaaaaacggccactttgtaggcgggagcccaggagaccgccgtccaactgaatgtcgggctgccccccttgatgactgcggttttacctggaaggccgggggagacggcgatgggagccatcctctcggccaagcagaaacccgccataaaaaccaaaagaaaaaaacatgtccccattccctttttcatctcttcctcctcttcatgctcttcatggattttggaaaagaaaaagaatgattgaaagaaaaaacggcccttgacccttttccgaaggcggcattcgagcccccctcaacaaggcgatgagcgccctgatttgtctctcaacatattcctcttttatttcgatgtcaacatgtgttttcaataagttacgtatctttttaggaaggttttcatccgcggaaaccggctgaaattcgcgtcgactccgaggaaacgacggcgatgcggcttgttatgataagcgcgagccggccggcccgccgcccgccctgcaaccgacaaggcgaagcgggcggcgcgaaagagaaggttagaaacaggaaggcgccgtcggcaccggcccaaaccgcttccttctttctttatcgatattatccccccgacgccccccttagaataaggggggaacacgactgcacgatcaaaacggaattattttaattccgacaccgcccttaagaccttaatcttatcgtatttacctccccttcccctcctgagaaacaggaggggccccgaaacaggaaggcgccgtcgggggtatgattggcggggccgacgagacttgaactcgcgacctctgacgtgacaggccagcgttctaaccaactgaactacggccccgcctaggaggccggaaaattatagccgggcttggacgatttttcaaggggtgtctcatatcaccttgatattcaaggaaatcataagccggaatccctctccgttcgcccgccgggcgcatttcgaatcgaccgagtcgaaacaagattccatcaaaaaacggcgacgcccctcccccggcggcgggatgggaacccgccaagccggatcggcgacccgggctacatattttccagggccgcgatccgctcctcgaccggcggatgggtactgaacagccggttgaggctccccttgaggtttttcagcggattgacgatgtacatatgggcggtggccttgttggccgactcgagcggctccgcgtcggccgatatcttccgcagggccgaggccaggccggccgggtaacgggtcatcatcgctcccgacgcgtcggccaggaattcccggcggcgggaaacggccagccggagcagctgggcgacaagcggcccgaaagcggcgaagaacagcccgatgatgagaaagatggccccgacgccggcccggtcgccgctgattttccggcttcgtcctccccaccacagcgaccgcatgatccagtcgcccaggagaacgaccaccccgaccatcaccacggccagcgtctggaggcggacgtcataattcttgatatgggccatttcatgggaaatgacgccctcgagctcgacccggttgagcttctgaagcaaccccgtcgtcacgcagaggacggaatgagacggatcgcgtcccgcggcgaaggcgttgggcgccgtgtcgtcgatgacatagcagcggggcgcggacaggccggcggcgatggccagcccctcgacgacgttgaacaggtaaggaaactcctccttggcgaccggacgggcatggctgacggccaaggcgatcttatccccggcgtaatagctcgtcagggccgatccccccgcgatgagggcggctaaaatcaatcccccctcccccattccggtcagccgctcgaacacccagcccaggagaagaatgacggcaatgaaaacaataatcaggagaaacgagcgccgcttgttgctcgagatatgttcatacaatggccgcctccggcgcggaagggggcgtcccggcaaccgccgggacggccgggcctccgtttcaggccttatcctgaattcagaactggaccttcaccggctccttggccgccggttcttcgatctcgaaatattccttgagcttgaactggaacatcccggcgatgatgttggccggaaagacttgttgtctcgtgttgaatttcatgaccacgtcattgtagaactgccgggcgtaagcgatcttgctttccgtcccggccagctcctcctggagcaggaggaaattctgattggctttgagctcgggataggcttcggccacggcaaagagggatttcaaagcgccgctcagcacgttctcggccgctcccaggtccttgactccggtggcggcgatggccgcgttccgggcctgggtcactctctcgaaaacctcgcgctcgtgcttggcgtagcccttgaccgtttcgaccaggttggggatcaagtcgtaccggcgcttaagctggacatcgacctgggcccaggaattatcgcagcggttgcggagggtcaccaggctgttgtaaaccccgatcgcgtagagaacgaccgcggcgaggatgaccaggaaaacgaacaaagcacccatctcgttttctcctttcgaagtgttcctctaaagaataggaccgccccttcgaaaaagcaatagaaaaaagtacgggatgacggagcgcttccggcattttccctcccccctgcccgctctttttcgttgacttactttatttttccggataaaatcgctattctcccgagattgttttcgggatgatcaccgcagccatttcataaaaaggaggcttatcgaatggcgacgactctgaaggagaaattcgcggggaaaatgcttcccatgcgagagaggattcaaaagatcctcaaggagcacggcgacatgaagatcgccgattgcacgatcgcccaggcctacggagggatgcgcagcgtcaaatgcatggtctgggaagtttcggctctcgatcccaacgagggaatccgcttccgcgggctcacgattcccgatctgcaggccaagctgcccaagctgcccggcacggaagagccccttccggaaggcctcttctattttctcctgaccggcgacatcccgaccctcgaggatgccttggccgtcggcgaggagtggaagaaacgggccaagctccccgattatctcgtcaaggtgctcgaatccctgcccgtcgaaatgcacccgatgacccagttctccctggccatcctggcccttcagaaagacagcaaattcgccgctcagtaccgggccggcatgaataaaaaagattattgggatccgatgttcgaggatgtcatggacatcctcgccaagctgcccgagatcgccgcccgcatctacacgcggtcctacaagggcggcaagtacatcgccccgaatccgaagctcgactgggcggccaacctggcccatcagctcggcaacgacaagtctgatttctacgacctgatgcggctgtacctcgacatccatagcgatcacgagggcggcaacgtttcggcccataccggccatctcgtcggctcggccctgtcggacgcctactactgcctgtcggcggccatgaacggcctggccggcccgctccacggcttggccaaccaggaagtgctccgctggatcatggacgtcatgaaagacctcggcggcgtgcccaacgaggaacagctgaccaagtacctctgggccaccctgaacggcgggaaggtcatcccgggttacggccacgccgtcctccgcaagaccgatccccggtatgtcgcccagcgtgaattcgccctcaagcaccttcccgactacgacttgttcaaggtcgtcagctcgatttacaaggtcgccccggacatccttacgaagcacggcaaggccaaaaacccgtggccgaacgtcgacgcccactccggcgttctcctgatgtactacggcgtcacggaatacgatttctacaccgtgttcttcggcgtcagccgggccctcggcatcctctcccagctcatctggagccgggctctcggcttgccgcttgaacgcccgaagtccgtcacgaccgactgggtggaagcccagatcaaggccgcctcggccgctccgggttcgaccccgagcttggtttgacggcctgaacgacctttaccgaaagggccgctccccgcgcggggagcggccctttttttatctccgcttttttgggcgcggttccgcgccgtcgctttcgaccctccgttacattttggacacgcggaagatcttaaaaagatccatgagagtgccggtcgcaaagctcacggtgcgggcatccttgcggaccgcgcccggaatccaggacgcgttctgggcttccgactccaggatgaaggagacgtccagggtataaggcggcgggagcttgtacggtttgaaatccttcagccgcttgagagcggccgccgctttttccgtgatcagcgcccgggctttggacgggtgcaggccgagctcggcgttggcgatcgcttccttgacgacggcggtttccacgtcgccgaacagctcccgggcttgggcggcgatggcctgatccccggagacgagaacaacgggaacgccgaacatcccggccatcagaccgttgattccggcttcgggcatctcgatcccgttgatgacgacgcccagcagccgggaggaaatgttcgtatgatcgaggacggcgttcggcgtcccggcccgggcgtgatacccgataaagaatacggcatcgaacgtatcgtcgatgccttccatcatgctcatcgggccgcccgaccaatcccggaggagccgggcctcgggccgcaggagatccggcacgatgttgcgggccgagccgtgggcgtcccggacgacgatgtccgtcgcccccgcccggagcgcgccgtcgatggccgcgttggcgtcctcggtcatcgcccgccggaagagctcgtaatcccggccggacgccgaggtctcttcccagttgatcaggccgctgacgccttccatgtcgaccgagatgaagaccttgagcccgccggcgggcgccgggccggcggcgccggcggaaaaaacgattccgccggccagcaggagggatatcatcattctattcatgccacaccttccttggaatgatgggatcatgataatgaaaaccaggacgagcggcaagcgggcggaagaagcgccgtcctcgacggcggcggcgttcagcttgaggattccccccgtcccctcccggcttcctgctccagggcggcgacgacacggatcatcgcctccgtgtccaagccgcagtattcctcgagctgtttccggactcgagctctctcgtccggctcgacccgtccgaacgtgatccgccgatactcccaagcggcccggctgccgtcgcagatttccaaaccctcatagccggggccgccggtcacggccggcagaacggccttcagcgaggcgcttccgatctgggcgggatgatagaaggcgaaggtccggaacggaacaaggagatcgacgaacctcttctccgtttttttccaccaagccttaaaggccggcgcggccgcgaccgcctcttccacgattccgcgctcgaaagcggcgttatagcagatgaccgggccgaactctcccaaacagcctcgaagccggtccaggaattccggccgcgggtcgacgtccccggcggcgagataggaatgatgctccggatcggcctcgggggccgcgacgatgtggagggaaaattgaaacggcacttgctgatacgggcgcgtcccgtcatacgccggcacggcggtttgaaacgtctcgaagtcgagataggagcgcggataggcgagctgttccaaaaattttcggagctccgcggttttgacgaacgggagccctgtccgggccgcctcgatctggatcatttgctttttcccgatcttcaaggaagccgcgaggccgggggatccggcgctgtcttcagccgcatcctttctctcgatcaccggcatgtcgccgattttcaagatgcccccgcgaatgagatgaaaagcggcctccttgctgaatccgttgaccctcagcggattgtcaaccggaaggaacgcccagcaggcgtcatggaggggacagaggaagggatcgtcgcaatgggggccgatcggcgcgtccggggaggagtcccgctcgagcagggcgagcatcgagcgcaggttcgcctcgacgttcttcatttctccggcgacggccgcggtcacgtcctcccgggcgaacagccggtccgcctcgaccggaccccgacggacgtacgtgttgtcgatatgcatcagaaagcacttccggatcttcaagccgctgctttcggccgcgaaccgctgcagcgaaaggtcgaggatattgaccggcttgacctcggttccgctcttgacctcgacgatatcccaggcctcgctttcgacgggaacgagtatgtccgccctggcgaaggcgtgtcgggctccaaacgccgcctcatagagaggaactcgttttttcatggcctcccgcgtccgggccatcaagtccgcgaacttccacggctccccctcgatttccatcccccccgggaacagcgtcttggccagggcgccgacttcgtgtccctggtcgaagatcgcctgggtggccgcgtcgggcggcggaaccgcctccggctttttatagtacgtccaaaacagcttcgggcattgaagaccggccaggtacttggattttgaaatcaatcgcatcgcgtctcccgcgccgcccgccgtctcagcccggcctcaaggccccttctctccgatagcgggtgaacaggcggccccagtcggattcctccagccaacggcggtacaggggcccctccttgagcttccagtggaggatatcatgatagaagaaggaatagaaattcgcgaaataaagaaccggcggccgggtgaggaccttctgcatgaagcgggtcggtccgaaccaagtcagccagccggcgaacttgtggaagcaaaggccgacttggaatccccactgttccgctcccgcggcctcgtccccgacgatctcgatgtcccgcggatccccgacgccgaggccgtcctcgtgggccatcctgatgtacggaatgccgagcgggtcgaagcccatcagccgggccgcggccgcgtcgatcgcgacctggtccgccccggccaaaaaaacgtccttgcggacaggctccataacccgcgggcccgggccgttgccggccgtcgtcccgtccatgaggcagaaaatcccggggtggatttccttttggatcgccaggagatcgaccagggtttcatgaatacgggtgtgggtctggtggcgcttgtggttcagaagtccgccgaaggcgttcttcatcgctccggtcgtggtcgtgtagatgtggcacttgaccgtcggcaggtggacgatgttccgcccaatgaagaaatcggggatccggagcgagcggccgtagatcgcatccagggcccgcatcctcgcccgcggcttgaaaggcacccaggccatgtcttcatccttgaaattgaaccggacctcgacatcatgggcccggaagacgggcttgtagccgttcaagtcctctcccttgaaggcgtcggtgacctcggtcttgttctgaacgcagacgagatcggagaatccgtgcttgcggagggcgagaatcgtcccctcaagctgccagggagtcgtgttggccgagggaaaggggtaatgccagctgatgttgtccttgagaatcgtcggcaggccgcttttcaaggcctgcgggccgccggccagctcaaacgcccggacgatatcgtccaggacgctctcgggccgggtccggatgatcgccaccctcgctttgctcacatcgccctccttcccggatccggggaaggggattataccatgtccccggcgggaccaaggccgtctccgcacctgttttgattcgagaacggcattcgggtatgatgaggggaagaagacggggcttcggccgggccggagccggcaatatgcttatgggaggagaccgcatgcccgacacaccctcatacggaccgggagtcatgaagtacgtggtcgaagcgcaaaagctcatcgccgaacgaaacggcttgatcgcccgggccaagcaatggaagttcgacaccgtcgccgttcacggcctctactcgctcgaagaatcctatgtccgcaaccaaggcgcggtcatcgagccgctcttcctctcggattcccagcattaccgggacgccgacgagctcgaagccgccctggcctatctgattcccacgtggtgctactcccggatcgccaatccgaccacctactacctcgaatggacgatggccctcctcgaaagctacaaggccggggtggacgcgtcgtgcttggtcacggcctctgggatgggcgccatctccatggccgtcgatcccctgctcgtacggaaaaataacagcgaaaagatcaatttcgtctcctccatccaggtctacggaggcacgttccagctcttcaacctgcgcaagggccaggagagaggcttggaagcccgctgggtctgcaagccccaccacatcgaggactgggccgccaaggtggatgaaaacacccggttcctttacatggaagctccgagcaatccccagcagtcgttctgcgacctccgggcggtcgccgacctggcccacaagtggggcatccccttcatcgtcgacgccacctgcgccacgccggccctgatgcggcccctggcccacggggccgacatcgtcgttcattccatgacgaaatccatcaccatgagcggaacggccgtcggcggggctttgatcagccgcaagccgattacgaccaaggtctccaacgaccacccgcttttcaaggacagctacgccgagtacgtgaagttccttccctatcgggacaacggcccggccgccgccccgttcaacgccatgatggccttgaacgaattacgaaccctgcgctcgcggatggacctggtcagccggaattgccagcaagtggccgagtggctctccggccatccgaaaatctaccaggtcgactacctcggccttccctcccaccctctccaccctctggccaagaaatacatgacgcttgtggattccgacgatggaacggggcgggaagtcaaccggtacggccatctcatgggcttccgggtggacggccctccggaaaacgcccgcaaggtttacgacggcttcaagatgatctaccgggccaccgacctcgggcggatcaagagcgtcgccacgatcccggctatttccacccaccaacagcagggcgaggaagcccggcgcatggccgacgttcctccccagctcattcggttgtgcgtcggagccgaggatccggccgacgtgatcgccgacttggaccaagccctgaaacggctctgaaggaacgccgacaatggaaaaaatccgaatccgaggaggccccgacctccctctccggggaagcgtccgcgtttccgggtcgaagaacgccgtgcttccggcgatcgccgccgccttgctgaccgagaacaaaatccggctggagaacgtcccgcttgtccgggacgtctactccatgatgaccctcctcggcgagctcggggccgaaggcgacctgcgggaaaacgtcctcgaaatgcaggttccgaggattcaccgggaggaagcctcctatgatctggtcaaggtgatgcgggcttccattctcgtcctcggcccgctggtcgcccgcttcggcaaggcgatcgtcgccctgccgggcggctgcgccatcggctcccggccgatcgacctgcacatgaccggccttcacaagctgggggcgtccatcaccctggagcacgggtacatcaaagccgaagcccctcgtcttcagggcgccgacatccacttcgagaaaaacaccgtcggcggaacggaaaacatcgtcatggccgcttccctggcccggggcgaaacgattctacgcaattgcgcccgcgagcccgaggtccagaacctctgcgagcttctcgtcaagatgggcgcgaaaatcgacggcatcggcgaagaaacgatgcgggtcaccggcgtcgactccctcggcggagcggtccacgagatcattcccgaccggatcgaggccggaacgtacatggtcgccggagctttgacgcgcggcgacatcatcctcgaccgcgtccgccccgatcacctggtcacgaccatcgagaagctgcgttattgcggagcccggatcgaaactcccgaaaccggcaaaatccgggtcgtcggatccgctgaaatccatcccgaggacatcacgacgtcgccgtacccgggatttcccacggacatgcaggcccaattcatggtccttctgacccaggcttcgggaacctcgatcatcacggaaacgattttcgaccgccgcttccagcacgtcaacgagctcctccggctgggagcatccatcgaagtcagcggcgacaaggcgatcgtccggggaccgtcgcggctgtccggagcggaagtgatcgcttcggaccttcgggcatcggccggtcttctcctggccggtctcatcgccggaggcgaaaccgtcgtcaacgaggtcgaacacatcgaccgcgggtacgaagccatcgaagccaagctccgccagctcggagcacggatcgagcgcatcaaggagtgactcccaaggggacgtccgcaaggaccaaggagggccgccgtgaaaagagattgcattttctgccggatcgcctccaaggagcttccggccaagatcgtctacgaggatgaccggatcgtcgccttcgacgacatccggccccaagcgccggtgcacaccctgatcatccctcgggatcatttcgcctctctcaacgaggtgccggccggccggatggatctccttcagcacatcctgtccaagatcccggccatcgccgcggccaaggaggtcaaagccggcggttatcgggttgtgctcaacaccgggccggattccggccaagacgtcttccatctccactttcatctcttcggcggccggaaaatgcactggccgcccggataacatggcttatctcatcgacggcaacaatctgctgggccgcctttacgccggatatcatcgggatcctgcccaccgggcggcgctcgtgggcaagcttcgcgcctttcaacgcctgacccggagccgggtcgttctcgttttcgacggatgcgctccgcccggcttcgtcgatcccgggaaggagaagttcgccgtcttattcccgccgccgggcgagtcggccgacgccgtcatcgtggactacatcgaacggcatcgcgaccgccgtcacttgtcggtcgtcagctccgaccgggaaatccgggccgtcgcccgggaggcgggagccgcggacgtcagctgcgatgacttcgtccgggagctgaaagccacactccgccggggccgggaggcgcgggagatggagaaaaccgaggaacgctcgtccgccctggacgttcagctttgggccgaggctttcgcccggaaaaaacacgcatgaaaatcgccgtcatcggaaccgggcgggtggggacctcgctgggaaactccctggcccaagccggatatgaaatcgccggcctggccgacgccgatccggcggctgcccggagggcgcggaggatcatcggccgcggccgggtgtttcgggatccggtcgccgccctccgctccgcggaggtcatcctcatcgccgtgccggacgacgcgctggccgggctggcctcagtcctccaagccggggaatgggacgggcggggcaaaacgctcctccatacaagcggagccgcgcccgccgccatcctcgcccccttggcgaaacggagcgccgcggtcggctcgatgcatccggcccaatcgtttccgacgccctcgacgccggcctcgcacgcgcggggcgtgattttcggcctcgagggcgatccggcggccgtgaggaaagcgaaaatcctcgttcgcagtctgggcggtcggccccttcttctcaccgccggacaaaaaatcctgtaccacgcggcgtgcgttctcgcctcgaacctgttcgtcccgctgttcggactcgcggtcgagaccatggccgaggccggcattcccgccccgaccgcgaaaaaagccctcctgcccctggtcgaaggaactttacgaaacgttaaaatccttgacgccgaaaacgccctgaccggccccctggcccggctcgattatgaaacggtcgcccggcagatgcgggcgcttcgccgggtcccccgggcccgggacgcgtaccggaccatcggcttggcggccctggaattggtgaagaaacgggggattccggacgctcgggtcaaacggctccgggctctgctggaaggaaaataacctcctcctccagccggatgccgaaacgatccatcacccgctccttgaggaggtcggccagcttgcggacatcggcggccgtcgccccgccgcgattatagagaaaattcgcatggccgtggaagacggccgccccgccgaccgtcgtctccttggctccgacttgttcgagcagcttgcccgcggccagccgcgttccctcggagctcaagggattcttgaaaaagcttccggcataagccgtatcccgcgagggatgacgctccgtccgtaaggcgatataggaatccatacaggtcccgattttcgttttatcggccggaaccgcccggaaagccgcggacaggaggatttcccgggtttttttgaggcgggaatcccggtaggcgaacgataaatccgccgggcgggcctttatccgttcctttccgccgggatccagaagatcggcttcctccaggacatcgccgatcgagcagccgaacgcccccgcgttgccgtaaaccgccccccccacggttccggggatgccggccaggaattccaggcctccgaggccgcggtcgcggcagtatcccgtgagatcggaaagaggcgtccccgcttgggcaatcaagcgggaggatttcggttcgaagatgaatccgcggcatgccacccggatgatcaaaccgcggtagccggcgtcgtcgaacagaagattgaatccgcccccgatcacgtaatgccgatatccggagccggaggccaactcaacaaccgtccggagctcgtcggccgcggccgcctcgaaatagtgatcggccgggcccccgatccgaaaattcgacaggctttccagccggatcccggccgaggggcgccggccggttttttcctcgatcaatcgggcgatatcaaccatcaggcgcattgtatcccgggccggagctcgatgcaatgaaagagacaagccgcaacggccggagagtccgtccggcccgcgcacctcgcgtcctcgttttcgttcccggagccgttgtccttcgaggccgggcgaagccgtgccgccggatcggtcgctggatttttggcacgcgatttgcatatagaagacgaagaagaggtttcgttgaaccaagttgttgacatcacggaaaaaggggactatgatgctaaaaaaattttttgtgaggtcctccatgaaaaggatgctgttaacggccgtcgtattttcaatgatcgcgggcgccatcgccttcgcccagagcgaggcggaccagttctacatcaaggccatgcaagcgtccgccccggcggagaaagcccggctgcttaaggaatacatctccaagttttccggccagggcaaccagtacgacagctacgcctacgccaacctcgccatcatccaataccagtccaagcagtacaacgccgaaacgatcggcttggcggaaaaggcggccgccagcggcaagatcgacgatcagatgaagggcgccatgtaccagatcgtggccgatatccatctcaaaacgaaccagttcgacaaggccaaagcggccgcccagcaggccattcaacacgccaacgcggccaaggggaaagagggggaagcggccaacgccaagatgtggactcagacgatcggccaggcgtacgtcctgacggccaaggcccaggaaaaagccggcgacatcaagggggccatcgactccttcaaccatgcttatacgaccctcaagtccccggccgttctcggcgagctcaagaaaatcggaaagggctattacgatgcgcagaaatatgcccaggccgagcccatcttccgctacctggccggaacgggcctggacgccgacagcatgacgattctggcccagatcctcaacaagcagggcaaggaagccgaagcccttcaaatgttcaaggacatgtacgcgaagaacaagacgggatccatggcttataacatcgggatcatgctggccaacgaggccaaaacgaacccggccctggtcaacgatgccgtcgcttttcttctcgacgccagctttcttgacacgaaacggtcgaagcagtgcaccgacatcgcccgttccttgttcttcggccaggacaaggaatggaacgaccggatcaagatgatcgacgagagccaggccctcatcaaggaatggaccgatgccatcaactccaagtacggcgataaaagcgaggaggacctgactcccgacgagcggcgggaattccgcaagctcaaggaattgatcgacaaggaaacggttgcggtcaacaacctcgtcgcccagatgaaagccggatcgagcaagttcgacgccctcgtggcgtcggcgaaaaagcgcgtcggcaagtaagccccgggccgacggacggtccggccatccccctcgccttccccgatccgaaaggaacggagggagccgagggggattttctttagaggggcgatttcgctaaaatgaagggcatggaccgctccgccgccgcggcgatcgaccgcctcaggaagaaaatcgcttatcacgaaaagaagtactaccaggacaacgatccccagatttccgacgcggaattcgatgccatgatgagggagctccggctcctggaagaagcgcatcccgaactcatcgtcccggaatcgccgacccagcgggtcggcggacaaccggtcgaaggctttccctccgtccggcaccgcaccccgatgctcagcttggacaacgtgtattccgtcgaggaattcgaggaattcgaaagccgcctcctccgccttctccccggccggacgatctcctacgtcgccgagctgaaaatcgacggcctgagcgtctctctcctttatcgggacgggcgcttgatccaagccgtgacccggggagacggaatccaaggcgacgacgtgaccgccaacgcccggacgatccgaaccttgccgctgaccatccccgaacggcgggaggtcgaggttcggggggaaatctaccttccgttcgcctccttccaggaaatcaaccggtcccgggaggcccgcgaggagcctctcttcgccaatccgcgcaacgcggccgccggctccatccgcctccttgatccccggatcgtcgccgcccgccgcctcgacatgttcctttattacctgacgatcgagggaaaggaaccggcttctcagtgggaggagctggagttgattggggccctcggcttcaagaccaatccccattcacggcgctgtcccgacgcggccgcggtcatcgccttctggcgggaatggaccgaccggcgcgaaacgctggattacgacgccgacggcgtcgtcatcaaggtggacgacgaagagcagcgccgggagctgggattcacggcgaaatttccccgcggagccgtttccttcaagttcccggcgcgtcaggccgcgacccgtctccgggagatcatcgtccaggtcggccgaaccggagccctcactcccgtcgccgtcctggatccggtgaaaatctccgggacgaccgtctcccgggcgactcttcacaacgaggatgagatccgccgcaaggacatccggatcggcgacatcgttctggtcgaaagaagcggcgacgtcatcccccggatcgtcggcccgatgaaggagcgtcgcacgggctcggaaaaggagttcgtcccgccgggccgctgtccggtttgcggatcccgcgtccatcgggcggaggaagaggtcgtcgcccgctgcgagaatccctcctgcccggccaagctccgggaatcgctcctccacttcgccggacggcgggcgatgaacatcgaggggctgggcgaggcgctggtcgaccagctgcttgaaaaaaacctcgtcgcttccctccccgatctcttcgcgcttcgagcggaaaccctggccgccttggaacgcatgggtccgaaaagctcccaaaacctcgtcgaggaaatcgaaaaatcgaaggccaacgatctcgggcggctgatcttcgccctcggcatccggcacgtgggggaaaaaaccgcccggacgctggccgaacggtatgccgacatggacgccctggccgccgcctcggaagaggagctccgcctgatcgaagatgtcggccccgtggtcgccgaaagcctggtcttttttttccgccagccggaaaatctcgatcttctgaaaaagctcagggcggcgggggtgaatgtccgatcggaacggaaggcgccggccggcgaccggccgctgaccggaaaaacattcgtcctgaccggaacgctcaaaggatacacacgggaagaagcccgggcggccctcgaagcccggggagccgcggtcacggattcgatctcgaagaaaacaacctatcttatcgccggagccgaggcgggatcgaagctcgagaaggcccgcaagctcggcgttccggtcctaaccgaaaaggaattggacgccttcctccgggattagaagagggggcggttccggccggttttatcgttttttcttaggcccaaaaatgtcggaggtaaagaggctcttacctttcttatcctcggtcccgccgcccatcgattccaactcctgccgggcggcttgatgaccgggctcgatttcaagggcccgttcaaattgtctttttgcccgggtgttgaggccttccttcttgtaaaggatgcccaaaccgacgattccttccggattccaaggctccagctcgaccgcccggagaaaattcttctccgctttcttgcttaaaccgcggatcttcgattgggccagggctaagagaagaaaataatcgcccttgttgtcgttcatccggacggcttcctcgaggtactggaccgcttcatcgtagcgggcttggttgtacagggttttcccctgccggaacctcgtatccgcgctccgaccgggatcccggtcggtctcgtcggccggcggggcggattcgacctcggcggcggcgccgttggctgtcgtcagcgccttgtaagacttggtgatgcggtcgaaaagttcatcgatctgctttttgatctggggatcgagggttcgaccgaaccggtcgggatggaatttccgggccaaggcgaaataagctttcttgacttcggcctcgctcgctgacggatacaacccgaacaattgatggtggtcgagcttggccatgcgcttgcgaagctcgaccgcctcataaatggcttcatcgagctcctgggaggccttatcggccgcttcttccgcggccttagggggtttcacggatttgggcggttccggcggcttgggcggttccgcgggcacggccggctcggcggagaggagcggttcgtcggaaaatggaaaagacggagccgccgcggccggcggcgcctcaaccgcgggctcggcaatcatggccggctcgggaatgctcttgaattccaccaggtcaaggcaatacagcagaaaaagggttttccagaaccagttgggatcggacgcgtcccacgtcatgatgtattcgatgttgaccgatccgtcgagccgatgccagagggcccgctctttctcgtcgatgctcgaaaggagctcgccctccttggcgacgagagccttgccgaaaaagaaggaatggatcgccgggtggaaagacatcgcccggacgcctttttcgatcaggagcggaaggttgactcgaagctgaaaatccgcgtccaagtaacgttcccgcgggtcaaaagagtaggtggcgtcgaaaaagacgaagcatcccagaatgacggcgtacatctgggccaggacgccgtcataaaggcccctctgcgagatgacccggttctgaaccaggacctcgcccaggagcatgtccggccggacgaagcggccgattccagcgaacgcttcggccgagatcttccccgtccgcaaaaggatttccccgagccgctcctccgagacgttggtctgggcgtggatcaggcccccatcctgaaagaagaaggctttttcgatgcccgtgcgagaaaacgcaagcttccctgtctttttaccgaagtaaacgtctttgaggtggagagcgatatggttcactgagcttattttaacgaaaacaaggaaaatatcaaaatttggcccgtccacggatttatgctaatttgaagacatgaaaatcgccctggcccagtattcgccggttttgggagatatcccccggaacctcgactcccacctcgagctctccgccaaagcccgccgggccggggccgatctcctcgtttttccagagctgagtctgagcggctatcggctgcgcgatctcgtcgccgaaaccgccttggaccctcgctcctcccggacattcgcctccctgcgcgaggccagccgcgctgtggccctggtcgtgggattcgtcgaagagtcgcccctggaaaaggggttgttttataactccgccgcctttcttcacaagggatccctcctccatgtctaccgaaaggttttcctgcccaattccggcatgttcgaagaaatgcgctttttcgctccgggacggaccttccgctcctttccaacgccctggggccgggcgggccttctgatctgccgcgatttcctccatctcaacgcgcattatctcctgttcgccgacggagccgagatcattctcgccgtcagcgccgcccctggccggggcgtcggcgaagagaacggattcacctcctgccggatgtgggaagggatcggggaaaccgtctcccgggtcaccacctccttcgtcgtttattgcaaccgggtcgggatcgaggacggagcggtcttcgccggaggttcattcgtctacgatcctttcggccggcgcgtcgcccaggccccctatttcgagccgcatcttctcctggctgatctcgatcccgccgccgtccgcaaggcccgccaagccctgaccctcaaacgcgacgaccgtccggacatcaccttggccaacctcgaaaggatgatccatcgcgatgcgcattaacgctctcttcgtcgaaaagatcctgaccggctttatccgcggggagctggccaagcgcggcttcaaaaaagggattctcggcttgtcgggggggctggattcggccgtctgcgccgtcttggccgcccgggcgctcggcccgaaaaatacgatcgccttgatcatgccctacggccgcggattcggcccggatcttgaggacgcccgggacacggcccggcgattgaaaatcgacgcccgaacgatcgacatcgccccgatggtcgacgcctacttcaagagacacccgagcggcgaccttctcctcaagggaaataagatggcccgcgagcggatgtccatcctctacgactggtcggcccgggaaaaggcgcttatcctgggaacgagcaacaagagcgagcttctcatcggctacgggacgatccacggcgacttagcctgcgccgtcaatccgttgggcgacttgtataagactcaggttcgagagctggcccttcacctgggcctgccggagcgcatccggacgaaggcgccgacggccgggctttgggccggtcagacggacgaggaggaaatcggcctgacgtacgatgtcctcgacgagattctcgaactcttggtcgaaggccgggaaaccgcggccgaagtcgcggcccgcggcttccccaaaaagcaggttgagaaaatcaccggcctcatccgccggtcggagttcaaaaggcagatgcccccgatcgtcaagctttcccaccggacgatcggacacgattttctttatccccttgaacggggccgttgagccgtgatcgggacgctctatctcgtcgccacgccaatcggaaacctggaagacatcacgtttcgggcgatccgcgtcctccgggaagcggatctcgtcgcctgcgaagacacccgccagaccctcaagctgctcaacaagtacgacctgaggaaaagcctgatcagcttctacgagtaccgggaaaagcagcggattccccgcctgctcgatcttcttcaatccggaaagtcggtcgccctggtgacggacgccggcacgccgggagtttccgatccaggtttccgccttgtccgggaggcggtccgcctccaaatccccgtcgttcctgttcccggcccggcggccgtgatcgcggctttggccgcgtccggcctgccgacgcaccggtttcttttcatgggcttcgcgcctcccaagcgggaagccttgcgtaaaacgctcctgtcgatccgggaagaagaaggaacggtcatcttctatctcccggcccggaaaatcgagctttttctagaaacccttccggcggatttcgcggaccgtcttgtcgtcatcgcccgggaaatgacgaagatccacgaagaattcctccggggaaccccggccgagctccttgaaatcgccaaaaggcgcgaattcaaaggagaagttacgattctcatccacggagccggaagaagggaagccggttcggatcgttccggctgaagctggaattttcgaatttttttcttttttaaaaaatatttccgaacagcagaaacatagagactttattttattaattatcaattatttataatgtaaataataattaaataaattttttaatattacttgacaatataccgcttagatattatattggacttggccgcttataaggccgataacgaaaaattaatcaggaggttcaatatggctatcatcagatgggatccctttcgcgacatgatgacgctgagggaaaaaatgaaccggcttttcgacgactctctgtcccaaaagggagaggagagagacatgttcacgagcaactggtcgccggccgtcgatatctatgagaccggcaacgagctcgttctgaccgcggaagtgcccggcatcgacgagaaagacatcgaaatcaaggtcgaggacaacaccctgaccctcaagggcgaacgcaagttcgagaaggagaccaaggaggagaacttccaccggattgaaagatcctacggctcgttcttccgggctttctccctgcccaactcgatcgatgccgaccgcattcaagccgagcacgaaaacggcgttctccgggtggtcatgcccaaacggcaggaactcaagccgaagacggtcaagattctcaagccttctgaaaaatcgaaaaagtaacgacggatcccctcctccgccgtaaaaatgacggggcgaaagccccgtcatttttttttctccgccgtttcaagcctgggcgacggtcacggccctcacctcggccgcccccgctcctctgaggacgcgggcgcattcccccagcgtcgagcccgtcgtgtagacatcgtcgaccaggagaacgattctcccctcgaccgcgcgtttccggccgacggcataggcgccgcggacattctcaatccggtcgcggcgctccagggacgtctgcggcggcgtgctccggatcttttggaggaccttgtgggcgaccgggattccggtccgccgcccgatgtcccgggcgatatccgcggattgattgaatccccgctcccggcggcgtttcttataaagcggaaccggaacgatcagatcgacatcccgccacagctccccgtccctccggagggattcgtggatcgcttttccgaggatgggggccagcggccggcatttcccgtacttcaggagtaaaaggacatccttgagaacgccccggtagcggccggccgaacggtgccggctgaaagacggcggggacgccgcgcaggcgccgcaggcatggctttctccggccccctcgtacagctttccgcaaaagggacatttcggagaacgggaaagctcgattcgctccagacaatcccggcaaaggatccgctcgccgggcttttccaaaagccggccgcatattttgcagaacgaaggaaagaacgcgagctcggccagtcggccgattttcgaaaaaagcggcgcctgggccaaaatcaggctgtttcagcttcgctcttttcctggcactcgatgcagaaggaggtccaaggaatatgatggaggcgttttttgccgatctccttctggcagctcaggcagagcccgtattcgccccgggcgattcttttgagggcggcatcgatctgaaggagctccccgcgctcggcgttggacaggctgaggaggaattccttcgtataggagctttcggccttgtcggccagatcctgggcgatgtcggtttcgatgattttactctggttttgggcttcgctaagcttcctgatgatttcgccccgccgcgtttcaagggttttcttgacggcttccagctctttcttgttcacgacgctccctttacttggcataagatcttcctttcatgagtgatgcgccgcggtagatctgctccagcaaaaccgcgcggcagagctcgtgggacagggtcatcttggacagcgacatccggagatcggcccggtccaggatccggggcgccaaacccagaaacccgcccacgacaaaggccagcgatttcgttccagagaccgctcgtttctcgatgaaacggccgaaatcttcggaattcatctctctccctttgtcggataggcagacaatataatcatctttaagccgtttttcaagcccccgggcctcaatttccaagattttttcggtttccttctcgtccaggccccgggaagcctcggtgacgacgatttcgcagggcaacaaaccggcgagacgcttcagataaaagtcctccagcgcgcggaccgccgccgttttcgtccttcccggccaaagaatccggatccgcatcccttttgcctctccccggcgaaagacgcctcagaccatcaagctgggcgcatcgctccagagccgctccagggcataatagtcccgggaagcgggggagaagatatgaacgatgaaccacccgtaatccatcaggatccattctccccgggccgcgccctccatcccgatcggccgaagattcatggccttgaggtcgtgttcgatcacctcggccagggcccccgtttgacggacgttcagcccggtcatgatcaggaaaaattcagtgaacgtgaccgcggccctgaggtcgaggacgacgacgtcctccgctttcttgtttaaggacgcttcgatcgccgctttcagggcgggcggcagcagcctccgcgttaattttgcggttttcgccgccgcgacggctttggctgatgtttttttcggtttggtcatttttttgtccccgatagagattgccggagcggataagggcggccactccggccggaaccaggctctcgatcggccgtccttctccgacccgccgacggatgtccgaggaggataccgccagggcctggatcctaaggaaaaaaatcgatcggccggcccggaggagagcctcgatatcgctcgtcttccgaaccgcggccatgcggaccgcgtattcgggcatcaggaccgcccgggccgcccggaggctggttcccggccgggtcgtgacgatgaaaatgcattggccgagcacgcggcgccattcccgccaggtcttgatctcgccaaaggcgtcggctcccaggatgaaaaacagccgggcggccggcatctgcttccggattttcgccagggtatggatcgagtaggacgttcgcggcgaacggacctccaaagggctggcgctgaatcccttcgtcccccggacggcggcctcgaccattgccaggcgggcggcggccggagccatatcggaacggcgcttgtgcggcggaatgcgcgagggaatgaaaagcacgcggtccagtttgaagcgcgatcgaacggccgcggccgcctgaagatggccgttatggacgggatcgaaggtccccccgaagattccgactcgccgagcggaggtcacctttgatttcctcgggacgcggaggactccgcctccaggcgggcgaccgcttcgtccagggctcggacaagccggtccagcccctctttcttcatcgccgagacggcgaagaaccggcatttttcggctgcggcgagtttcttgaccgccgccaggcggccggcgtcttcctcgcggagcaggtcgatcttgttggccgcgatgtactgcggccgggcggccagggccgggtcaaaggccgcgatttccttccggacgatccaataatcctcgatcggatcgcggccggaatagggcgaaacatcgatcaagtggacgagaatccgggtgcgctcgacgtgcttgagaaactgaatgcccagcccttggccgcgatgggccccttcgatcaagccggggatgtcggcgacgatgaagctccgtccggttcggacatccacgaccccgagattcggaatcagcgtcgtgaagggatagtcggcgatgaccgggcgggccgcggagattttcgaaatcagggtggatttcccgacattggggaatccgatcagccccacgtcggcgatcatcttgagctcgaggatcaactcccgctcctcgcccggacggccgggctcgtgctcccgcggggcctgatgggtggatgtggcgaaggaagtgttgccgcgcccgcccttgcctcccttggcggcgatatatccctggccgggttcaatcaggtcgcacaggatccttcccgtcacggcgtccttgacgacggttccgacgggaacacgaagctcgaggttcgccccccgtttcccctgtttgcgggcccgcgctccaggttcgccgttcttcgcccggttgaccggatggaatcggtaatacgccagggtcgccagatttttttccgccaccaaaagaacatggccgccgtgaccgccgtgaccgccatcggggcctcccttcgggacgcccttctcgcgccggaagctgaccgcgccgtcgcctccccggccggctttcaaataaaccttgacctggtcgatgaacatgaacggtttagagaaaagacatcccccgcctcacggaaaacgaggaatcgagatagagccgatgaacgttaaacggggtggaccgagacaattttgcccctctcgcccttatcggaaaaccggaccacgccggaaatcttggcgtaaagggtgtcgtcctgcccgcggcccacgttggggccgggcttgaacggagtcccgcgctgccggaccaggatcgatcccgccttgaccatctcgccgccgtattttttcacgccgagccgccggcccgcgctgtcccggccgttccgcccgactccgcttcctcgttttgtggccatggatcgtctcctttacttctccgctttcttggcgcgggatttcggtttaccggtctcggcggttttcttgggtttcgcgggcttggcggccttatcggccgcgggcttcttggccgccggcttcacggcggccggttttccctcggccgtcttgggcgccggcttttcagctttcgccttggttttgggcttggccttgggctcgacggactcggagacaacgatcggggccgcgacgacagccagctcttcggccggaacaaccgtccgatcggggtaaatccgggcaatccgaatcttggccaggaattgacgatgcccccgggtccgacggtattgtttacggcgtttctttttaaaaacaatcactttatcatcccggagcgtctccaggacatccgccttcacgaccgccttcccgacaaccggcgctccgacaagggtgttttccccgtcatcgatcaggaggacttcttcgaaaagaacggatcctccggcgcccgtggcgagcttttcgacatgcagctcatcgccttccttgacgacatactgtttcccgccggttttaatgactgcaaacatggtagttttcctcgaattgaagtcaaaaatccgcaaaaaggagcataactttaacatgggcttgcgtttatgtcaaacggcttttctttcccggggaaaagacttccctcggaacgcggcgtccggcaaaatccggcgcggacggccccgcctgaccgggagcggccaggcatatccccgtctcgagaggtctctcccgcaaagggtggaaaaatgccgtcttcaattgaatttgaggagacctgatcgtccgaaacactcttgccggattcatcggcccgccacgggagaagaggaaaatgatgtataatcaacggacggaacgggcggttagctcagccggtagagcatcggtcttacacgccggtggccgcgggttcgaatcctgcaccgcccatcctcccccccgcacattattcatgccggaccgaggaggggggctccaagacccggaaacggcggctgccgggcaaaaagtcggggaaaacgcccggtctccaggaaaagccggcggcgccggaaagggacgtcgggggcgttcttttgacatccccccccggggatggtataaaattctgcggggaggagagtcgtggccaaagccagaatcctcatcgtcgaagacgaatttctcgtcgcccacgatatcagcaacatgctgatcgagctgggttacgaagtcgcggcgatcgtatcgacggcggaagacgccctcgccgtgatccgcaaccgcgctcccgacctcatcctcctggatatccggctcaagggaccgatcgatggcatccaggccgccaacatcatcaaggaggaatggtcgatccccttcatctacctgacggctcacgccgatgatctaaccctcgcccgggccaagagctccgatcccttaggatacctgctcaagccgttcgaattccgcgagctcaaaacggtcatcgagctggctttttacaagtatgaaaaagagcgccaggccgctttctgggccatccacgaccgtctgtccggcctgccgaacaagtttctcttcctggaccatttaagcaaagcgatttacctcggcgaccgccaccataaaagaatcgccatcctgtcctttgttgtcctcccggccggcggctccgccggagccccggcgcccggcctgcacgacatcgtccccgaggtgacggaacggctcacgcgcattctccgcaagagcgacacgctggcccggatggaaagcggagaattcatcattcttctccccgacttggaaaccgaggagcagtcgcggatcgccgcccgccggatcctgggcgttttcgatgatccggtcgaccacgagggccgggccgtgccggtcctcgttttctacggcctggcgatgaccgaccggaccggacaggatcctgaaaccctgctccaaaaatccttggcgaatctggccgaaaacctgaaaatcaacgccggcgtgagtccatgaaaaatctccagatcgccgtcgtcgaagacgaaagcctcgtcgccaaagacatcgtcaacatggtgcggggtctcggctactccgttccggcggtcgtatccaccggcgaggacgcgatcctcatcgccgaaaaaacgcgccccgatatcattctcatggatatcgtcctgaaagggcggatcgacggcatcgaagccgcccaccgcatctgggaaacgctgtccatcccggtcgtctatctcacggcgttcgccgacgaagcgacgctgcagcgggccaaggtgaccgagccgttcggatacatcctcaagccgttcgacgaacgggagcttcagacgacgatcgaaatggccttttacaaggcccagatggaaaagaagctgcgcgagcgcgagcagtggctcacgacgatccttcgatccatcggggacggggtgatcgtgaccgacgcggacggccgcgtcacgttcatgaacggagtagccgaaagactcacgggatggagccaggcggaggttcttcaacggtcgttggacggcttcatccagatccccatcgccccggatccggcttcggacgccccggagacggcggccggcgagggggtgctgaccatgcgggacggaatctccatcccgatcgaacaatcggtctcccccatttttggggagaaaaaggatgtcttcggctccgtttacatcttccgggatatccggagccggaagaaagccgaggacgagctccggcaaagctatctccgccatcaaaaagccctggccggaaccatccaggcgatcggcctgaccatcgaaatgcgcgacccgtacacggccggccaccagcgccgggtcagcaagctgtcctgcgcgatcgccgaggaaatgggactggatcccgcccggatcgagggcgtccgcatggccggcgacatccatgacatcggaaagatctacgttccggccgaaattttaagcaagcccggccggctgagcgacatcgagatgtcgatcatccgcacccaccctcaggtcgggtacgacatcctcaagaacatcgaattcccctggccgatctcccagatcatataccagcatcacgaacggctggacggatcgggctacccgaaccgcctcaaggcagaagcgattctgctcgaagcccggatcatcagcgtcgccgacgtcgtcgaggccatgtcctcgcaccgcccctaccggccggccccgggcatcgaaaaggcgctagaagaaatacagcgcggccgcggcgtccagtacgaccgggaggtcgtcgaccattgtcttcgcctcttcctggaaaagaagttcgtctttgaataaatgcgcaagggcgtgtccgttttcttgatcgtcacggccgcagggctgtccctggccggaatcatcgggttcctcttcctcattcttccccggatgaacgcgttctggatcgtcctcgccccggtgattttcgccgtttaccagatacccgccgtcgccgtctatgccctctggaagcgagggcggacggaagatcgggccggacagaaaaatcctccgccgccggaggagtcttaaccggcgcggaaaacacggtcgagcggcgaggaaggggaagaaccgccgggacggccgggcctggcgagaggcttcctttgagatttttttaacaggaatacgcccccgacgggattcgaacccgtgttgctgccgtgaaagggcggtgtcctgggcctctagacgacaggggcgcaaagcattatgagccgagcgggattcgaacccgcgacacccgccttaaaagggcggtgctctaccagctgagctatcggcccgccgaagagacgcatatttatagccgaatcccccgggagagtcaagaaaatccgctctggaaacggaaatccccctgtccccgacggaacagggggatggagctcgttacaaagaggctttaactcagaggttctcgaacttcgtgaggacccagcgcccgcgatgagccaagccggccgcctcatccttcatcgtgtatttttccatgtggatcttgaggttcttggtctggccgtcctttgtttggacttccacctggatatccttggacgcgacatcgcctttcagctcgcggatgttgaccaaatccttgatcccgagcgagaaggccattttctcttcttcccgcgcggccgcttccttggcatcgttgtacgctttcaccaaatcccggttggccttgtacgcctcatcgtatttgagctgggccgcttcttgttttttcttggcagcggcccgggcggcgggcgtccgggcggccgtgtactcgtctttcgccatattcagcgcgtcttgggcgtcaagggcgggccccgaactggcctcgaactgctttttcaggtcgagctctttctgattcatctccgccagcgcggccggagtgactttttcctcgctgacctggacgatcttccagctgacggcgtcgattttcatcggatcgaacgccatcgacgacatcgtcgcgacatcgttcatggagctggcgctgaagtaactcttcaacaaggcttcttccggatgggatttgcagctttgagccgcgatgacagccaggcaaatcaccaggatgattaagccgttcttcttcattcctcctcctcctgtcggacgatataataagaacactacttcgaattctagcccatttgacgaagaaaaggcaagcccccttcaaaacaaaaacgccgattgagcccggcggatgattgtgttataaaaaagcttcctgttttaagaatcctttcgcaggagaggttctcatgccggcagaaggatccctcgcttccattctcgcccgtcaccgccgggaccggacccgcttgatcgacatcctccgggaagttcaggctaaaaacgggcatatttcgcccgaagccgcggccgaaatcgccgccggcctggggctctccacggtggaggtcgaaggggcggccacgttctatcatttcttttccgcccgtcccgccgggacctacgccgtttatctcaacgacaacatcgtctcggtcatgaagggccgggcggccgtcgcctcggcttttgaaaaagcggccggatgccggttcggtgaaacaacgcccgacggccggatcgggctttaccggacctcctgcatcgggatgaatgatcaggagcccgcggctctcatcaacggcgttgtgttcacgaaattgacgccggccaaggtgaagctgatcgtcgaagggatgaacgcgggcatgaacgtccgggcgatgatcgccgcgacgggggatggggccaacgccgccaagctcgtccgcgcgatggtcaaaaacaacatccgcaaggaaggcccggtcatcctcgcttccttccggtccggcgcggccgtcaagaaagcggtgaaaatcacgcccgagggcgtcatcgccgaagtcaagaaagccaacctgctgggccgcgggggggcgggattcccgacgggattgaaatgggagttctgccggcgggaaaagggagagaatcactacgtcgtctgcaacgccgacgaaggcgaacccgggacattcaaggaccgggtcatcctgaccgagcgcccccatctcttgttcgagggcatgaccgtggccggctacgcggtcggggcccggaaaggcctcctctacctccggggcgaatacgcctacctcgcgccgtatcttgaaagcctcctggccgggctccgcaagaaaaatctcctggggaaaaggatcgccggcaaggcgggcttctccttcgacatcgagatcaagctcggggccggagcctatgtctgcggcgaggaatcagctctcctccaatccgcccaaggcgaacggggcgaaccgcgcgaccggcctcccttccccgtccaatccggcttcctgttccagccgaccacggtcaacaacgtggaaacgctgtgcgcggccgcccgcatcatcgagaagggagcggactggttcaaggcgatgggaacgccccgttcggccggaaccaaggttctgagcgtgtcgggcgactgcaagaagcccggcgtctatgaagtgccgttcggcctgaccgttcgccggcttctcgaaatggccggaggccccgacgcccaggctgttcagatcggcggtccttcgggcgcttgcatctcccggggacaattggaacgggcgatcgccttcgaggatttggccacgggagggtcgatcatcgtcatcgggccaggccgggatcttttcgaagtcatccgcaatttcatggagttcttcgtcgaggagtcctgcggctggtgcgtcccgtgtcgggcgggcaaccctctcctcctgcgcaagctcgaaaagatcatgtcgggcaagggaaccccggcggatatcatcgaaatcgaatcctggggccggatcatcaaagccatgagccggtgcggcctcggacagacctcgcccaacccgatcctgaccaccatccagaacttccgggagatgtacgaatccaaagtcgagcggggccgctacttcctgcccgaattcgatctggccgaagccgtcaaggaagcgtcggccgtcaccggccaggttttcgccgcttcggacacggagcaatcccatgagtaagcccaaagctcggatttcattcaccgtcgacggcaagaaatgctcggcggcgcccggccagaccattcttcaggcggccaaagacaacgggatctacatcccggccctctgccgctgggagggatttaagccggccggcgcctgccgcgtctgcaccgtccgcgtcggcggccgctacatggccgcctgcacccagccggtgacggacgggatggctgtcgaaaacgacgtcccggacctccaggacatgcggaaggccctgatcgagatgctcttcgtcgagggcaaccacatgtgcccgacctgcgaaaaaagcggcaactgcgagcttcaagccctggcgtaccgctttttgatgctcgtcccccggtttcctttccagttcccggcccgccgcgtcgaacccgccgggaaaaagatccttctcgagcataaccgctgcatcaaatgccttcgctgcgtccgcggcgtccggacccgggacaacaaggccgtctttgggacgctgcgtcgttcccgcgacaaaaaaatctccgtggaccaagtcctggcctccgccttgacggacaaacaggcccggcaggccatggaccggtgcccggtcggctccatcctgaagaaggaagtcggcttcgccgtccccatcggccggcggaagtacgacaaggaaccaatcggcagcgacgtcgaaaaagcccgcggctgaggagaattccatgagcaaatccgtcgtcgccacggcctcgctggccggatgcttcggctgccacatgtcttttttggacatcgacgagcggattctcactctcatcgacctcgtcgagttcaacaaatcccccatcgacgacatcaagacattcaccaaacccgtggacatcgggatcatcgagggcggatgctgcaacagcgaaaacgtcgaagtgctccgcgagttccgaaagcactgccaggtcctgatttctctcggggaatgcgccatcatgggcggtcttccggcgatgcggaacgccatcccggtccgcgaatgcctggaggaagcctatttccactcgccgacgatcgatccgtccgagccgaaaatcatgcccggcgacgaagacctaccgatcatcctggacaaagtccttccccttcatgaaatcgtgaagatcgacgccttccttccgggctgccccccttcggccgacttgatctggaaggccctgacctcgctgctcgagggcaagccgctcgatctgagctacaacctcgtcaagttcgactgagaggaacaccatggcgcgcaaaatcgtcatcgaacccgtcacccgagtcgaaggccacggcaaggtcacgatccgcctcgacgaccggaacaacgtcgcttcgagccggcttcacatcgtcgagttccgcggcttcgagcgcttcgtccagggccggccgtactgggaagcgccggtcctcgtccagcggctctgcggcatctgccccgtcagccatcacttggccgcggccaaggcgatggaccaggtcatcggcgtggaggccgacggtctctcgcccacggccgaaaagatgcggcggctcatgcattacggacagatgttccagtcccacgcgcttcactttttccacctggccgcgcccgacctgctctttggagccgacgccgatccggccgtccgcaacgtcatcggcatcgctctgacgaataaggagctggccacccgggccgtgctgcttcggaagtacggccaggaagtcatcctggccacggccggaaagaaaatccacggaaccggggccgttcccggcggaatcaacaagaacctgtccatcgaggagcgggacgcccttcttcaaggagccggcgcccccgccatcgagacgatgatcgattgggccgaggaggccgtcgagttcctcaaggactaccacgccaaaaaccgggccctcatggacggcttcgccgcctttccttcgaatcacctcggcctcgtcggccgggacggcgccctcgatttctaccatggggcgatgcgggccgtggacgccgggggaaaacgaatcctcgacgacgtcgactaccgggactacctgaaatatatcgccgaggaagtccggacctggtcctacatgaagttcccctacctgaaatccctcggcaaggctgaaggctggtaccgggtcgggcccctagcccggctcaacgtctgcgacttcatcccgacgccgcgggcccagaagcagttcgaggccttccgggcgtataccggcggcaagcccaacaacatgtccctccatatgcattgggcccggctgatcgagcttctccacagcggcgaagtcatccgggagctcctcctcgacccggacctgcagaaaaccgaactcgtccgcaaaggcaggaaacggggcgagggagtgggcctcgtggaagccccccgggggacgctgttccaccactaccgggtggacgaaaacgatcaaatctccatggccaacctgatcgtctcgacgaccaacaacaacgagcccatgaaccgggccgtccactgggtggccatgaacgtcctcagcgggaaaagggatatcaccgagggcatgctcaaccgggttgagatcgcgatccgggcctatgatccctgtctgtcctgcgccacccacgcgctcggccggatgcccctggccgtcgagctttacgacgcgggcggaaacctgatcgaccgcaaggcgcggtgaagacgcttcttatcgggatcggcaatcccggccggggagatgacggactcggcccggccctcgtcgagcggttgacgggaaaccgcccgccggagaggaccgtcatccccgccgccggcggatcggtcgacgcctactggacataccagcttaatatcgaggacgcttcccttcttcgggaatacggccgcgtcgttttcgccgacgcggccgtcgacgcggcggccccggccgagcttctccccctggacccggcggcttcgatcgccttcaccagccacgagatgtccccggcctcggtcctggccctggccgaggaactgtacggcggatccccggcggcccgtcttctccgcatcggcggggcggagtggggcttcgtcgagcggctttcggccgaagccggacggcatttggacgaagcggaacggctattctgggaattcgccggtccggcccggacgatcacgcggtaagatccaaaaggtcccggaaagaccgggtggaaatcactttatccgcgatcacgttcaacaacccgttctttgagcagaaggcgaccccgattcccgcggccttgaccatgcagaggtcgttgacgctgtcgccgacggcgatcatgtcggccgtcgtgaggccgtgtttctccgaaagataaaccaaggcgttgaccttgcagacggcgtgagagcaggggctcttttcgccgcggatgaaataagacgggatccggacttccccggtgaccgtccggtttttaacctcgagctggttggccagggcgaaatcggccccgaccttgttccggatgaagtcggcgatcaggtcgtagctgtccgtaacgaggccgacgacatatcccctggatttcaggattttgatcacctcggccgcgtccggcacgatctggaggccgtcggcgatctcgaaaatctcttccagcttcacgtccttgaggagggcggcgatcagcttcgtcaccacgaacggctcgctgttgttcgcccggatctcctcgagcttggcccggaagccgaacgcgtcggcggctttgttgatgaaccgctccaggaggagggtgtcgtccatatcgaacaagatcatcttgttcagcttctggatggagtcgttgatcgagtcctccatctcgtcgcggatgacgttgatggtttccaactcgtccaggctcaggatcttcttgatctcggcccgcttcaggatcgcctttgaaacctcccgggacatcttccccagggcctgccagggtttggatttattgtcgatccgtccgaggtcgacttccatgatccgggcgccccggttgtggacgtcgatcaggatgccgatatccacgccgtagtcgttctcgaatttcaagcccttcaggaattccttcttggccgcgatcatcccgctcaacggctgggaatagccggacagatcggggaagagaatgctcaggagcggcttggccacgagctccgtcacccggccggcctcgcggcggaaggtccccttggcgaaatcgcaccagtcccggatcaccggttcggacagccggcggacgatgtcggtctcgtaattgccgatgtccccgtcgagaaagacgacgacctcgaatttcgccagatccagcccttcccccatggaatagcccttgcccagaacggagcttttaatcacggcggcgccgcttttttccgcctcggcgacggtctggtcgaccgagttgtcgtcgacgacgatcacttccccgacggtcttgtccttcttcgccagccggacgacttggccgatggttttttcctcgttgaggacggggatgatgacgctgacccgtttccggggaaggaatccgagccgtgtccaaagttttttaaacatttcgtatccgacgccgctccgcccctcgggcggaaaatcccttttttttcatgatagggatttcatccgggaaatgcaacgattttcaaaaacgaagaaatccactagaattcaaaaggttttttgaataatgcgggtataatagggccgaaagcgaatcccatggccaagaaagacgtcttcgtcctccaagacatcctcctgtccaacgcccaaaccgccgcggccatccgccgggagctcgaatcccggaagattctggccgtcaatctcctcagctcgcccggagccgggaaaaccacgttgctcgaggcgctggccgagcggctcaagggacgggcccggatggcggtgatcgagggcgatatcgagaccgagcgcgacgccgagcggatccgagcccggggaatcccggcgtggcagatcaccacgggcggcgcctgccatctcgaggcgaagatgatcggcaaggttctgccggacatcccgaccgacatcgacttcttgttcatcgaaaacgtcggcaatctcgtttgcccggccggttacgatcttggagaacggctccgcatggttcttctttccgcccccgagggagacgacaagccgaaaaaatatcctctggccttcgtcacggccgatgtcctcctcctctccaagtccgaccttcgccccttccttcctttcgacgcggagaaggcccaggccgaagccttggccctcaatccgaagctccgggtgttcatcatctcggccgtcagcggccaggggctggacgatcttgtcgactttcttttccgcgcccgggaggagatcgcctcccgtgcatgagctttctctggtggcctcgatgttcgagaccctcctcgaacaagcccgccttcataaggcccgccgcatcaccggagtgaggatccaggtcggggccctggccggagtggttcccgagcttctcgaaagcgcgttcgactcgtataagaaggggacgatcgccgacggagcggttttgaccatcgtcaagccgccgtttaccatccgctgccgtgcctgcggcgacgaaaccgtccgggaagacttcgccctggcctgccccgcctgcgcctccaccgacctcgagatcgttcacgggatggagctggtcctcgaaaaaatcgagatggagacggacgacccgcttccggcgccttagacgacgatggcgccggaggcccctcggcggcttccggccggataaaacatcccgtttcgcgagagacgtcgatcagcgcagatacccaagcgatctcagcgtttcccgcgttttttcatcggccgtcgggccggggggttcgggtgaaaaatgcgggatatgaaggcccgcccgccaatgctcgagaagacgctcgagccgcgccccctggggcgaggaacggggatccaaggggatttcctctccgggatccgcggccaggttataaagaaaggatcgtccgtccgagcgggagaccagcttccaggaatccgtctgaaccgccttctggctgaggctgaaggcggaggcatccgcgccgggcagctcggcaagcgccccgagctcggagaggggaagttcgtattcagaaacggcggcttcctcctccggggcgattcccgccgtcgggccggcgtccggaagaagcccgaaagcgctgggccagttgtccgccggcgagacgccggcgagcttcaaaacagtcgggaagatcgatcccgtcgacacgacgcccgcgtaccgcttgtttttcccgaaaaccctcggatacctcacgatcaagggaacgcggagaagggtctggtggatggagaacgaatgattcaacaagccgccgtgctcgccgaggttctccccgtgatcggaggtaatgatcacgacggtctcctcgagcaaacccctctctcgaaacatcgcgatcaggcgctccaagcaggaatccaggaaagccagctcgccgtcgtacagctcggccagccggccgtaatcggccggcctcatcagggtcgggaacgcgatcagcctccagacctccggatagcaagcgtcggtcatcagcttgcggacgggaggagaaggccgattcttcaggaagcgtcggcgatacgccggaggcggattatagggaagatggggcggcatgtagttgacgaaaatgaaaaacggccggttcttgtcccgccggttttgcgaatcgagccaccgggcgatccaaggctgcgtctcggcggccgcccggtcggaccgcttttttcggggcgatcccaaggccgcgcccagcccctttaggattttcaggttctcgacgggatccaggcctcttgcatcccacagcccggagagccggaacatttcatagaagcggtcgaatccctggtcgaagtgaaacaaagaggacacattcggattggaggaaaaagcggccgtggaatagccggcgctcctcaagagttcggccatggtttccaattccggacggagcgtgcgatgctcgaaggtcgcttgatgaacctcggcgtactgtccggtgaaaagggaagcgtgggccggaaccgtccaggggctgggagaaaccgcccgctcataaacggcgctttcggccgccagccggcggagaaacggcatcgtttcccgctccccttcccttaaggaaacatgatccgccctggccgtatccatcacgatgagcagaacggacggggatccggccggaggagcgggtcggcccgcgggggcgccgccgccggcatcaattttcccggcgcgggttcctcctctgtccagggcgatgattattaggacgagaccgaggccggcaaaaccggcgatccgtaaaaaacgcgtccgcctgccgggaggttgtctccaggtcgcgatcccggcggccgagagaacgaaggccgtggccgcgactccggccgccagccccgcgaaatccttcgcccctgacacgaggatggccgtccggccggccaggaggcccgccgccgaaacgaaaagaacggtcaaaacaaaatcaaaaagagccttcttgcaaaaagaaatcacggtcgttttctgccgggcgggcgcgtctccgccggcctcgggaaaaacggcgccgacggcggccgtccccagtcctccgatcattccccatagggaaagggagataaggaacgccgccaatgatgatccggccaggccgccgccggattgggcgacggcgaagagcgcgtcgacgagcccggccgccaagccggccgcgacccccgtccggagccccccccaaactgttcctttattcaccgctcctcccaagacgaggggaagccgaggacgcctcaggcgcgcggcggtttcctcaggaaatttccccggtcaagtaggctttcatccggggatccttcggctcggcaaagacctcggccgccgggccgtgctcgaccagctcccccaggtacatgaaaacgatataatccgcgatccgccgggcttggcggagaatatgggtcacgacgatgaccgtataatcggttttcaggtcgatcaaccgctgctcgacggtgcggctggattgcgggtcaagggcggaggtgggctcgtcgcccaggatgatctccggttcgacggccaggccgcgggccaggcacagccgctgctgctgaccgacggacagccgggaggcgggctcatgaagacgggttttcacctcgtcccagagcccggcggccgcaagctggcgctcgacaatctgccgcagcttcgctttctcccgaacgccgtggatccgcggaccataggcgatgttgtcgaaaatcgacatcggcagaacctgcggtttctgggacaacagccccattttcttccggatccgcgtcacctcgatcttcggatcgtaaatgttttccccgtcgaccaggacctgaccctcgaccttcacgccatccactttgtccaaaagccggttgagggttttaagcaaggtcgtcttgccgcagcccgaggggccgatgatggccgtgacccggtgatcagggagatccaccgagacgtccttaaggactttctgccggccgaaggtcaccgtcaggttcttgatggaaatatgcgtcttggcgttcatggcaatccttcggtcaaatggcggagttttttctgaatttccggctgtaccaccgggagagaaggctgatgacgagaatgatgatcgtcaggatcgcggccgacgcataagcccgctcctggacctccgggtagggcgtgccgagctggaagaaaatcgccagcggaagcgtcgccgccggctggaggagcgccccggggacgcggtcgctgaaaccggcggtgtacaagaccgaggcggcgtcgccgatgccgcggccgaaggcgatcaaaatcgcggtgatgatgccgggaaggcactgacggacgataacgtggacggccgtttcaagcttcgtcgcccccagggaggccgaagcgtcctggagcgaggaggggacgagccggacgacctcgtccatcgcccgggccatgatcggaagctccaggagggccacggcgatgatgcccgccaggagcgacgtccgcaggccgaccatcatcatcaggatgaagccgaaggccccgtagacgatggaggggatgccccaaaggacgtccagggagaagcggacgaagacggcaaaccgcgatttccgccgcttgtagagattaatgtacaggacgatcggcaggctgaacaggagagccaggagggtggccccgccggccagctccagggacccaacgatggcgttgagaatgccgccctcttttcccaggtagtacccgcccttgggcgtctgagtgatcatggccaggttcatggccgggaatcccttgacgatgaccgtagcgatgatgaggagaaggcttccgatgacgatcacggtcgagccgatcatcaacaccttgaagatcgattcctccagtttccgccgccggaagcccatcattccgccttttgctcggcccggatcaggaccacgcgggcgccgatgttgaacacaaggacgatcaggagaaggacgaaggcggccagcatcagagctccgtcgtacaggggaatggacatcatttccccgtaattattggccagaagagccggcaggggataggcgctgtcgaagacggatttcgggatgatgggcgtgttgccgacgaccatgagcacggccatcgtttcgccgaaggcccgggaaaatccgagggccacggaggcgatgatcccggccagccccttgcgtaaaacgacgtgcttgaccgtctcccatttcgtcgcccccagcgagagggaggcgtcgcggagggattgaggcaccgaggcgaagacctccaaggagacatggatgatcgtcggaaagaccatgatggccaggacgatcgctccggccagcaccgagtacccggtggaatacgccccgaacgccggagcgattttcgccacaaaggggacgatcatcaggacgccccagacgccgaaaacaaccgaggggatgccggaaaggaggtcgacgatgggcttgatggtctcccgaatccgccgcggcgcgtattcggacaggtaaatcgcgctcagcagggaaaccgggacggcgatggccatggccgccagcgtcacccagaccgtccccatgaggaacgggtacaagccgaattcgcccttcaaggggaaccaggacgaaccgaagagaagatcggaaaaagaatgaagggcaagaatgctccgcgaccgggagtacagcccgaacagcatcaaaaagacgagcgcccccggcaggatggtgacgagaaacatcagccgccgggcggcaagctctttaaacagccgtttgaccatgccttgaccgtctccggaaagggcgcatcatatcagaaaacaggggtcgatttcatcccttatttatcgagaagggcgagtcccgccttgagcttgtcctcgctcagccggatataaccggtttcggggacgtatttttgcccttctccgaggatccaccgaaggaaggcggccgccgccggcttggccggcacgcccttggaaaccaggtaaaggtcccgggcggggggagagggatacttgttttcgccgatggccttcgtcaagtcatcgcgcgtcccgtagaaccgctcgaccggatcgatcatgccgttgccgtcgagatcgatgggcacggccactaggccggcgatcggggccagcgttttcgggtcataagcgaaattgacgttgttgaacccgatgccgaggggatcccggcggacggcgtcggctaagccgggatcgccgtagacggccacgccgcccaagtcttcttggcgcttgtcaagaaacaaggcccaggtttcggccgcgccacaggcgtccgagcgagtgaagacatgaatcggcgccggcgccttgccgtccaggacgtcgccccagacggtcgccgacttcgtaatccaaatgtcgatgaacgcctggcgggtcagccctttccgcaggatttcggggagatagggattcttggagttgatcatgggaacgacggcgtccttggtgacggcgaacggcagagcgcccttctccatctccacggggtgaacgtcgcgcgagaccatgccgaaatcgaccatgtcggcgatcacatcggcgatccccttgccggcgccgccggcctggacatcgatccgcacccggggatgcaatatctgaaattcctcggcccacttgacgaccatgggataaagagcccaggcgccggaaatcgagacctggccttccaggacgggggcttgagccgggccggcggcaaagccgcccaggaccgagacggccaggagaaccgcgatcatcagttttttcatggatctctccttctttaatcagaatccggcctgaaattgaaccaagagggctttattcaccgtcccccccagctcgtttctcaggtattcataattaacctgaagcttcgttttgccggaaatcatccaattcaaaccggcggtataaaggttggttcggtcatcgtccaaagccgtgttcttgtcgtacgcatccaccttggcgacgatctgcagctgcttgggaagaacaaaccagccggcttggacgaaccatccccggcggtccatctcgccgtcggccgcccagatcatctcccctttcaccgacacgtccccgaaagagacgccggcgtggagcccggtccgatcccggcggatgagcggcgctccggccgcggcgtcggcttttcccttgtagagggacgcgccgatcgtgagaaagtcaaatggcttcacccccacccggccggcgaaatccttcgcgtcgttcgtatcggtcttgttggctccggcgccgttgaagagccctaggctgtaatcaaaaacggagacttgtccggtcagcatggcgcccacgtcgcggcccatcgtgccgacgtcgcggcccggggccagcttgctgacgggttgggaaaaattaatcgtatccaagtcggccgaggacgtgtcattttccgcgccgaaaggaacccggaattggccgaagcggagagccgcagactcggcgaaaaccacgtccaccatggcatcgacaaggatgggatttcggacggcatcgaccgtgaacttggccttgatattcttcatgagatcggcggacaggctgaagcgcgaacggcggacgctcaaggcgtcgacgccttggtcctgcagagcgccgaggacttgggtgaaacccgaaagcttgagggttttccccgccgtcaccgatgggggcggcgttttttcctcggcgaaagccgccgggatcagggcaaggaccgcgatcaggagcccggccgtcttcttccatttcgacatgatcacctcccggtatttagttgatatagtctattgttaatatcgactattcctaaaaaaattttatcccttatccggcgtcttttgatttccgttttcattattggccctcatcgcttttcgcgtcatttctgcgacatcggcaaaggaagtgctttccaggatttcggcgatcgcgtcccggtttctcttccaaagccagcggaggccgcacgatttttcccgtggacagacttcgcgggcggtgacgctgacgcagtcgatcggggcgaggggaccatccatgacgcggatgatctccgccacggagatctcttcgggcggcttggagagcatatatccgccgttgggccccttccggctgcgcaggtatccggcccttttgatttggaggaggatttgctcaaggaaacgttccggaatgtcttggaccctggaaatgtctcggatgtgaagaggcggtccgccgtaatgcaacgtcagctcgagcatcgcccggctcgcatactcgcctttcgtcgacagtctcaaaagaactatcctattagttgactataccaatcggccatctgatttatcatttcccgggccttctgtcaagttcatttatgataaaataactgcggcggaaaagatgcctttccggtttgtcgatctccctctcaggcgaaaaatgatcctcgccattctcgccatcgttctcttcggaggggttgttttcggcatcctcggcctgcgactcgaacaccagacgatcatgtccctggcggaaaaccggatctaccacgatatggactccgcccggaccatttattccttttacttggacaacctgctgacggccgtgaccctgacggccgaatcggagctcttgcgtctcccccgctccgcccagccgaacgccgaactggatttccatctggctcgggccgcggaagcgggacgttttgattttctatcgttcgcggccgccgacggaagacggatcgctctctccgatccggccgttccggccggcggattccgggaccgggattcttttttctcccgggtcctcgagggaaagcggctcgccgcgacgcggcttctccccctggattccctccgccgggaaagcacccggttcgaagaatccgcggccggggacatcctcgtccttgtcgcggcggcgcccgtccgcggcccggaaggaaggatcatcggcgtcctggagggcggacggcggatcaacggcgacaacgagatcgtcgaccgggtcaaagccgcgattttcgatcccgaaaaacgcggcggccgggacacgggcgtcgtcacgatccaccaaggcgacatccgggcatcgacaaccctcaaaaacccccaggggagccggttgaacggaacgcgggcggatccccgcttccggcaggaggcgctcgaacgaaggaaagcttgggccgggcgggccgtcattctcggggaacggtacatcagcgcttccgagcccctggccgattacgacgggaccgtcgtcggaatgctgagcatcggtcttttagaacggccgtttctcgctctccgcaaccgggtgatcacccaaaacgccgcctgggccgcggccacggcggccgttctgctgatcctcctttccctcatggcgacgcgtctcgtccggccgttgggagacttggccgcggccgcgtcccggatcgcccaaggcgacctgaacctgaaagtcccggtcggcggccgcgacgaaatcggagagctcggcggggcgttcaaccgaatgaccgccgagcttcgcaaggccaaggaaaatcttctccaatggacgtggactcttgaaagccgggtcgccgaccgaacccacgccctccgcaacatccaggaatccatggcccgatcggaaaaaatggcctccctcgggcaactcgccgccggcatcgcccacgaaatcaacaatcccctgacgaccatcctcatcaacgcccatcttctgctggaaaaagctcggccggacgatccggccgcggccgctctccgcctgatcgccgaggaaaccgagcgctgcggccggatcgtcaaggggcttctcgaatactcccggcggacgccgcccgagaaatccgccctcgacgtcaacgccgtcgtggaacgcaccatcggcctgctttccggccaggcctgggcccgcaacgtccgtctctcccatcatttggaccggacgctccctccgctctttctcgacagagcgaaaatccaacaggtgttctggaacctgatcctcaacgcctgcgaggcgatgccctcgggaggaacgatcgatgtttccagccgccgctcggccgacggccggtcgatcgaggtcgtattcgccgattcggggccgggaatcccggaggaaaacctcgaccggattttcgacccctttttcacgaccaaatcctcgggaacgggcttggggctggccgtcgccgccagcctcgtcgagcagcacggcggaaccatctccgcccgaaacggggctggccgcggcgcggtctttacgatacaatggccgctggcggacacggaaaccggggacagaggaattggaccatgaccgagacaaaacggagaatcttgatcatcgacgatgaacgctccgttgtccaaagcatcgccctggccttggccggggaaggcgtcgaaattgagaccgtcctttccggagaggacgcgctcatccggacggccgccgtccgctacgatcttattatctgcgatttgatgatgcccggtctgagcggcctcgacttgttgaagtccctccggacataccggcccaccactcctgttctgatgatcaccggctatccgacgatcaaaacggcccaggaatccttgaaaatgggcgccttcgccttcatcaccaagccgttcacgccggcggaaatccggagcgccgcggcccgggccctcgcccaagcggattcgaaggaatgaccggccgtttccttcgcgccggggcttgccccgtttgccgcggcctcgacattcgtccatggaaaaaagggacgttcgatttctccggcctccgatccgaccagattaaaatcacggacagcgaatacgggaaaacgtgggaccttcaagcctgcggcgcctgcggccacatcttcgccgatccgtacccggcgccggatttccttgcctccctttacggggaagtggaagatccgctttatgaccaggaggccgaaggacggacgcggaatttcctgcccatcctgaaccggctggatctcttccgtcccggccgcggagccctgttcgacgtcggcgcggccacgggcatcctgggcgacgccgcccgccggcgcggctggcgggtcgacggcgtggagccgagcgcctgggccgtccggaaggccgcggaaaagtatggcttgaccctccgccggggaggattcgaggacatcgccgccgccggcgattccttccaggccgtgaccatggtcgatttcatcgagcacacgccccgcccgtccgaggcggccgccatggccttctcccttctggccccgggcggcgtcctgtgcctcgtcacccctgacattcacagcccggcggcccgcctggccggccggcgctggtggcacctgcggccgggccacctggcttatttttccaagagaagcctccgggttcttcttgagggagcgggattccggatcgtcgaaatccgccgctatgcctggacattcagccttcattatctcgtctcccgcttccgctggatggattccttcgcccgaagccgggcctcttcatttctccgcaagatcccgataaaattggccctcggcgattcgttcgagatatacgccgtcaaggatccattttcgtgaacgcctatctgcgggccctgcgcctggagcggtggccgagaagctcggccattttcctgggcagcgccgtcttcgttttccttcaccgggaggatgtcgccgcgctctctccggcggaaaccatctggaggctggccgcggcgttccttctgacttggggcatctcgacggccaattacgtcctcaacgaaatcgtcgaccgccccttcgacgtccaccatccgaccaagcgtctccggcctcttgtcagcggtgaaattaaagcctttcccttcgctctcatcggccttcttctcgtcgccgcctgcggcggggcggccgtcctcttgttcgaccggacattcaccctcgccctgctgtccctgctcgccgccgggattgtttacaacgtcccccccatccggaccaaggacatccctttcctcgactccgtctccgaatcggtcaataatccgattcgttttctcatcggctggtcggccctggctgtttccggaaagcttcctcccctctccgtcctcgtctgctggtgggcgttcggcaattttctcatggtcgccaagcggctgtccgagttccgtttcctcaaggagaaagccggagaataccggatatcccaccggaaatactcgcggacgtcgctggtgatcggcatgtccgtcagcgccctgatctgtcttctggcctttctttacttcggctggatcttcaagcttcaatccttttatgccatcgctccgttcctcctcgtcttcttcggcttgattttccggaaaacgctccgggaggcggagatgatggaggagccggaaaagcttttcatccatccgaaatacgcgctctatgcgctctttcttgttcttctgttcgtcctcgcgttcttaaaggacgccatcggacaatgacatccgcggccggcccgggagagcccctcctgatcgcgacgaccaaccgcgggaaagcccgggagatcgccgctgccctggcgatgcaagccgtccgcttcgtcgccctggacgacgcgggcatcgaagccgtctgccccgaaacagagaaaacgctcgcggccaacgctcgggccaaagccgaattctacagccgccgaagcggcctcctgaccctggccgaggattccggcctggaaatcaaggtcctcggaggagaaccgggcgtccgctccgcccggttctccgggccgaaggcgacggacgcaaagaacgtctccaaggttctccgcctccttgcctccgttccccggtccggccggcgggcccgcttcgtctgcgccatggctctggcccgaaacggccggatcgtcgccgaagcccgcggcgtcgtccgcggaacaatcgccgtcggacccaagggaaccgccggctttggatacgatcctattttctactaccatccccggggcaagacattcgcagagctctctcccgaagagaaaaacgcggtcagccatcgcggccgggccctggccgccatgaaggtccgtctccgtcgctttctctcgaaataaaaaaggcggccctccccttccgggaagggccgccggcgggatattcccgcacgcgtggagggagcgccggatcttaaacgctcaactggtccttgaatcggagaaaaatcttctcgccgattcctcggactttcatcaagtcttcgatcttcttgaacggaccgttcatcttgcggaaatcgatgatccgctgagcgatcgcggcgccgacgccggggagcttttgcagctcgtccagcggcgccgtgttcaaattgatctttccgcccgcggccttttcgccgccggcggcggccgcctgttgggccaaggccggaacgaccaagagagcggcgatgattcccaaaaccgcccctttcatccacaagctcttcatgttgagcctcctttcgccctttctttagcgagcggcatgccaaaaccgaaattttattatctccatttatttcaatgacttgaatcgaaccgcggctccgcccccggcaatttttggagacggatggcgattcgggcgtcaacggcgggagacgggacgtcaagcccgcggatggctcttgcggtagacggcgagcaactggggcaggtccagatgggtgtatttctgggtcgtccccaggctttcgtggccgagcagctcctggatgacccgaagatcggccccccggccgaggagatgggaagcgaacgaatgccgaagggaatgggggctgatttttctccggatggccgtttttctgatatatttggcgaccagccgctccaccgaacgggacgtgatccgtcccccccggtaattcaggaacaaggccgcttggtcgagaggtcccttcaaaaagccgggccttgtttcaaaataagccgccaggctggaggccgccgtccgcccgaacggaacgatgcgctcctttttccccttgccccggacgcggaggaggcgctcctccaagccgacgtcggagacgtccaagccggccagctcgccgacccggatgccggtggcgtaaaacaactcgaaaatggcccggtcccgcggccccagacggtcgtttctatccggaagatccagaaaccgctcgatctccccctccgaaagaaaaccggggacgggactgtcgagtttcggccgggtcacgaccacggccggattatcatcgcaaatccgtcgcttgaggcaatactggaaaaacgaccggacggcggccagcttgcggacgacggacgtcttggaaaggcgccggtcgtgaagatccgccatccagccgcgcaaaatgatgttatcgacccgggccaggcggacttttcggcggtcaagataagcggccatctggagaagatcgcgccggtaggcggccacggtatgggccgaggcgtttctttcataccggaggtactcgaggaactcatcgatgtttttgcgcatgcgtccggatccggcgccgccggccctgtttcattttaacgaaatccgtccgcatatccaaaaaaaaggcggatcgatatttccggtttattcttcccagactcctcaggcgttctccctcaaggcggagaagctgcgccacggccgcgattttgggaattgatcttagaccccgccggcttccggccccggtttgtccggagcaccccccccgtcttccctcgagtcgccgtctttcccggccggctcgggttcttcccccgccggacgaggcgggacggccggaggagacgccggctcgcgccagccgcagttctcgtcgacacagtgcttgtacgtcccgtccttcttggtcgttttccggaggacgaacggccggccgcatttcggacaggattccggaagcggctcgtcccaggtggcgaaccggcacttcgggaaggagctgcagccgtaaaagaatttctcccgtttcgtctttcttttcaaaagcgtcccgccgcacccttggggacaggcgatccccgtatcgaccttttccttccccttgatgaaccggcatttcggatagttcgagcaggccacgaacatcccgtagcggccgacccgctggaccaggttcgccccgcacgtcgggcatttttcctcgaggggaacgggctcgctttttttataaagatcatccgagtaatcgcattcgggatatcccgagcaggacttgaaccgtccgaacttgccgcccttgttgaccagcagcttcccgcatttcgggcacttttcgtccagggggattcctgtcccggcgacgctttcgactttgcccgcggccgcgagatcattttggagccggccgtagaaatcccgcatcgccccgacccagtccagcgtcccctcgctcacttcatccagctccccttccatccgggccgtgaatttgtactccatcaggtcggggaaatgcttgaccaggaaatcggtgacgaacatgccgagatcggtcggaacgaacttgttctcctccttgacgacatacacgcggttctgcagggtggcgatgatcggggcgtacgtcgagggccggccgattcccttggcttcaagttccttgacgagcgttccctcggtataacgggccggaggctgggtgaagctctgtttcggctcaagctcggccagggtcagcgtttcgtctttcttgaccggcgggagggcatcttcctcgtcctcctcttttttgggataaagctcccaccagcccttaaacttgatcacgccgcccttaaccgtaaacaggaaccgctcgccggcggcgatggtcagggccgtctcttcgagaaccgccgcgctcatctgggaggcgaagaaccggttccaaatcagctggtagaggctgaattcctcttttttcaaatagggccggaccgcctccggcgtcagttcgggcgaagtcggccggatggcctcgtgagcgtcctgggccttgcctttgttggcgtgaacccgcggatgagagggaacgtgagccgccgaaaaggactggacgatggccgcccgggcccacgcctgggcctcggccgaaatccggactgaatcagtgcgcatgtaggtgatgaggcccatcggcccccgttcgcccagcggaagcccctcgtagagcttctgggcgacggacatcgtcttcttgacggggaagcggagaagccggaaagcttcctgctgaagagtgctggtgatatagggcggcggcggattcctcttcttttcggtgacggcgacgtctcggacgacatagcgggcgcctttcagcgcatcgacgatcgcctgagccgaggcgccgtcggggattttggctttctttccgtcgattttggacaacgccgccttgaaccggggggggagcgaggcctccaggtaggcgaagatcgtccagaattcctcttttcggaaagcccggatctcgcgctccctctcgacgacgaggcgaagggcgatgctctggacgcgcccggcgcttaagccccggccgatctttttccaaagcagcgggctgatcttgtagccgacaagccggtcgagaacgcggcgggcctgctgggcttcgaacatatgaacatttaattcgcccatgtgccggacggcgtcctccaccgcctgcttcgtgatttcctggagccggacgcggaacaccggcttcttcccgtcatcgaaaatcgcttttagatgccagcagatcgcttctccctcgcgatccggatcggccgccaggatgatcgatgaggccgtccgggctgccgcccgaagctcgccgacgaccttctcgcgctcgggaatgatgatgtattggggttcgaaatccttgtcgacgtccacgccgagcttgcttttcggaagatcccggacgtgccccatcgaggccatcacccgatagcccgaacccaggtatttattgatcgtcttggccttggccggcgactcgacgatcaagagggccttgtccatcacagtctcctcaaatagcgcttcccggggagctgggcggcgacgcccttgatctccaaggaaagcaatatggtcaggagctccgaaatcgagagctccgtccgttccagcaattcatccacgtgaaccggggactcgggcgaaagaagcctccggacggccgcttccccgctggaaagcagcggcagaggctcccgtggttcgtcctcttcccggctcagcaacgcctcccggaccggggccggcagctcttcggccacatccttccaggtctcgactagcttcgccccggccttgatcaggccgttcgttccgcggctgacctcggaagtgatgttgcccggcacggccataacctcccggccctgctcgagggcgaaaccggccgaaatcaacgaaccgctcttttccgccgcctcgaccacgatcagggccctggaaagcccgctgatgatccggttgcgccgggggaaattcgccgccagcgggtccgttcccagaggaaactcggatatcacggccccctcctcggtgatccgctcgaacaaccggcggttggcccgcggataaggcacgtcgagaccggatcccagaacggccacggtttgtcctccgtccagggcgccctggtgtccggcggcgtcgatgccgaccgccaagccgctgaccaccacgatcccccgtccggacaggtcgcgggccaaacgttcggccacgttccgtccgtacggcgtcggccgccgcgaaccgaccagggcgaccgccggcctctcgaggatgtcggtccgtcccgcgcaatacaggacggccggcggatcgaatatctctctaagaaaggagggatattcggcgtccccgagagtcaggagagaatatcctttctccttggacctgtcaaattccttttcggcccggtccaggagcccgggcgcgccgagccgggccgcgatctgcggcctgaaaccgatggccgaccactcctccgaggagagagcgaacgctccggccgggtcgggaaacagggtcaggatttttttcacggccgccaaccggtcccaaagagccaggttgagggccaagaaagcgattttctccggagaacggcgtcctttgaagagcggcatcaccatcaaaggacggcccggaaccggatttttctcagggcccgggaaccgcctcggagtccgacgcgggctacttaatgatggttttgtatttttcgaaaatctgcttcagctgaagcttggtcacgacgtatccgctgagagtcatcgaaatcgtcgaccggagggggtcgttggttttaaaaagaatgaattcacggacgaatcccgcccggcccgccagcgggaaacggacggtgatctccgcttcttttccagccgcgaccttgatgggaaaggcggccggctttcccttggcgaaaaaggcggctcccggcagggcgcattcaaacgagagctccagctcgccgcggttcttgacgacgacgggagtctccagggattccccttcaacgatcagcccggcgtcataagtatactggctcaagtcgatcttcggctgaggggggacatccacggccgcttggactttaagctggatccggcgggcgttcgggtcgttggactccacatagatatatttgacgacttcgccgctgtagccggcggatttgaacgtgacctgaagcttccccgctttgccgggatttacttttttgtccgagaccaagaccgcggtgcagccgcaggaggactcgacgttgccgatctggagcacgtcgtcgccctcgttcgtgaaaacgaaatcaaccgagacgtcctgaccttgcttgatcttgccgaaatcccacgattccgtcttgaacacgattttcggcttcacggccgcggccgttccggcggccagaacggccgcgaggcaaagggcgacggccgttttaagcgaacggtttctgctcatgggaacctccctgacgaccaaaatgtacatcatttcaacccccctcttcaaggaggcaagcgaacgcctcacgaagtccctccagggaagggaggggatgaatgaggcgtcccttcatcgggaggttgccgcggaacgccgcggcaagtaagataggcgtccccatggctgccgccaaccctttgaggttcgaacggatgacaaaatgaaacaacctctctttccaggcgccgttctggccctggcggtcctggccgccggcccggcggcctccttcggccgggaatccgccccgtccacggccggcgatgctcccccccgtctctgggaacgggtggaaatcgttgttttcggcggcctcggcctcccggcggcggagggaatgtcgctccatcgggccgagaccgcctctccggcggcttccccgacggttgagaaccgaatccggacatcctccgccccggccgtgttcaccggcgcggccgcgacctttttcttgaaaaacggattcgggatccaagcgggcttcggctacctcaaagccggattggaaagcgtcggccggttctcctggaatccgcccggatcgacgccggcctcgaccgccgtcgacggagggggcgaaggcgagatcacgtccgtcccctttttcatcggggttttcaagagcttcgaattccgcttcgccggaaaagctcttcgggcccacgtcgccgccggtccggctctttttttccattcgatcctgacctcgagccaggcgggcgcggcggcgatccgggacggcctgacggacgcgatcctcgtccccgtccgcgtggaggacaccacctggatctcccccggcgcgacggccggggccggactcgatcttccgctctctccggccctttccctcgccgtcgagggacgttacggcttcgctccgcggaaagaattttcctggatttggacgccgggcgtctatgacgggatttttcaccgggtggccgctttcaacttcgacgaggcggccgcggcccgggaagccgggcggacgacacccttgtccgtcgacccgtcgttttttcagatcgccatcggattgaagctgattttttaagccgccgcccggccgcaaacgtgctatactgaaggcgaatccggatcggaggttggaaatggaatatcgcgcgacccgcatcctcccgatcgctttcctgggattcatcctcgccgcggcagccgccttcggctcgcctgtcatcaagctcaaagtcacggccgaaatcgccaacgtccgggtcaagccgtttatcggcagcaacatcgtccgccagttccccgaaggcacggttctcgaggccgagcgcaaggaaggggaatggttcctggtcaagatggagcccgacgagaccggcacgatctccggttatgttcacgaaagcctggttttggctctcgaggacattcccatcaccgagcccgttcccgctccggtcgtcgagatccctccggtcgaggaagtcgaaaaggaagagccgccgccggccaaggccgtcccccggccgaaagcgacccaacccgccccggtcgagcccccgccgtccgtctacgaggcgacccgggaaatcatggccgcggcggccgccgaaagtcccgtttcactcttcctttggggcggcggcggaataacggccgtcggggatttgaacgacggcatccaaggcctggcggatttctatgccgaccagatccatcggccggccggcggagagaccgcccccctccggaccgggctccaatacggcggcgaaatcggattcaagcttctcccgcggctgcgtctctcggtgggcgccgaatttctccgggcatccaagaaaaacgtcctggcctttgccggcgattccgaaatcccgtccgatctgacggtcaagccctcgttttccgcaattcccgtacatcttacgctcgcttattatcccctggacttcctctatctcaaggccggagccggctatttcttcacccgggcggaataccgttatgtcttcactcatggagacatcctgcgggattgggaaggggaggcgaccgcgtcgggagcgggcttcctggcgggaatcggcctcgatttatccttaggccgctatttctgtctcacggccgaagcgagcgggcggtacgcgaaaatttccggattctcgggaaccaacgcctaccgcgacgagatttcaaccgaaccgtatcttgagacgggcaccctctacgcttttgacgttcgaaccacgagccggaccgcgtatcccctggtcttcatccggaacgggaaaccgttcgaaagcggcgtggagaacgcccgggaagcgcggctcgatctgaccgggctctccgtccggatcgggttgaaataccgattctaatccgccggccgctttttcaacaaggccagatggtaggcgtggattccgccgaacagcggaaggacgcggacgacggagaatcccgcctcgccggcggctttttcaaacaccccgggctcgaccatcttgatgttcgtccggctcttgccgaaggcccggcggagacgccgctgaacctcgtgcaggccgttggcccggtagaacgaaacgagagcatacgccgaggagacccgggaaaactctcccagaatcgcctcccggctctcgggggagtggatatggtggaacaagcggatggaaaaaacgagatcgaaggctccggcccggaacggcagccggcgcgcgtcggccgcgagcaccggaatcccgcgtccggcccctccctcctccggcgcccccccggccgtgttttccgccgcccggcgggccatctcgagcgagaggtccgcgccgacgacctcaagcccccggtcccggagcatcgccgtgaaccggccgtaaccgcagggcatgtcgagaacccgcctcattccgtcgcggccggcggcgtctttcgcggcctcggcaagcatcttccggatgatcttcgtctcccgggcatggacgatcctctggtcgagtcctcgatagcggcgcttttcatactcccgcacgccacccccggtgaatctacttgaagatgacataacgcggactcccatcgagacggataagaccgccgtcgcggtcctgggcgaggccgcggccgctccggtccaagacgccggcgaccggccggtcgaactcccggcgaagcggccctccccgcgtccaggccagggcgaactcccggccgcccttgcggaaatgatagacttcaccgccccggccggctgtccctccgccccggggcgtctcctccttgccggtgaacacgcttccggaaagcatggacgccatgaaggcgaacgcggcgtagctcggccgtttccgccagggcgactcccggctgtcgaccaggccgtatccgggcgcgacgagctgccaccaataggcgcggtcgatccatccgctcgccaaggcgatgacgtaataccgcaccaggaaatccgcctggacgtcctctccgacgttgggcttgccggccgccggcgaccaggccccggtgttctccaagggccaattgaattccgtgatccaagcgggccggccgcccgggacgagcacgtcggcgcacgcccgaaagaaagcgatttttttcgccgccgtgaatccatactggggattctccggagcgccgacgcgatcgacgtacaaaagcgagctgatcacgtcgaaatccacggcccttagaacgggcggatagaggtgatattcgaaatcgatgaccgccgggccgatgagcttgatgttttttcggccgatccggtcgcgggcggccgcggccgcccgggccaggcggatatattcccggtggtcccaaaccccccatttcgtccggttccaagcatgcccgatttcaaaatagggacaggccgggccgaggcggtcgaaagcggactccgcgaaatccgtccaggcttccacggcgaacacgtcctctcgccgctgcagcagggcggccgccggttcgaagccctctgaatgaaggcggccggcgaatccggcataatcctcgagccgatccctttcccacgagggaaaacggaacagcacccggcggacgcccgtttcccgaagcagggccaggacggcgtccgtttcgccgggacggccgaagcgcggcgaaaccgccaggccgaacatgccgggagtgatgtccaccggccggcggaacaggcgtcggcggagcgtccggtatcgccaaaaaatcgccgggtcccaaacgaggttgaggccgatcagctccaagtaggacggccagcggcgaagatgatgccgggtccgatcggaccgcggagcgacattgtgcggctgatcggccatgtcattccactcgaatttgaacctcatgatcgaatcactggatccggagccggcgggcgagggcccggaggcggagcctttttttgaaagccagccaggagataaaaacccgcttggaaatccggtaagacaaaccgaaccgtcgccgccggaaccggccgcccgccgccgcggtgtattggtcgagaaaaaacggctggagtccgggcggcacgcccaggcggacgagattccgggcccggttgaaaatccccggccgccggcgccggacccggttcgtatcgagaaacagaaactggaatccgcctccggccggagcggccgcggcctcttcgttttcaaaaacgagaatgttgccgtcggaaagatcgcgatggacgatcccccggccgtgcaggcgggcgagaaccggggccaacgaggaaagcaggcggcgcaaaacgacctcggaagactggaggaagtgctcccggatttcccgtccgcctctgacgcggccggagatgaagacgctttcaacggcgattccgccgcggcggcgttcaaacacggcgatcggctcggccgtttcaaagccgttttccaccagagccagggctcccttccaggcccgaagtcctttggagggaagaagcagggttttccacttctgaaccccgcgcgtcccgaagatcttcacgacggcgtcccggtccggggaaagacggacggcgatgacttgatttcgtccggcctggagcgtttcagcctcgggcgagcggagaaatcccggaaaatcctccagagcggcggccgccgcctctccttcccgggaggccgttcggaagccgcggtagggcgggacggcgagcgagcggatttccatcaccggcctcctcccggcgccggcggagaaagggcgaaagccggcccgaaatgatcggccgcgaagccggcgaggcggcgggccacggcctccggggtgaactcgcggcggacgagggaaaagccggcccgggcgatccgctcccgtcggccgggatctcgggccaactcgagaacggcccgggccagggcttccggatccggtttgtcgcataaaacgatgtttttgtcgtgggcgaagaattcctcgacggccggagtcctgagagtgacgaccggacgggccaggcccatcgcctggaagattttatggggaacgacccgccgcgttttcgcggtccggccgaagatccccaggcaaacgtccgccgcagccgccgcccgggcgagttccgtcatgggcacgcgccccgagaaatcgatgttggctaaatccgcggccgccgcccgggtcgcagccgacgtccgcccctctccgatcagccggaagcggatcgaccgatcccgcagccaaaccaaacgggccgcctcgacaatgatctcgactccgtgaaggggcagaaacgagccgaaaaagaggacctgaaaaccgttgccgggccggagcgcccgggagaggagttccgtctccgccggcgggcggaaaacgtcgtcgtcgtagcccaggggcacaacctcgaccttggccggcgaaaggccgtaggtttcgcaataatacctcttatgggcggccgtgtcggccaagacgagatcggccaaggcgaaggatgcccggtcgatctggaaattccaccaggccccgggcgagtccgggcgcccccagccccagtcaatgactttcgtctcgtagcgggcggcgagcggatcgaaaatcaacggccgggcggtcaaagaggcgagcaaccgggccggggggacgtccttggcgcagaactccgggacgaagagacagcggccggccgccgccccctccggccggagaaggccccgacggaacgcatccaggagaagcagcgggtgacgggcccaggatttcagccccgccccaaagcggcattcgacgacttcggctccaatccggccgagacccttgcggagaaccgcgccgcgcgggtagcccggaagaaaaccgccgaaaaattcaaaacgcacggacctgttttattccacggcttcggctcttgtcaatcgggaaggcgcttcttaaggctttatctcgatttcggatcggggcagccgaagccgggaggaaggaggcgggattagagggaagcgaccctgaacgattgacggcgatcgagcggtggcgtatccttacggcagcggagatcatccgcaggagtccgtcatggccctcgactcttttctcctcgacattctcgcctgcccggaatgccagggcgacgtcaagatcacggccgatgaacaaggcctcaagtgcctccgctgccaccgggtctatccgatccgggacgacattccggtgatgctgatcgaggaagcggcgatcgaacccgggcgggccgtcaaagagtgatttgaatccccgctccctcctccttctccgtttccgccgtctcggcgacatcgttctgacgacgccggccgtctccctcctcaagagccggtttcccggctcctccctgacctatctcgtcgaagagccgtaccgccgcttggtcgagggccatcccgacatcgaccgggtcatcgtcgtcccggccaagcagaaccggtccgatttcctccgcctcatccgggagatccgccgggagcggtacgacgcgcttttggattttcacggcggtccccgggccgcctggatcgcgctcttgggaggcgcccgtctcaagatcggccacgccatcaagtccaagggctttctctaccaccggacgacgccccggcgcggtctcgattcgccccttcattccgtcgaaacccacgccgggctcgtccgggccttgggcgcggatttccggaaagaggacatccctcccttgatccttccccccgcccggccggaggaaatcgcccgggtcgaggccttgaccgcggccgtcgcctccggacaagccggaccgggcggcggccccctccccctcgtcgttcttcacatcggcgccggcaacgccttccgggactggggcgaggaaaacgcggccgtcctggcttcccgtctcctcgaaattccggggatctccctcgccgctgtcggcggagaaggcgaccggccgcgggaggaccggatcgccgcccgcttgggctcgccccgattcctttccttgtccgggcgcttgaatatgatcgaggtgcgggagcttgtccgccgggcggtcctgttcatcggtcccgacagcggcccgatgcacctggcggccggtaccgccacgccgatcatcgcttacttcggcccgacgcttccggccttgttcggaccctggcggccgggcctcaatccggcaaaaacggtgattctcgagacgaatccggactgccggccctgccgccagcgcgtctgcgaaccgggggattaccggtgcctgcggaacatatctcccgacgaagtacttgccgccgtccggccgtttcttcctttctagtccgccctcccgccttccctcccggcggaggatccggccgcttgaatccgtcctcgtttcccctgagacgggcgttcaattcgctgaaaataaatgctatactcccccccatgatgaaaatcatccgtgatttcgtctccggacgcccggccggcgacgtcgttctcgcttccgccctggccgccgccctccttttctccatgatttccatcagcttagcccaaggattcctggcgatcgccctgatcgtctggctcatccttcttgcccggggaaaacgcaggttcgagacgccggtcttcttttgggccttggcggcttacgccggtctttcgctcctttcctcggccgcttcggtcaaccctcggatcagcttttgggactcgcgggatctcctgctcatcctggccgtcccggtcaccctcgcggccgtccgccgccgggccgacctcacgctcgctctgtcggctttatttttatcggcggccgtcaacggcgtttacgccgtcttctgccgctttgcgacgacggccgagcggatccgggcgttcatgggtcattacatgacccaagccggcctcacggccttgttcatctccctggttctgggcttgctgttcgccggattcggccggagaaaaagcgcggccgccgggcgcgccgaggtcaagggaatccggatcgagcgggccgttctggcggccggttttcttctggcctcggcggccaatattctgacatacacccggggtgcttggatcgggctggcggccgccctggccgtcgccgtctttctctggaaacccaaggccttgattctcctgcccgtgatcgccgccctcggattcctggccgcccccaagccggtcaaagaccgcgccctgagcattttcacgatgcgcgacgattcgaatgtcgcccgcgtccagtatttcaaggccggggttaagatcatctccgattaccccctcctgggaaccggaccggacaccgtcgacatggtcttccaggacgaaaagtacgggctcggctacttggcgaaacacaatgtccatctgcacagcaacatcattcagatcgcggccgaacgcggcctggtcacgctggccgcctggctcgcgttcatcggcctggccctggcgggcctcgggcgcctttggcgcctccccgagaccggcttctccttttgggccgcccggcggaagctcgccgccggcggcctggccgccctgacctctctctttgtcgccggatttttcgaatacaacttcggcgactcggaaatcgcccagctccttttcattttgatcaccctgcctttcgccgcccgacggctcgaacgggaatcccatgaatccgcgccgtcttgaaaagaaaagacgatggggccgcctccttcggatcgtcctcgggacggcgttcgccgtctatctcgcctggctggctcttgaaatcctgtcgtatcggaaatacgaggcgccgccgaagcccgcccggaccgagaggacgatggttccgcccggcggcccggcggaggcctctcccctttccgccgcccccccggaacccgtcgagctccgcggcgcttatcacctccattcccggcattccgatggatcgaagacccccgccgagctggccgcggcggccgaacgcgcgggcttggatttcatcattctcaccgaccacggcgttcccaatctcgcttccctcgaggcccaggggcgcgccggccgggtcctggttatcgccggtaccgaaatctcctccagccgcggtcatttagtcgccctgggctttgacccgcccgcccggccgttctcccaggaagccggggcggccgcccgcgaagtccatgcccaaggcggattcaccgtcatcgcccatccctattccaaaacccgctggtcctggggaagcgcggaggacgccgacgggctcgagatcatcaatcttgacggcgatcttcgccggggatggggcaccgccctgttttacgcccccgtccttctcgtcaaacccacgctggcccttctgaaaatcctggatcctccgacggccgcggccggtaagtgggaccggattctggccgaaaccgaagagcgcctcgatcctcccgccgccggatattacagcctcgatacgcaccgtgttctccacgagacggccttcggcgttctcaacctccacatccagcttgattccctcatccccgccgacgatgccgcggcgtcccgggccgtgcttgactccctccgccgcggccggttttacaacgccgtcgacgccgccgccgatccggcgggcttccggttctgggccgagggcgggccgacggctcccgcgactctccacgtccgcgccccttttcccttcgcccatgaaatccgcctcctgcggcggggagagccggtcgccgccggaaccgggccggagctcgtcttcaacgcccgggaaccgggcgcctaccgggtcgaagtgcatcttcgggcccggacgccgctccctcgcggcgttccctggatttgcagcaatcccatcattgttcgaaaggaagtcccatgaccacgatttctctgtcccttcccaaggcccgccgggccgttctcgggttccgcaaccgccgggtgctcgtcctcggcgacctgatgctcgacaaatacatttggggcagcgtttcccgcatatccccggaggcgcccgtgccggtggttgaagtccagagaagcaccaccgccctgggcggggcgggcaacgtcgcccacaacctggaagccctgaaagcggcccccctgctggtcggcgtcgtcggggacgacgaggaggggcagtggatcaagaaacacgttccggacggacgggggatctttctcgaccctgaacggccgacgacggtcaaaacccggatcatcgcccagcaccagcaggtcgtccgggtggaccaggaaaaaaagcaggccattcccgtggggatggaggaccggatcgtccggctcatcaaaaaggaaaaatacgccgggatcatcatctccgattactgcaagggaatcgtcacccggcagatgatgacccgggtgctggcccacgcgacggaagcccgcatccccgttttcgtcgatcccaaggtcgagaatttctccctcttttcgccggtgacgctcatcacccccaaccatcatgaggccgagcgggtcgtccgccattcctgccgaacggacgaggaggtcgaacaggccggccgggaaatcatggagatgatttcctgcctttacctgatcctgaagcggagcgagcagggaatgtcgattttcgagcggggaaagaagcccgtccacatcccgacgatcgcccgcgaagtgttcgatgtgaccggggccggggatacggtcatcgccacggccgccctggccatgctcggcgggttgtcgatccgggaagcggcggtcatggccaacgccgcggccggcgtcgtcgtcggcaagatcggcacggcgacctgcgcccccgaggagctcttagccgccgtcgaagaccattaaagcccgtcgaagcggaagttccgttcggtcaacggatcatcttggctctccagtcgttgagaagatcggagagcgttgtttccagggggatgcgggggcgccacccggtctcccgggtgatcttggcgtagcttccggaaagaagcgggatatcggacctgcggacccgggccgggtcgacctccacgacgatcttctcccgggaatcccgaagcagcatcttgaggatctcccgcaggggacgggctttgcctgaacagatgttgtacgcttcgccgggccgtcctttctcgatgagcagggtgtaagcccggacgacgtcccgcacgtcgctgtagtcgcgccggacggaggtatttccgaccttgaggaccctcgagggtccgcggccgctcttttttcccgtcgcctccgcttcgatgacggcgatttgacgagcccagtccgagcagacgaaatccgggctctgccccgggccggtatgggtgaacggccgggcgatgacgacggccgttttttccgcccgggcgtaaagcgcggccagggcttcggcgctcagcttcgtgaaaccgtacgggctggccgcgttcaacggaaatgtttcccgaagcggcatcctccgggacggctggtttccgtagacatccgaggagctgatgatcaggagtcgggcttccggagcccgaagccgggccgcctcgaggaggtggaacgtccccatcaggttcgtctcgatcgtttcccgccgctggtcccaggaagcccggacctgggagatggcggccaagtggaaaatccggtcgggccggcaggcggccacggcggccgaaacggcggtcgcgtcgcggagatcaagcggaaggagggtcacccggggggccgcggcccggaaatcagggcattcctccgggcgctcgggataacacgtgccggtgatttggagccgggggcggcgccccgccttttcctccgcctcgagacgggtgatgagatggcggccgacgaaacccgtcgctccggtgatgagaacgcggagggttttccgaggtcgcggcgaagcggcggacgtcatgacgtttcccggatcgaggaaagagctcagagggcggcccgccagtattcgaggagatcccgcagagtcgtctcgaaggtgattttcggagaccagccggtggccgccttgaacttggagacgtcggcgcacaagatctggacatcggacgggcgcaggcggtccggatctatccggacctcgactttcgccgggctgagagcgagcagccggtcgagcaagtccttcatcgagacggcgttccccgtgccgatgttgtagacctcgccggacgcgcctttctccaaggccagccagtacccgcgcaccgtgtcccgcacgtcggtgaaatcgcgcttggcctcgaggttgccgacgtggatgaccggagggacgaggcccttctcgatcatcacgatctggcgggcgaaattggaggtgacgaacacctcgccgcggcggggtccggtatggttgaagccgcgcgtccggacgacgcggagtcggtagctttgccagtactgaaagcccaagaggtcctgggcgaccttgctgaccgcgtacgggctgagcggccggagcggattggtttccttcatcgggacttcatcggggtggaccagcccgtattcctcgctcgagccggcgatctggatccggggatcgagcttctcggccatgaccgcctcgaacaggttgatctgcccgacggcgttgatcatgaacgtctcggccggaagcttccaggaggccgggacgaagctctgggcggccaggtggaagatccggtccgggcgggcggcggccaacgctttccgcagggagctcatgtccttgaggtcggcttcataaagggtgattttccccgtatggaggagcggggcgatgttctccatccggctccgccagcggacgaggccgtggaccttgacgccgggatgatgggccaggatgtactcggccaagtggctgcccgcgaaaccggtgattcccgtgatcagaatgttcatgtgatgttcaactccatctggccggaagacgccttccggcgctggtcttcgatcgattgaagcatttcgggcgtgacgtcccccgtgatgtaatttccgtcgaaacaggccgcgcagaaccggccgaggttcggattttccatccgaatggccttgaccaggttctcctgcgtttgatagatgacccggtccgccccgatccggagggcgacctcctcctcgttgcggtcgcgggcgacgaactccttccgggtctgcatgtcgacgccgtagacgcagggatagcgaagcggcggggagcaggaggcgaaatagacgttccgggctccgcagtcccggacaagaccgacgatggcccgggcggtgttgccccggacaatgctgtcgtcgaccaataggacgttgcggtccttgaattccgcggcgatcggattgagcttgaaccgaaccatgttctgccgatcgttgacggcgggcatgatgaacgtccggccgatgtagcggttcttcaccagggcctcgcggtatttcaggttgagctttcgggcgatctcgatggccgcgtcccgggccgagtcggggatcgggacgacgatgtcgatcggcagcccggctttacggatctcctcggccaggagctcgccgaggtggacgcgggcccggtaaacattgacgccgtcgatgatcgaatcgggccgggcgaagtaaacccattcgaacaagcagggcgaatggggcttgtcccagatccgcttcatgtggatttcccggttgtgatcgaagaagatcgccgagccgggaggaatatcgcggatgtcgctgaaattcatgatgttgagagacacgctctccgaggcgatcgcgtaggacgggacgacgccgtcgcggcgctggccccaggacagcggcttgatcccgaagggatcgcggaaggccgccatcccctggccggcgatgtaggcgacgacggagtagccgccgatgacctgtcgaaagacggactcgacggcccgaaagacgatctcaggggtcaaggaatcgggattctgggcttccagggcgacggcgaacacgttcaggatgctctcgacgtcattgtccgaattgaggaggcgatggtgcctctcggcaaggtgctttttaagggcgacgtaattcacgacgttgccgttatgggccatcatgaggccgaagggggcgttcagctggaagggttgggcgtcctcgccccggccgccgccgatcgtcgggtagcgggtgtggccgattccgatggccccggtcagccgctcggcgtgggcggctttgaagatgtcgcggaccagcccgttgcccttcttggtgtgaaaacggccgtcataggtgatgatcccggccgcgtcctggccccggtgctggatcgccagcaatccctggtaaaggtcccggaagacctgtccgttggcccagataccgataacgccgcacatggatcgacccgcctggaattatatcaaatccgccgacttatttccggtctttataatagctctcgtagaaggatttgaaggcggcgtttttttccttgatcctcgtccaccaggcccggttatccatgtaccaccgcacggtcgcctcgagcccttcctcgaaatcgaccttccgcttccatcccaaagccttgattttattgatgttgacggcataccgggtgtcgtgcccaagccggtcgggaacgaacttgatcaggttcttggaagcccccgtgagcttgacgatcctccgggcgacctcgatgttcgtccgctcgtcgttggctccgacgttgtagacctccccgagccggccccgccggatgaggcattcgatcgcccggcagttgtcctcgacgtgcagccagtcgcggacgttccggcccttcccgtacaggggcagcgttcgtccctccaaggcgtgggtggtgaacagcgggatgaatttttcgggatgctgatacggaccgtagttgttgctcgggcggaggatgatcgtcggcgcgccgtacgtcgtgtgataggcctggaccatccggtcggctccgaccttgctggcagcgtagggcgaggagggattcaaagaatccgtctcccggaaaaagcctttctcccggctgccgtagacctcatcggtcgagatgtggacgaagaattcgacgccgggcgctttgcgcagggcttcaagcaaaatatacgtcccgaaaacgtccgtcaggacaaattcccccgcgtcgacgatcgaccggtcgacgtgggtttcggcagcgaagtggacgacgccctggacgcgctcgaaacaaccggcgacgagggccgcatcgcggatgtcgccgtggatgaattcgtgtcgcggatcgcatgaaacgtcggccaggttttccaggtttccggcgtaggtcagcttgtcgagattgatcacgcggagcccggggtattcggccagcatcatccggatgaagttgctgccgatgaaaccggctccgccggtgacgagaatcgttctcccgttcaaggcgcgctcgagaacggagggagccgctttgagcccggacgcccggcggccggccgacggaacggcttttttcacgggacggcgtttcgtctgcttcatcttcttctctccacgggtctcgttttggattccatcccgccggcgacgggacgaggattcacggcaacgacgggaatcaaacggattccgtctcagccgtccttccgctcccattcatacggaatctctccagaatggggatcgagccgctgctcgtccggctccttgtagttgtacggctcggtcgggacattgacgacgatcgcttcttccgggctcgtgcacatccagccatggtaaacgccggccggaatatggatgaggagggggttgtggacacccatgtaaaactggttgatctcgcccttggtcggcgagccttcccgggcgtcgcagagggcgaccttgaccatcccgtggacgcaggccatgttgtcggcctgcctctcgtgcttgtgccaggccttgatgacgccgggataggtcgtcgtcatgtaggcctggccgaacttctcgaaacactcgtcgtcggcccgaaagatctccatcagccggccccgctcgtcggggatgacccggagcttttttacgctcacgccttgaatcatggcttctttcctcccatcggctcgcgggacaaccggagcaggtactcgccgtaggcgttcgggatggcctcggccaaacggcgcagtctcttaacgtcgatatagcccaggcgaaaggcgacctcctcgggacaggagatcatcaggccttgccggtcctcgaccgcttggacgaaattggccgcctgaagaagagattcatgggtcccggcgtcgagccaggccgtgccccgccccatctcctcgacccggagctcgccccgccgcaggtagacgagattaaggtcggtgatctcgatttcgccccgggccgagggcttgaggccggcggcgaaatttgaagcccggccgtcgtagaaataaagcccgggaacggcgaaatgcgaccggggcttggccggcttctcctcgatgctgacggcccggccccggctgtctaactcgatgacgccgtagcgctcgggatccttcaccgggtaggcgaaaacgatcgcgccggtcttcagccgggcgcatttcctgagctgtccgggcaatccgtggccgaaaaagatgttgtcgccgaggatcaggcaggacggcttgccgccgatgaaatcgcgtccgacgagaaaggcgtcggccaggccccgcggctcactttgctcccggaactcgaaccggagcccccatcgccgcccgtccccgaggagagcccggaacgcctcgagcgactccggcgcggagatcacgaggatgtcccggatcccggccagcatcagcagggacaggggataataaatcatcggcttgtcgtagaccggcagaagctgcttgctgaccgaatgcgtcagcggatggaggcgggtgcctttgcctccggccagaatgattcccctcatcggattgtcctttgcccgggattcgcccgaaaatataacatagattgacagttttttccaaaacgcataatctgtccatagtcatgaaaaacggggcggaacgaccgagtggataatccaaaccatcgacgtcttcttcgcggactcgcggtcattttatattccttgctgctggctcttttctattggaagtatgtgccccttgtcgccgcttaccaggccgttcttattccccttctccttttcgtcgccgtcgccgcggcgaccgacgtccgaaagggcttgctgggatttctttttctatttccgctgatcaacaatctcccgtattttttcaagctctacgatccgcttcccatggctccctcggccttggtcctgtttctctttttcttcctgggccggctgatccacggggtcttcttcccttttccgccggaagaaagcggaaaaggaccgaaggaacctctcttcacgccgctccgcctctttgccggcctcgtccttttctccgccctgatcacgttttggcgctacacgaattttttccccctctggcggccgcggatttatgagcttgtgacgaacgtcaagggcgtcagcgccggcggggcgatcatgagcgtcgtcttctacagcctgacgtacctgaccggcatcgtttttttcaccctttgcgtccgggttctccggacggaggggttcattaaaaaagccgtcgcggcgtttggggtcggatcatttctctcgatcggtttcgggtttattcaaaaatttcattcccccgccctcggcaatcttccggccagtctccgtcacggccttctcaacgcgaccttcaaggacgccctgtccttcggggcttttctctcaatgctcattcccttcttggccggactcctgcccgccgtcaagggaaggacgaggctgacggcggccgtcatgacggccgcggccggctatttcttgttccacgccggctccaagagcgccctcatcgccgccgccgccgcccttctcttcctgggaatcctcatgcttccggcgattctcgagcggcgcggtccgttagcccgcctggtcatccctctggggctggcggccgccgtattcgccggcgcctcgatctatctcttgatatcgggaaatttcccctccgagaacggacagcgcacggcgaccatcgaacgcatggaggatttcgcctcagccctcgaaatccgcaccgccggccactggaggatcgcgggccagatgatccgggattatcccctaagcggcgtcggggtcggggcctatatcatcgaaatggccaacacggcgaaaaccctcaagatctcgatcggagttcccgaatcggccgaaaaccttcctctccacgtcgggtccgaactggggattcccggcatgcttctattcctttggatcctttgggagatgggaaggcggatttttctctcgttccgggcggcgccttccgggacgttccccagggccctcatcgccgcctcggccgccggattgttcgccttccttgtgaattcccagtcgcattcctacatcggaagctatgaaatccagtacctcttctggtttctcggctccctggcgttcgccggggacgtcccttcgcccgccgccgcggcagggcggaagccgtcgagccggcgcttgggacgcctcttcggaacaatcctcttttttctcggcacggcggggcttctttggaattcagctcattcgctctcgctcaacgcccgcaccgagcgctaccggctccggcagggattcggcctcggtccctatgaaaaggacgcggacggacggcgtttccgctggagcggacgatatgcgggactgaccggccgggccggcgctcctccgctcaaggcgtggctcctcgcttctcatccggacatccgcgtccggccggtccggctgcgcctcttcgccgccgccgacctggccacgaaaccggtccttctccaagacctcgtccttaaagaaaacctatggaaaaggatcgagctccaggccccccccggcttcccggaatcttccctttttctgttcgaggtggatcggacgtggaatccgcgtaaggcgggcgtatcggacgatccccgggacctcggcctggcgatcgggatcatccaggcggccggcccgatcaagccgaaggaaaaaaccgaggcggccaagcccgcaaacagtcctccggaaaagaaggaaaacagttagggagaggtaagggggattcgccgcgcctccggtccgccggacgcgcggctcaccaatgattgatcgagctcgtgtccgggcccgggacgtaggtgggcacgatttcccgtaaaagaggaatgatctcggatttccggcaggaccccgattcgcaggcatcgatcagccggtccacgcttttccagatatgggcggcattcaagggtttcgaattcctggccaggaagatttttcggtgttccgtgggcatcgccccttcctcggccatgatcagctcttcgtaaagcttttcgccggcccgcagtcccgtgtagacgatcatgatgtcgacatccggctccaatccgctcagccggatcatctcccgggcgagttcatcgatggacacgagctcccccatgtccaagacgaacgcctcgccgcctttccccgccgtcgccgcctcgaggacgagaaggaccgcctccgagacagccatgaagtaccgcttcatgtcggcgtgggtgacggtgaccggtccgcctttacggatctgctctttgaacagcgggataacgcttcccctgcttcccaggacattgccgaaccggacggagatgaaccgggttccgcccatcgcgttcagcgcccgcaggatttcctccccggcccgcttcgaagcccccatgacgctcgtcgggttgatcgccttgtcggtcgagatgttcacgaaccgttccgccccgtaccgcatggccgcttcgccgagaatccgggtcccccggatattcgtcttgaccgcttcctcggggtagtgctccagaatcgggacgtgtttgagggcggccgcgtggagaacgatttccggccgcgtctgctcgaagatccgatcgatcttggcttcatcgcggatcgtcgcgaccaccgggaggaccccggcgacggcgtttttcagcctgtttacgacgtagaaaagctcggtctcgtcgttatcgagaaggatcagcgcgcccggctcgaattggctgatcgtccgggccagctcgccgccgatcgatccccccgccccggaaacgagcacgcgcttgttcttgagaaacgcccggattccctcaaagttgatttgaacgggcgcccggccaaggaggtcctcgacctccacgtccttgatgtccatcagggatactttcccctccacgatgtcgtggatgccgggaaggagcttgatgctccggacttctcccgtcgagcggaccagctcgacgattttccgaatgtccttcgaattcaccgtcggaatggcgatcagaacctcgtcgacgccgttgccgtgaaggatttgggggatatcctgccgttttcccaggactttcaccccatggatctccgttccccgcttcgcttcgtcgtcgtcgacgaatccgattgggaaatgggccgatttccggtttcccgtcatttcccgggcgatctgctctccggccgtccccgccccgacgatcaggacttttttccgaccccggctcaaacctcttttgcggaaatggtactccctcaaggcgcgcttggatatccggagcatcccgagcaggaccagggtgaaattgtagttgaggagaagaaccgaacgggggatttccctcattccggccagccaattgaacgcataaatgatgacgatcagcaaaagataggacaaggtcacggcctgcaggagcttcagcatgtccttcaggccgaagaatctccaggcgacattgtagaggccgtggagggcgatcatcgtgaccgtcacgaccacgacgacgcagatcctcacccacaagcctttggtgaacgtcgccgggatgcggccgtcgaagcgaagccaaaaggaaagataaacggacagggcgatcaggacggcgtcggcggttaagaaaaaaaccttccttttgagcaccgtgggccggaaaaccggcgcgatttttgattcgaaacgggcggtttcgctttttcccattccttcgtcacgtccttttcaggggacggtaaacaatatactctttcggcccgggcatttcaaaccgcctcttccccgccccgggcggaaagaatctctttcagggaccggcagatgtacgccagctcctccagccgcaagtccggatagatggggagggaaaggcagccgttccagatccgctccgaattcggatagtcggccggattcagaccgtacctttcccggtaatacgtcatccggtacaagggtttataatggacggacgtcccgatgccgcgatcggcgagccgctccacgcaccggtcccgggagagcggggctttcggcgtgagaacgaccggaaacaagtgccaggcatgatcctcgaatccgacctggagctttggcagatcgagccccgggattccggccagcgcttccatgtaatagcgggcgcagcgttcgcgccctttccgcagcgcctcggcccgctccaattgagccaagccgatggccgcggagacgtcgggcaggttgtatttgaagccgggggcgaccacgtcgtactcccaggacggcttgtcggacacgtagcggttccaaatatcgcggtcgatgccgtgaagccgcatcactttcgcccgggcggcgacgcgatcgtcggccgtgaccagcatcccgccctcggccgtggtgatcgtcttgttggcgtagaagctgaaacacgtgacgtcgccgaaggttccgaccaggcggccgccgcgccgcgagggaaaggcatgggccgcgtcctcgacgacgcggattcccttccgccggcagacgtcgaggatccccgcccctttctcaacggtcatagccgccgcctggccgccgtaatgtacgaccaccaccgtcttcacttcagggaagcgccggacggcttcttccaggatctccgtcgtcaaaagcgaagttccgtattcaacatccaggaagacgggatcagcattaaggtaacggatgacctcggccgaagcggtgaacgtcatcgccgggacgaagacctttgagccgggcccaacgccgatcgcttccagggccaggtggagggcggccgtgccggaattgacggcgcaggcatggcgggccccgaccgccgccccgaactttttctcgaattccagggtcttggaagccgtcgtcagccagccgctttcgaggacctcccggacgtaggccaactcgttcccgtcgcacaaaacgcggctgtaagggattttcatctcagccatgccggcacctgccttccttcagaacttgaggacggccgcgatcgttttaaagatcaggccgaggtcgcggccgaagcggggcggcccctcggcgtatcgctcgtagagatccagcttgcggggaaggatctcgtttcggtagacggcttccggatcggccgccgccgccagcagctcctcctcgttccggtagatgatggacgccggatcggtgatccccggcttgacccggtggacgaccgcccaccgccgcggataggccgccacccacttcgacacctcgggccggggaccgaccatcgacatgtcccccttcagcacgttgaacagctggggccactcgtcgattttggtcttgcgaagaaaccggccgaaggatgtcacccggcgggaatcgccgggctcgaatccgccgccctcgccttccgaggccgggatcatcgttcgaaacttgaaaagcgaaaacggccgccccgcccttccgatccgcgtttggcggaaaaggaccggccggccgtcggcgagaaaaatcaagacggccacgagcaggaaaaccggcgaaagcaaaagcagccccagcccggacgccccgaggtcaaacgctcttttcatcactcgccgcggccgaccgaagaccgagctccccggcaaaggcctcatccaaataggcgacatagaagaccgtgtcctcggtttccaattccggcgtttcgatccatcggcccttgataaaaaccctgcggctcggctggttgatcttgtaaattcccgcccgaatcgcccggcttccccgtcttcggctgtaggttttcgtctcctcgaccagagccgggaaaatgccccgaccgcggcaattcttgtcgacgaccccgatcgtcatctgggcgaatccgggctggtcggcgatttttctgccggcgctcgtcacatccggccggcggaaaagacggctccagagcttatgattgaaaagcagcgccggcctccggaccaggctgacggcgaacgcgggaaggcaggccagaaacatcggccgggtgaacgggccgtcgcagacggccacaatcccgacgatttttccttctctctcggcgaccagggcataggacaccgcgctcgtcacgagccagcggtacatcgcccggacataatgccggccgagcatggccgggacgtgctcgccgaatttgaaggaatcgcaatggagagctgtcatatcctccaagtccccccgcccggccagccgaataacgggatcgtcggaatgagtcatcgtcccccttcctttctccgcggccggacggccgcctcttcgaataccgccgtcatccggccgacgccgatggaaaacgccagctccttccggtagaactcggcgttttttctccccatcgtctcccgctcattccaggaaagggaggccagccccaggaccgcctcggccagggcggccggatcttcggggcggcatgtccaggctcctccggcccgggccgccagctcggccgcgcttccccggatcgccaggagaaccggttttcccgcggccaaggaggcttgggttttctggggaatccccatccgggccaggggatcgtccttcagatgcacgagaagcacgtcggcccgggccgtgatccggcccaggctctccggcgcctgccggggaatgaacaggacgtttttctgcccgcggccggcggcctttttcttcaaggccgattcctccactccgtctccgacaaaaacgaagcggatgtccggacgtttttcctcgatcaagaaagcggcgtctaagacgccgcccaaagcctggagcgctccgaaattgccggaataaacgacattgaaccggccggcgagcccgaacggatcggatccctccccgtccgtttcccccggaagcgaccgttcgtcgcaccaattatagacgacctcgattttcttctcgggaacaccccgggcctccaagcattttttgtatccattcgaaagaacgatgattttccgggccagccggtaggtcgccttgctccaagcccccaaaacggctgaaacgccgggaagaggaagcattccagtcacggtcacgctttccggccacatgtcctggacgtcgaggacgtacggcgtcccgaacatcatccggaacaccatcgccggccaggccagcgtagccggcccctggtagacatgaacgacgtcggggcgggcgaccaacggcggccccagcagggcggccgtgccggccaaactcagatatccagccgtccgccggacggccgaacggtcgtggctcggatacatcatgacgcgggtgacggggacgccgtcgaggatttcccgcatccacggccggatccggtagccgggatagactttcccggcgggataatgggggaatcccgtcaacacttcgacgtcatggccgcggcggaccaactcccgggcaaaggccaaacccttcaaatggttcggctccggctggaacagcggcgtcaggagaagaacgcgcatcaatcggccgcgcgccacaccgtccggttcacatagtccgtgtagctcaggacgatccggaggactttttcggacacgttgggaacgtcataatccgcgacgatccgcggtccccggcactcgccgcgcggctgggtggccaggacggccaagccgcggcggacgttttcgtaatccaagccggtcatcatcaccgctccttcctccatcccctcggggcgctcatgggcttcccggatgttgagggccgggaagttgaggatggaggattcctcggtgatcgtcccgctgtcggaaaggacggcgcaagcctcgagctcgagcttcacgtaatccgtgaatccgaacggcttttccagcattatcccaggggccaaggccggtttccgggcctcgatgatttttcgggtccgggggtgggtggtcacgacgactttcttttttccgtctccggccaggccgttgaggattttcatcagcccatcgaacggcttggacgaatcgacgttttcctcccggtgggcgctgactacgtaatactcgccgggccggagcttcagccgctcgagaacgccggatttcttaatcttgggaaggtaatgatgcaggacttcgaacatcgggctgcccgtcttgatgacccggtccggcggaagcccctcgcggaggaggtactctcgggaaatcgcgctgtagggaaggttgacgtcggcgaggtggtcgacgatccgccggttgatctcctcggggacgcgctggtcgaagcaccggttgcccgcttccatgtggaaaatcgggattttccgccgcttggccggataagcggccaggcagctgttcgtgtctcccaggacaagcagcgcgtccgggcggtcgcggtccaggacggcgtccatccgctcgatgatccgcccgatcgtttcgcagggggtcgccccggccgcttccaggaagcggttcggcttgcggatctcgaggtcctcgaaaaagacctggttcagctcatagtcgtaattctggccggtatggacgaggacatgctcgcattcccggtccaaggccggaatcacccgggacaggcggatgatctcggggcgcgttccgacgacggtcatcaccttaagctttttcatttctcacctttgccgcgaacgtgtcgggccgggccgggtcgaagatctcgctggcccagaaaagaacgatcatctccgcggtcccgacattctcgatggaatgggtccagccgggcgggatgtccacgacccgcatctcccgtccgcagacgggatattcgatgatctcgcccgtcgtcaggcgacggaagcggatgaccgcctctccttcgagaacaacgaacttttcaaccttggagtcgtgataatgatttccccgggtgactcccggacgggttcgggaaacgaagatctggccgtggccgccgagcttgagcagctcggccagcgccccccgttcgtcttcccggaccgccaggtcgtaatcaaactcctcttcgggaaggtaagagacgtacgtcccgaagagccggcggtcgaaaggatcgtccaaggccggctgggccagggtttcccggacggcccggaacgcctggatcttcccggccaacgcccccaaagagacgcggaagaccggcgtcacggaaagaaaggacgcgccgccggggccggggccggccttgagagcggccagaaaggcggcgacgacgtcgtccacatggacaagatcgatttcccggtccggatcggatatcgaaatcggcagatcccgggcgatattgtggcagaacgtggccacgacggagttataattcggccggcaccatttgccgaagacgccgggcaggcggaaaatccggacggccgccccggttcggcggtggaaatcgaggagagcgtcttcagcccgtttcttggagcggccgtagggattgtccaagagggcctggatcgaggaggaaaggacgaccagcggacggcggccgcggcgctcgaggcccgcaaggaccgccgccagggagccgacgtttccgtcctcaaattcgttttccttttccggccggttgactccggccaagtgaatgacggcttccgcttcgtcaaggccgcgctccaggaccgcggccgccgtcccgagatcgacgccgatgatttcggtcccggcttcgcggcccaaggccagccggagattctttccgatgaatccctcggccccggtgacgagtacccggttcatttcgattccgtcccaagctcgtcccgaaccagggcgagcttcatcaagagatcggccatttcgccggtgtcgagacgccgggtgttgtgggagttatagtcgttttccttcgaaacgcgctcctgcccctcggtgaaataaagattgtaatccagtcctcggttgtcagccgggatgcggtagtaatccccgaggtcctcggcccgggccagctcctcccgggtcagcagcgtttcgtaaagcttttcgccgtggcgggtgccgataatctgaaggggattccgggccttgaagatctccagcagcgcccgggccagcgtctcgatggtcgccgccggcgctttctggacgaagatgtcccccggccgggcgtttttgaaggcatagagaacgagatcgacggcgtcgtcgatcgtcatcatgaaccgggtcatctttggatcggtgatcgtcagcggctttccctgcttgatctgctcgatgaaaagcgggatgaccgatccgcgcgaggccatgacgttgccgtaccgtgtcccgcagaaaacggtcttttcgttcccgcccaggcgggccttggcgaccatgagcttttccatcagggccttggacaatcccatggcgttgatcgggtagacggacttgtcggtcgagaggacgatgacgctcgaggccccggcttcggccgcggtgttcatgacattttccgcgcccaaggcattggtccggatcgcctccatgggataaaactcgcaggacggaacctgcttgagggccgccgcgtgaaagacgagatcgacgccggccatggccggcgcgaggctgtcggcctggcggacatcgccgatgatgaacttgagcttggggctcttgtaggccagccgcatgtcctcctgtttcttctcgtcccgggagaaaacgcggatctcccggatgtcggtcttgaggaagcggccgaggacggcattgccgaacgtccccgttccgccggtgatgaggagaaccttgtttttaaacatgggcggatcatttccccctgagggcgtttttcatcacagcgattggattcaaattatgcctcctcccggatgaagtcaaggcgttcggcggcgatccgcgcgggcggaaagaacctcgcgcagcttgagcaggacgtaaggagcggcgtaaaggccgcgcgaaaggatctcgacggcccgcttcggaagccggccccgctgctcgaggcgcttgacggccgcgtcggcccgatggcacatccggtagcccaacctcgtcgcgccatcgattctttccgcctccggacgcgcccggtcccggatgaactcctcccaaatctgggccttggcttggagttggacgcgggcccgccgggccgcgttccccccccggatccggacccgggtcaggacttcgggaaccgccgccagcggatatcgggccgccaggttgatccagaaaagactgtcttggccgtagcgcattttttccgaaaagcgcagattcgggctttctctcaggatctcggcccggatcatgacgcagggcgtggcgatgggggccgatcgaaggcatcggagaaagacatccccgcggcaggccgagacatcgaccgttttctcggcccggcgaggatttccgccgcggaaaagcgtataaccggtatgcgaccacgccgcgcccgtcgccgtcatgaggccgagttgtttctcgattttccgttcctcccagacatcatccgaatcgaggaacgcgatgaactccccggcggagttctcgattccgagatttctcgctgagccgggaccgccgttgtccttgtggaaatagcggatttttccggcgaagcggccaaggacacctcccacatcctccggcgagccgtcattgacgaggatgatctccgtgttttcatatgtctggcggacggcgcttccgaccgcttcctccagccagcccgccccggcgtaaaaagggatgatgacgctgactttaggcgtcaaccgcccgtgaatctgatcgaatcccttaaaaagtccaagcatttcttatccggccaagccatcgcatccgccgatttgatgttttttcgggagaccctatcaaaagaaattagcgcttcttcgccaaaacgatattaatcatcccggaattgggaacaatcgacgaggccacacgataaagaggattcatcacatgtcgaagaatcgacgcgcctttcggcagagagatatgcgtatccgcagagcgtgtcattaaaacattaaatccatagtgatggacaatatcgattgtctcggccatcgtgtactcccgcacatgaccgaaaccgtggacccagattccgtccccatgtgaagacgccgacttttcctctttgtacactcgatacaccggatcgagcaccgccttccccataatcgctttgatgcgcttgctgagcatcgcgatatttggaagagaaaagaccagaatccctcccgctctaagaattttttttatttccgaaaacacttttcccgggcctgtattcaaatgttcaaaaacctccgtaaaaacgaccatgtccatctgaccgggagaaaacgggatttcatcttttaaaaggtcacacacgcaatgctctattcgatttttatgacatcgatccgctaggagcgaagtgagatcaatcgtgaacatccgtacatttggaaaacactttcgataaacaaacgtcatcggcgaagtcccaatatcaagaatcgccgattccttccctttgggcaatatcctcaggcctttttggatcatgaggacattctgccggacagattccttatggtttatgaaatattgtttttcgacgtttcggctttgtcccaaacagttgtcgtccgaagaaagggatatttccataatcactttttcaaaagaggccttgaaatccggatcatcttcgcgtgaatgccgccatttaatactacggcgcgtcacgtttatttcattcctttttcttcaaggattctcactaattgttttgcgtgccgttcctttttatcgcataaataagcgatgatcgtctttgttcctttttccgcgatgctggatttattatcgtagtcctgcaaaacactcaggatcgtttttgcaatatgctccggattttttcgcaagatccggtagcaattatacccatctttcatcaaatacgggatcgttccgacgaacgtcgtgaggatcggagttccggcgatcatggcttcatacaggacccgcggaaagccctcatggtgcgtcgggagaacgaagaggtcggcttgccggtacattcttttcaagaaatcccgatcggagacaaccccgtgaaggcggatccatccgccaaggtcctcctccgcgatgatttgtttgatcttcgccgcatccgctccgtcgccgaccatgtcgaggctgaagtcgacttcccccttgtccttcaggattttcaccgcttggacgagatcataggagcctttcggctcttcgacgcggcctacatagaggaggcgataatgatcccgtcgctcatacgtgcggccggaaacgatatccttctccccctcttccatcatcggacgtattgtttgcgcctcgcctcctcctttcctgataatttcagtgaattgaggcgagattgtcaaagaaatcatcgctttccgaaataatatttttgagaggcgagaccgcatccctttttccccccggatataaaaaccaaatggttttctccataggacggcaaagatggccataaagagattgatatttccgggataatatagatagagaaaatcatattttcggacgattttaaatccaacaatcaacccttggatataggcggcgtattttattttccccctcgatatcgatatgattttaatatcgcggtcattgattttgtaatcaaagatactgtttttttcctggtttttaatacgaaattggaaaaatcctacctgttcaacaagatgggataattcaacaagaaatcggccgtcacttcgaaagataaacaaatcgttgcctttttcaagcatgacattatttctaacaagaaggattttcatttttttccatgccattcccgcttacgcgccgctccccgcgaacgggcttccttccgccgccggtttccgaacgaatttttcaaacaaccagacgatcgccgccggccagaggatgccgcgcaaggcggtgaagtagcccgagcggggataataaatggaaaacgacagggaaacgacgtaagcgatgaggtaatagagatggaccttgtcgatcgcccccctctggaatttcatgttggcatagccgaacagcatcatcatcacgaggacgcccgccgctccgaacgaaatataaacgtcggcgatgatcgtattgccgaggccggcgccacgagcccccccctcgtactcatgatacgttaaaagctgcccggaggaaatgtcctggagatcgacatgaaaaagcgtaacatacacgctctgcaagccggggacgacgctgaggatttgagtcaggaatgtccgcccaagcgtgcgctcgttattttgaacatagctcacggcgagatagagattgcggttgttgacgatcatgtcccgcccgaaatcaaaaaccgattccggcacaaatcgttccgctccccgtttatagtatgcgatgatagtgctttcgtcttcccgcgtgtcgtcataaaccgttctcgcctgcgagacgaacatcatgagatacatcccggccgcaatgaggatcgcgaagaccatcagcctcaggggacggaggaacgtcgtgaacaaggcgccgtagatcaggacgatttgaatcgccggcccgcggtctccgacatagaggaaaacaaaaacggcgaggaccgacagcccgacgagacgcggccggaagacccgaaacaagcttctcccccgtccgtcatcgtgaggcagccgaccgacgaaggagaccatgagggccagcgggaagatcccttgaaacgcgatcaagagatactccgaggccgcgctgtaggcgttgaaaacgccccgggcgatgttgtcgcgggaaaagaagacgaagagcgcgaacagggccaaggaaaggacaaacaacggcgtttcgagcggtcggtaccgctccgcgtcccagccgcccggtggaacgttcttgatttttccgccgaacaccgcgcccaggatgtacgcgttcatgccgaggagggccagggccgtcgaaacggtgatgagagagggatcgaatcccctctcgaagaccttgaagagaaacggccggttcggataaacgaagacgggatagacgaaatggacgagaaaaaatccgatgatgaagaggacatgaaaattaaaatagtttccgaaaagactctttttgatgaaccaggccgttgaagccaagaacaccgccagcacggccgcgcaatatcccagggaataatcgtccggggcgaacgcgtacagggcgaagctgaggacgaggaagaagaacgcgacggccagagtcaggcgctgagcggaaggacgggcggtcatttatctcgcgtattcaaaatgaacgaaatccggctcgtaatatttttgaaccgcgttcttcatttccccggtataccgtttttccttcgccgccgggcggaacgacaagcgaaagacgattccggggtgttttttgatgattctccaggcccgaacagcatgagttcccgggctcaaaccgctcgaatcgttgagattttgaagtcgcgcgccgccgaggttcaaccgccgggcgacttgggcgaaatcctcgttgatcgtctccagcttcccgacgtaatcaacgagccgagtccccgattcatcatacacataggacgacatgggcttgatgaagtaatggagactcggatcgccgaacagacgaggaagctcgtctagaatgaacgtttcaaacgagactagacgggcgtatcccaggtacttgtaaaaagaataaacccggtcatagggattccggacgaacgcgaatttaaagtaggcgtcgaacgtttcttggttgacatatccatattccacatattcccgggccgtcaggtgggacaggatcccgggcccccgatctccccggttgacgatccccagaagaagcgattcccggcgggcgaagtccaggccgagcgcatcgagaaaaacctgctcaatgctgatgcccgccactttcgggatgtgaacaaaaatgcatttgtattcatgagacaacatcgaaacgccgtaacctccgtcccggagtcatgggatctccgtagtgttttccgccttgagccgcttttttattctcaggatctgcgccgctttttctccgaccacccggccgtaatccagaaactgccgccgctcggccttcgtcgcgatcaggacgtaacatccggcgaaatagagaaggacgctgaaaacggcgacggccgcccggccgaggaattgatcgaacccggccaagcggatgatcccccaggccggcagcaacacggccgccgtcatcgccgacgactggccgaagatccggatccagacgccgcgccagcgggcctggacggcctttaatccatacacgatattgagacacccgcagaggaggctgcccccgcacaggccgatggtgacggaaagataggggtcccgcgtcagatgaaacagggcgaggatcgcggcaaacggcacgaggacaagggcgatcaagtagatgagcacgacggtcttcagccggcccagtcccttgagcatatgatgggccgaggacgtgctgagctggaaggagacgcaggcgaacaaagcgaacgcatagggcgtcagaaacgcgtatcgggacccgacccagatcgtcaggatgttcctcgtcaaaaggccggccgcgatcaccccggccaggacgaacatcgtcgtataccgcatgctgcgaatgagcagttccttgagcatcggctggtttccgaccgcctcgtaggcgctcgtcaacggcatgacggtaatcgtcatcggccggatgatgtcggccagcaccgagaccggcatcaagatgatcgccaggtgcgagacgaagctgggagagaccatcccacccatcagccaccggacgcccgttgaattggcggcgagggaaaaattcaccaggaccgtcgctccgccgaaggcggcgatcagccggaagctcgtccagttgaaaaagcgcggccggttctgcagtccggggacaaggcgataggcgatcgggacctgggacgtccgcgagaggaataaaaacaccgccgtgatgacgacgacgctctcgagggacggcttgaccagttgaaaccaggccacgatggccaggaggctgccgtatttcgagaccgtgtccaggacggcgccgacgtaataacgctgccgggattgaatcacggccacatacggcgtcaagggaacgatgaagagaacgatgagggcgaccacggtcagggcggttctcatcgggctggagggcgcgatgaataatatcgccgccgccaacaacccgccgcttgtcaccaccgccaggagaagggaataaacaaagctcgaggaaacgatttttttgacctcgtccaggcgtccctgggcgagaaaacccgcgctgtacttgaccacgccctgctgcagggcgatttcgagctgaacgaccgacatcagcaaagaccagatcagggcgtagaggccgtatcctccctctccgatcgtccggatcaagtaaggcaccagaatgacctggggaacgatcaggaaagctcgggtgatccacatgatcgcggcgttggaaagaactaaatgggactgtcgcataaggcgagacttgaaagcgcgggtcgtcagagaacggcgtcagcctccctttcgttcttcatcccgctgttttcaacgttcaaatcgtcaatccgtcgatggatttgatttatctcgggctctggcctggtcgcggaagaaagcgatccccgaggaaagacagaatccgatgaaggccgcgacgataaccatcatggtctttcgcggagagacgggcttgaccgaaggcgacggatccttgaccagctgggaataatcgatccggtttttcttgtcttcgagaagctcgatgtcgtttttcgcgttattcagctcgatctggatctgttcgatctggttgtcgacctgtcgcataagctgttcgttgtttttgatcgcattcgtcaagtcctcgatgttcactttctccgagctgaccttgtcctcgagaacggtcatgtaccggatgttttgctggacttcgttggaatagagaagaagagcgagcgtctctgttccgttcttcttttcggccagcgttttccgctgaagttcgtccaactcggcgatgcgcgttctcaccgacctcatctcgtcctggatgccggcgacacggcgtccggaaatggcttttttgttttcgtccgcggcaatgttctggcggatcttttccttctcgattttttttgattcgatccggagctcataatcgaggatcttgtttttggtttggtcgatttggttgttgatgttgctgaattcgacatcgattttcttgtcgaactcgcttttcaaatggttgaagagggcgaaaagaatctcccgtcctttctgcggctcccggacgcggatggaaacccggacaaggttcgtgttccggatgttatcggatttcaatctcgggaatttcttgtaatcgatgttcatttcggcggcgatcagggcgttataggaaccctcgctgatttgactcgccacctgcccgggattgaccgccaggatttccttgaactcgccggtttccgtttgggcgaggaatttgctcgggacgacgatcgcttccacctcccaggccttgggaaggaaataggacaggattccggccgccacggcgagggccgccgtcgcgatcagaatccgccagcggtgtttccaagaaacgaggatgtattccgtcaaatcaactccttcaaaagctttttgatcttgctggggcatcaagccgtcctttacatcagatttttttatcgattacgagcttggaaaaaggatcaacgctggcggatatcctcggcctcataggccaggacatacgcatcgtaaccgtcgatggggacacggccgactttctgccagttgccctccggcaggaatgtcgttcgggcgtagcatttcttcaaatccgccgctcccctcgattcatccgcggaagcgaaatgaaaggtgaagctgtgatacagcttcggatgcgcggcgatgatttgatccaaggcgagcctcgagatttccagaagcttgtccctcaacggccgcccctcgacctggatccagtagaaccggttgaccggcgagaccccgaccgattccgtcttcagaaccctaatcttcacgcccgtcgcctccgaaaccgcggtttcgttgatttccgcaatcaccgccgcggccggtggcgcgggggcatcttgggctttccggcaagacgggataagcaggctgccgatcaggacgctgcaggcaagcaacccttcccttttcatgctcttcctccctcacaaagtccttccttgcccctagtgtggactaaacggctttgggaatcaagctctctccgaacgaagcgccgggcggagggaaggaagacggatcaggccgtcggagagccgacggcgatgattttaaaccccgctttgcgcaaggggccgtaagcgctctggagcatccgccgtccgtccatgaggagcggccgttttttatgctttttcagaagctcgtccaaaccgcggaattggggccagtcggtggcgatgatcaccgcgtccgccccggccacggcctccgcctccgaggaggcataaacgagggcgggcgagggagggaacagccgccgaaaattgtccatggccgccgggtcgaaaatccgtgtttcccggacttttttcccggcgaggaacgggacgatatcgaaggccggggaattgcggatgtcgttcgtattccgcttgaaggcgacgccgagaagggcgactttcttgcgcgtccagtcgaagcgggcctcggtttcggcccggttgaggaatcccaggagctggcggcggttagccccgaaaatctcctggacaagggaggcgtctttcttccgggcttgaagctggtaacggagcgagcgggcgtccttgatgaagcagctccccccggcgtacaggctgtcgtaaaggccccaagcgccgatccggggatcgctcgagaggattctccggacgttttcgaaatgaatgccggggaacgattcgcacgtccggccgatcacgtcgaaacaaacggccaagcggctgaaaagagtgaaattggccagcagcttgccggccgccgcctcccgggggttgacctcgatgtaccggaccgtcggggcgttcagaaaccgctggtaaatgcggcgcaggacggcgaaatccttttccttctcggccccgatcacgatccggtccggccggagcgcccccatgacggcctggccctcgacgaggaattcggggttggatacaaccccggtgttacgaaccccggcctcccggaggatcttccgggttcggctgaccgtgtcgatcgggacggtgctcttgttgacgatgacgatatacttttcctgggcgcctttgttccggcggcggagggcggccgcgattttccgggcggcctccaggtagtacgtgagatcgctctcgcccgtttcattgatttccggcgtcggaaggcacatgaaaacggcgtcgcagcggtccaggaatttctcgaccttggagtaatcggacgtgaattcaatccggtcccggttccggacgagcagatcgccgaggccttcctcataaatgcacgattcgatctgatcgcggtctccggagcggagcttggcgatttttttcgcgtccacgtcataagccagggtggagtggccgctgtcggccgagacggcggctgaacaagccccgacgaaacccgtccccagatacaagacgttcatcccggacacggaatcctcaatcctcgttttctgcgacataccgggctccaataggaatcgttttctctccatcgacttcggatacaggctaccgccgatgggcttgggagacctcatggacggacatcgattcaacgacggaggaaggacgccgggcgacgacggaaagccggccggatatcccctcgcctgatcacaaaaacatcataggaaaaataacgcgaaaaaacaattgacttcatttgatttttcaccgccccctgcgtccgaggatatcctcggacggcccgatgttgcccagccccagggagaacagaaattggatgtccggcgtttcccgaaagaaaaacgcccggaggcccatctggatgtcgatgcattggacatgccagacggcggccaggcccgcgtagagcacctttttcgcctggaggttgtattcaaactcgccgagcgtctccaggcggagggcggggaactccgcccctccccgaagcccgatctgatggcggctgatgctcgtgtagccgcgatagggattgatgcttttgtaccaggaaacggccaggtaagcgccgtcggaggcgtttccaagaccggctgaagcccgaacgctggacaggaatcttttataagtgttgtatcccaggctgaggtccaggttgacgccggagaccgggaagaagcggagcttgttgaggatttccgagaaccgcgggatactcccgtcctcgagccggtaccggctcaaggggctgtttgcggcgtccacatagtaagtctgctccagctgccaggtcagcaactcgcgggccctctcctcgccccgcttgaccaggatctggttctgcaccccgtagttgacatagtggtatcggaagaaaaagccgctcgtcgtgatgatccggtcggagtcgatggccggcgtgtcgtaccggtacgtgatcgtcggctcgatgacgtgtttcaaccgggtcgaagacttccggatgtcgaaaatccggtacaagaccgggccggtcatcgtcgccgagaaggatccgtttccgcttaggagcccccggttgagggtttcatggctctccggatcgcggctgtttccgtaataatcgaggttgccggcgacggagaaatcaaaaccgagccaagcgatctcggtgaagggcagggtgatcctcggcgaaagggacaggacgctcgatttcacctgggtgcccgccttgaactggttggtgaatccatactgccagttgtcgtagccggcgctcaaggaaaaatagctcggcccccagagctttttcttgaacaggctgaagctgatttgcggaagggattggcggatccgggcgaacgtccaggcggggtaggtcgtctcgaaccggctgaggcggacgctcaaattcgatccggtccagcttttcgtcacgtagacctgggagctccggttgtaaaccagggcccgggtgaagtcgttgtcgaactcccgggtgaaggagaaggagttctggtagtcgacgttggcgacgatgttgagctttccgggaagaggctggttgtggctccagcgaaagatgacggcatcttccggcttgacgcccgtcgacggagtccggtagccgaaatagaaggcgttgaggcggccgccccatccgccctcgaacaggtagcggaattcgaggcccccgccggcgcccttggccgcgtaataatccagggaaaaggtggcgtccatattccgggccatggcccaatagaactgctgggtcaggttcaagcctttctgtttcgaataaccgatccgggggaagagaaagcccgtggcccggtcccggtcaaggggatatttgaggtagggaagatagaagatcggaacgtccttgatcttgaagaccggatcccacatcttaatgtattcgttccgcacgaattcggcccgggaggcggagaacttccagcgggggacgggctgggagcagccggtgatcgtgcttttccccacccggaacaggtcggggctttcgcgctcgacccggtcggactcgtaccgatattcgggttgaacgagcccgacgacgttttcggcccggcccaggccggtttccatgttcaaggcgaaccggtcggccgagaacgtctcgtcgggccggatcagggtgacgtggccgacggccagggcgtccttggtcgtctcgtcatagacgacctggtcggcgcagagaatgatctcgccataacggatctccacgtttccggaggcggtgattttgttgtcgagccgttccttgtagtccgccttgatgacgagcttgccgacagcggtttcggccggggacggcgcggccgcctggggcggaacggcctgagacccggtctgcggccgggattgggccgaagtctcggccgcggacccggccagggcggcaaggaaaatcacaattccggccagggcggaaacagtaaaaatgctccgccggcccgccattattttccttcctggcaattgcatgggaccgcccaagccttatattgtagcacaacggaagcggcttcgattccgccacgacgggggatgcctggccctgaatcagaggagcgggtggcgttcgccccggcggggatcgacggcggcctgccggatgtcgtggacgatctcgaccgcccggcggttttcctcgaggccgaagccgcggccggcgaggatctcctcgtaaacgcgggaatgaaggtccgcgcagccctcggtgaagtccgcgggctccccgtcgaccgtgatccggcggaacgcccgcgggctccgcgcgcggccggcggcgggaacgtccccggcccggagcgagagataccaccggatccgggcccggcggagctccaggaagccggccgccctgtccggctccttcaagtgaacgatattgccgccggcgaccgcctccccgaagatccacgtcaggacatcgaagaaatggatgccgatgttggtcgcgactccccctgatttcgtctcatcccctttccaggaatagaaataccagcggccgcgggccgtgacattggtcagctcgacgtcgtaaacccgcccggccgggccggtctcgacccgcgacttcagcgcccgaagggccgggtggagccgcatttggaggacggtatacaccttccggccgtactcggcctcgatggctttcaaggcgtcgaggttccaaggattcaagacgacgggcttttcgcagatcgccgaggcgcccaggcggagagcaaaccggatgtgggcgtcatggaggtaattgggcgtggcgatgctcaggcaatcgatccctccggccggatccgcccgccggagtttttccaggaaacgatcgaaacgctcgaactcggtgaaaaaagacgccccgggaaaataggaatcgagcacgccgacggagtcggatttgtccatcgccgcgacgaggacgttgccggtgtccttgatcgccttcaagtgccggggggcgatatagccggcggccccgatcagggcgaatcgcttgagcgaggggatgaattcctgcatcgacggcttctccttccgtctccgggctccggagaaaatcatatcgaaaaagaaaccggagctcaactcgaaccctggacaggcaggcgcccgtggattattttttccggttggcccggcaaaaatccatcatcgcctggagggcgttttccaccgcttccggcgagccgtcctggcgggcgaacgcgtcgacgaaggccaggaggtcgggggcgggcggacgccggccgtagccgtgaaagacgttgacgatcgccgcgtccaggccgagctccatggcccgggccaggtaggcgcgggtgacgcccgtccggcggccgggcaagtcgcggacggcgttggtcacgcccagggaaaaatgaatccccctgaactcgggatcggccttgagcctccggatcgtctcgaacgcccggaacgtatagcccggtttggccgcctccatcgggacgtcgatcgagagggggaagacggtcgaatccagaaagatgtcgcccggggcgaatccgtgcgatccggtcgcggcccggacgatccgccgggccagcgcttgaagctcctcaacgccgtaggcgccgtcgagaccggccgttttctcgtctacgaggagaccgatgaacttgaaggggaagcgggcgcgcagcgggagcagccgctccatcgtgtaggttttgacggagttgacgagcggggcggccgacggccggccgccttcccgcccgccctcgtaccaggcggccaagcccgcctccagcatttccgtcgagccgctgtcgatgcagaccgggacgcccaaggagtgtccgcggatcaggcggacgaaaaagcgcaggatctccttccggaattccggatcatcctcgctgagggcatcgacgttgacgtcgatataggccgccccctgcttggcctgccgccggatgagcgaaacgagatacccgagggcggcggagccggacgcccggacggccccgggcggggcgccgatgaggccctccttgatcacctcctggacggccgccgccgtccgggggatgctggcgtggagcagctcggcgatttggatcagcggaaagccccgggcgtggtcgcggtcaaacacataattcagaacgccggaggtgtgctcgagggcggcgatccgcgggggaagcgcggtttccgccaagccgtcgagctttccagccgcggcggccgcttggaagatcggctcggccacgcagacgcgcgtctcgtcgtttccgcagcggccttccggcgtggcgtcgccgcagggaggattgggcagccccttggcgcattccccgagcgtgcaatagccgaagttttccggcaggaagcagtctccgcagtcctcgcaggcgaaaagaacggccttggccgccgcttccgctccgtgaaaccaccggtaaaggctcccctcccctttttcgagtccgaaggcccgggcggtcccggcgaccgccggacagaggcgctttcccttcgtcaagaagttccggtgaagaaaatcgaaccgccgctggcggaacgtccggggccgcggggacggccggaacggcggccttggggcggaacctccctccgtctccggtccgtagaggtagaacaatcccggcccggaagcgggcgggggcggcggataatccaagatgatccggcgttggcgccagcccggaccgatctcgccggcccgaacggcgatccggaccagggcgtcgaaatcgggcaaaccgccgagatcgacgccggcggctccgagatcgcggtacatcgcgacctgacaggcggcccgctcgagatgagcctccgctttctcccgccggacggcggccaggagctcgtcggaaacgaagcagccgggcatccggccctcgttcatcagccgggcggccgggttggcgttggagagataatagacattgccgaggacgggcgcgtcgaggcgggcttggcggaaataccgaaagagctcctcggacttgcgggagtcccagcccatctgcagaagaaaggcttgagcgccggcctggagttttttggccgctttgaaatattgctgaaggagcgaggcctcggtgtacttgaacggagaaaccgcggccagggcgaaaaattgagggaccgaggaaaatctggaggcgaaggaggccgaacctgggcgcgggccggccagcatctccccgattctcgagaagccgccgggggcgggcggattctccggggacggaaccgtccgcttcgccggaggggagaccggagctcgctgaaacgcgtcgaaattcagctcggagacgagctcgagcaggccgatggagtccagctcgaagacccgctttccggacgccggcttgtcgccggtgatcgccaggaccgttgtcaggcccatggcccggaagcccgtcagggcggaccggagggcctcggcgttctgttcctttccggtgacatggggaacgacgtcgagatcatcccacagtccccggcccgacggccccttggccgcgatgatcgaaaagatgtcggccggatcaagcatgggaatgccccgcggattctgcggaagagcgacgcccgccaaacggaagccggaggggatttcagattttcggccggcgtaatcccgaagaaaacattcgatcggccggacgtcgtccccctgggcggggacgagctcggccagcagtaaaaacggtttcattcaaaccttttccttggaaagtcgggctttatgataaacgatcgctcccggacttacaacgtattgattccccggccggcatgaattgaggaggggccgtgtttctggtatattttcatcatgggaaaggccgatccggggaaagcgcccgccgaaacaccctatttcgttcatccgacttcggtcgtcgatcccggggcgacgatcggtgccggaacgaagatctggcatttttcccacgttcaaaccggcgcccgaatcggaaagcactgcgtcctcgggcagaacgtcaacatcggcgagaacgcgacggtcggcgatttcgtcaagatccagaacaacgtctcggtctattcgggcgtcatcctcgaggattacgtcttctgcgggccgtccttggtgttcaccaacgtcgccgtcccgcggagcaaatatccccggcccggcccggagcactaccagcccacgctcgtcaaggagggcgcctcgctcggagccaacgcgacgatcgtctgcggccatacgatcggccggcacgccttcgtcggggccggagcggtggtgacgagggacgttcccgatttcgccctcgtcgtcggcaatccggcccggatcgccggctggatgagcgaggccggagagaagctgcgcttcgacgccgcgggattcgccgcctgtccccgctccggacgtcggtaccgcctcgaaaacgggcgcgtccgcgacgtcgccggcgaggaatgagccgatgaaaatcgcttcgatcgtcggggcccgtccccagtttgtcaaggccgcgcccgtcagccgggcgatccgagaagcggccgccgccggccgggacatcgcggaaatcctcgttcacaccggccagcattacgacggcaacatgtcggatatcttcttcgaggagctgggcatctccgcccccaattacaatctgggcgtcggatcggcttcgcacggcgtccagacgggggcgatgctcgccgctatcgaacgggtcctggagaaggagcggccggattgggttctcatttatggcgacacgaattccaccctggccggggcgctggccgcggccaaaatgcgccttccgatcgcccacgtcgaagccggcctccgctcttacgaccgccggatgcccgaggaaatcaaccggatcgtcgccgatcaactgtcgacggcgttgttctgcccctcaagaaacgcagccgccaacctccgcaaggaaggcatccgtgacggcgtgtccattgtgggggacgtcatggcggaagcattggaatacgcggtcgtccgatccatgcgggaggcggaggagaagcccggaagcggggaatacggatacgttctggcgaccgtccaccgggcggaaaatacggacgacccggcccggcttagaaatattcttaaggccctcgaggcgattggccgcatccggcccgtcgtgtttcctgtccatccgaggacaaagaagatgatcgcggccgccggttggaagccggaagcaaaaggccccgaaaaaagcggggcgcgaagggcgaagacgacggccggcgcggggatccgatttatcgaccctgtcggttatctcgaaatggcccggctggaaagcggagcggagatgatcttgaccgactcgggcggcgtgcagaaggaagcctactggctcaaggtcccgtgcatcactctccgggaccggacggaatgggtggagacggtcgcctcgggctggaacgtcttggccgggacggatacgaaaaagatcattcgggcggcggagaatttcacgattcccgaaaaatcggccccgctttacggccggggcccgaaatcggcggcccccgcctcgcggcgcatcgtcgacatcctcttgaaatcatgagccggggccggagcacaccgagggccggttctccggcgggaaggcgatgaagccgatcaaataccgccggctcgctgaagccgcctccctgggcttgtcgcttccgtcggggatcgccgtcgggatgttcttcggttattggctggacaaatggctgaaaacggaaccttggatgatcatcctctggacgttgctgggcatcgcctccggactgatcagcctcgtccagggaatcaagaagttcctgcgggagggcgactcggaaaaggaagactaggccctctccctgtgctagaataagcggcgaggccgaatccgatgagccttgaacgatccgatcccgctttggctccgccgtcctctcgatcggccggccctccggccggttcgccggcccggtcgatcaatgaagcggcggtccgccgcattcccctcgaaatcctggttctcacggccgtcggcgccgtcgtttcggcggcggtcttcaacgcgacggcgggaggtctcttcctggccggcggcgccctgtcgaccctgtcttttctctggatgaaaagaaccgtcgccggaattctgaaccgaaaaaaagcggccgccgtccgctccggcttgtttttctacgccctccgcttcgttttgattttggggatttttttccttataatcctcgcttacccggataaaattctggccttcgccgcgggattctcgatggccgtcccggcttttgtcgtcgaggctttccgggcgtacgccctcatgaagacatggaaggactagaacaccccctcggaatcgtcgtcctggtcaaccggatcctcggacgtccggtggccgcgatcctcggcttgctcgggatcaaagtcgccgatcccgcccgctgcatccccgattacatcgtcatggttttcatcgtcgccgcggcgatgatcgttttcttcaccttggccgggaagaagcgcgatctcgtccccggccgcttccaggtcgtcaccgaatcgatcatccgattcttcgaggggcagatcgtcgagatcgtcggcccggaggggcggaaatacactcccgttatcgggacagtcgggctgttcatcctctgcggcaacctcctggggctgattccgggcctcatgtcgcccacggccaagctcaacgtcaccatcggctgcgccctgttcgtgttcgtttactaccacgcccaggggatcaagacccagggattcttcaaatatctcaagcatttcatgggccccatcccggccatcgccccgctgatgatcccgatcgagttgatcagccatttttcccgggtcgtctccctgtccatccggttgttcagcaacatcttcgccgaggaagtcctgatcgtcgtcatcgcctcgatcatcccggtttttcttccccttcccttcatggccctttccatcttcaccgcgtttcttcaagccttcgtcttcgtccttctgacctgcatttatctgtccggcgcggtcgagcaggaggaggagcacgcttcctccgccccgtccgaagcccgcctcaaggaagttcacgcgtgaatccgcccgcccgaatgagccctccccgttccaagattctccttgttccgcgcctcgccgaagaggcctcgttctctccagaggaacggattcatcaacgcatcaccccccggcgcgcgtccccgagcgccgggatcttaacctcgttttcaattcttctcttaggcgaggggtctcgactcgcgtataatggacagtaaggagttccgtcatgtcgaaaaccttgaaaacgctcggtctcacgatctttttcgccgtcctcgcttggatgcccctcatggcccaggaaggcggagcgcccgacactaaatcaaagctctatatgctgtcgctgatcgtcgccggcgcggtcatcaccttggccgcggcggccggagcgttctgccaagccaaagccatcagcagcgcctgcgagggcatctcccgcaacccggcgggcgccccgacgatccgtttccttctccttctggggctgattctgatcgaaacgctcgtcatctacgccttgctcgtggctttcatcatcctgatggtcaagtggggcaactacgcctgatttgaagccttgcttgggaaaccctccgaccggcggtttcttcccgccggccggagggtcccgtgataaggccgagtgatggccgccccgtttttccggattctcggcgaaaccctccggcggttcgaccgcgaccgctgtttccaatactccatcatcatctcctatttcgccctgatgtgcgccgtgccgcttttggccctcttcgcctggatcacggcccggatcatgggcaactcggaaatcgccgtccgcagcctgaatctcttcaccgaggattttttcgcccggttcagcccctccttcttcgagaaaatgtcctcggtcgccgacagcttcaatcagctcggctgggtcggcatcatcggctccctgatcgccgccagcctgctgttctccaacctgatccggatcatcaacgagattttccggacgaactaccagcgctcgttcgtctacaaccggatgatggaatacctgatcatgttcgtgaccggcgtcatcctgtttgtctcgctttcgatcacggccgtctggacggccgtgcacggggccatcgaatcaagcgacttcgtcgtcacctatctcaacccgggcgtcgtcaccttcttcgacaacgttttcatccagtacttgattcccctcgccttgagcgtcctcgtcctgttcgtgatctacaagttcatccccgagcgaaaagtccatacccgggcggccctcctggcggccgtcatcgccgccgttctctgggaagtcttcaagcggcttttcgtcgtctacgtcgtccgtttttcggccatcggcatcgtcctcagcaagctcgttcagggaacgctgacttcgatcatctttttccttctctggctttcgttttccctggccatcatgctctggggcgccgagctggccgccgtcgtcaacgagcgcctggacgcccgcccccccgcggccggccaggccgccgcctgaatttaaaagggacatcccccctttttcggcctttccttgcggcccgtggccgcggcctcctccacgcgtccgtcgctcgagtgtaatacgcatgtcatccaggtataatacatgcttgactaggcatcataagaaggcggaggccgggatgaaaatcaccgttggcaagctggcggagtttctaggattggtttttgagggggacggatccatcgagatcacgggcgtttccaccctggataaggccggtccggccgacttggttttcttcgcccaagcccggctgcgcccgctcctggagggcacccgggcctcggccggcattctcccggccggcgagccgctcgatcgcgtccccctcaaggccgttctccgggccgaacagccgcatctggccttcctccgggcgatcggcctgatcatccccccgcgctcccccgctccgggcatccatcccggcgccttcgtttctccggacgcccggctggccgaaggcgtctcggtcggagcgatgtcggtcgtcggcgccggggcggagatcggtccgggcacgatcatccatcccctcgtttcaatctacgagggcgtccgggtcggagccggctgcatccttcattcgggcgtgtcgctccgcgaggatgtccgcctcggcgaccggatcatcctccacaacggcgtccagatcggcggagacggcttcggctacctccccggcccggacggagggcacctcaagatcccccaggtcggaacagtgatcatcgaggacgacgtcgagatcggggccaattcgacggtggacagggccgcgctcggggccacgatcgtccgccgcgggacgaaaatcgacaatctcgtcaccgtcgcccacaacgtcgaggtcggcgaggacgcgatcctcgtggcccaggtcgggatcggcggaagctcgaagatcggacgccgggcgatcctcagcggacaagtcgggatcccggaccacatcgacatcggcgacggcgtcatcgtcgcggctaagacaggggtcacgaaaaacgtcccggccgggaccatggtcgccggcatcccccatctcgatatccgcgactggcggaagctgtgggccgtcgcccctcagctctacgacctcgtcaaggaattcaaaaaaatgaaagcccgggtcgccgaactcgagaccgccctcaagaaatgacccggccccggaggcccgtcacccggtctttgaaagatattcgacgacgctgagggcggcggcgacgccggttccggcggccgtggccacctgatgcggagcggcatcgatgacatcgccggccgcgaagatcccgggacgggacgtcgccaagcggccgtcgacccggatttccttccattcgttgaggtcgagaagttcccgaacgaattcgctctgaggatccatgccgaccgagacgaacaggccttccacggccagctcgcggaccgacccgtcgttcgtgtcccggaggacgagcccctcgacccggtcgcggccgaggatctgatcgatgacggcgctccattccaccgtgatcttgggatcggcaaagaggcgctcctggaggattttcgtcccgcggaggcggtcccgccggtggatgaggtggacccgggaggcgtacttcgccaagtagaccgcttccatgagagcggtgtcccctccgccgaccacggccacggcccggtcgcggaaaaaaggcgcgtcgcacgtggcgcagtacgacacgccgcggccggtcagccggtcctcctcggcgagtcccaggcggcggtacctggcgccgacggcgatgatgaccgcccgagctggatagtcggccttccccccgcggacgatccaccccgccggctcgccccccgcccgatcggggacgatctcccgggcttcgtcggtcacgattttcgctccgaagtgaacggcctgtttttcaaatccctccatcaggaccgccggggcgaccccgtcgggaaatcccggatagttttcgatccaatcggtgatcaggatctgccctcccggcagggctttctccaaaacgacggtcaaaagccgggcccggcccgcgtagatcgcggccgacaggccggccgggccggccccgatgatgacgacgtcggatcgcgggacagcgttcatggtctcccccaacctcaggataagtgcttcgcaatcaggccgacgattttttcctttgagacggcgccgacgatcgattccttcagttcgccgcccttgaacaggaggagcgtcggaatgccccggatgccgtacttggccggcgttttggggctggcgtccacgtccatcaggcggacgatgattttgtctttcatctcgacggccaagtcggccgcgatgaccccgacggctttgcagggcatgcaccaggccgcggaaaaatcgaccagcacgggcagggaggagcgcaggacttccgcctcgaaatcggcgtcggtcacggacggaatgttatcggacatgggaatctcctttgcgtgaaatgagggcccggcgatagacctcggcgacgtcccggcccgaggccgggaccgcgaattccgcccggaccttggaccgggcttccgtccccgatccggccgctttttcccggccgcccccgcggccgtcccaagttccgcggcgcgccaacaccgccgccagctccgctccggccgcacccgtccggacggcctcggccgcggcctcgtctccggcgcagaggccgtcggcatacaacagaccggccgccaggaaattgaatcgcccgcccgcagccaggcgttccggcgtaaagaggtcccaagccaggccggtcaaggcaaacgactcgggcggaaaatctccttggaacgccggatcatgaacggtcagaacggaggcggtcttgcggaacggacgctgtccatcataagccgtccggagaaagaggggaatcagggcggacggccagtcatggcaatggaggatgtcgatccggatccgggcccggcggaggaattcgacgacggcccggcagaagaaggcgaaccgttcgtcgttgtcgaggtacggcgccttctccgagccgaaaatccgctcgcggtcgaaatacttgacgttgtcgatgaaatacgcccggaagcggcgggccggggggtccggcaccgcggaaaaatccacgggcggcaagggcgaaatggccgtttcggcccggaaggctgaagccgggactttgtccttcccgaccggaacgagaaaacgccggaggaccggggtgagcggaagcgcttcgatcgtcggccggcggtattttggagtcaccagacagacatcgaatcccaggcgggccagggattcgggaagagcctgcatcccggccgcggaagcccgggtgccggcgaagggaaaagcctcggccgagaccaaaacgacgctcggcttcctccggaggagagggttcatcatcgcccgctccttccggcaagatccgttgccgcgccggatcccccggttttcgccggaaggagggccttcagccccaccggagcttctcctgaagaaggccgaaatatcttcgctgcggcgacgtcaccagccggaggacgtgatctgccttccggatttcgacgatgccttcgctgtccatctccccgccccgctggccgtccagagtcaggtacacttcctcgccgggcgtgcggacctcgatccggatgacggaatcggaggaaacgaccgtcggccggaacgaaagcgtatgggggcagatcggcgtcaggaggatcgccggcacgctcggctggaggatcggcccgccggccgaaagcgagtaagccgtgctgccggtcggcgtggccaccaccaggccgtcggcccggagagcggcgatttccaaaccgttgaccgagaggacgtaatggatcatccgggccttggccgccttattgaagacgatgtcgttgagggtcagctccgttttttcccggaacgtcgtggagagcatcatccgcgggctgatgatgtccgtccgtcccgaaagaacggcatccagggcgagggtcatttccgccagggggatttccgtcagaaaaccgaggctccccaagttgacgcccatgaccgggacatccgcccgggcggcggagtgggcgacgctgagaaacgtcccgtcccctcccaggaccacgaccaagtcgcaagcggctggaatgctttcgcgcgccagaccgtcggctcggccgactttttcggccgcggcccgctccagcacgggcgtgatcccccgagcctcgagagcggcggtcaggccggcgatcacctcggccactcccggagcgtggggcttgatgacgatgccggcgcgccgaacggtcttcatccttcatttcctcccggatcaggatccgcttccttgacggccgcggaaatccattctaacacgcggcccgggagcggttccaccgccggggcgctcaagccgaaccgcccgaaaaattccacgttgcctttctgtccgcgggtgttcaagcggatgagtcccgaaaggaagaaccccgccgcccgggcgcccgcggccacgcgccgcagcacccggtcatggatctccggattccggatgacgccgcctcggccgacgcttctcctgtccgcctcgaattggggcttgatcaaggaaagaagaatcggctcctcccctccggccgtctcccggccgctcctcaagacggcggccaaggccggaaggatcttgagaatcgaaatgaaggagacgtccatgacaaccagcccgaccggctcggggaaatcccccggttggaggagccgggcgtttttctcgatcaaggcgacgcgccggtcccggcgcaggcgatcgtcgatttgccggaccgacacgtccacggcataaacccggagcgctccgcgctggagaagacagtcggtgaaaccgccggtggaaaccccgatgtcggcgcagacaagcccgctcggggaaacacggaaggcgtccagcgcctcggccagcttcaagccgccgcggccgacatacggccggccggccttgagggagagggggacgtcgccagccagcggctcgccggccttttcgatctggcggcccgccgaggcgacccggccggccatgattaaggcccgggccttggcgacggaatccgccaagccgcgttccaccaggagcgcatcggcgcgcgcttttttcatgattttcacgaggggagggcgcccctccgggccgttcaggacgtcggtccgccgtcctccgttttcgccagccggctgaaaaaagaccggaagccggccgccaagccgtcggcgtcaagcccgtaccggcggcggagctggccgagcttccccacggggaacgtctcgaccggaagaccgaaacaccggatcgggacgccgtaaagcccgcggcggttgatcaattccagaacggcgcttccaaagccgccggccagtacgccctcctcgacggtcgcgatcgcccggccggaacgggcgaaccggaggatcaattcttcgtccaagggcgcgcaaaatctcgcgtcggcgacggagagactgagccctgctcccgcggcggctgattccttttcggcccgttcggccgcctccagggccggcagaaccatgcttccataggccaggacgagattctccccgtctttgagtatctccgcctttccgagagggatgtctttccagcccggttcgggaaccgcgcccgtgatttcgcccttgggaaaccggagggccaccggccggtcatagccgaacgcggctttcaacatgtgccgcatctcgttttcgtcccggggggccaggagaaccatgttcggcatgtgccgcagataagcgatgtcgttgacgccctggtgggtcgggccgtcgtcgggaacgaggccggcccggtcaaggacgaaaacgacggggagcttctggagacagacatcatggtaaatctggtcgtaagcccgctggagaaacgtcgaatagatggcgcacaccggccgccgccctccggccgccaggccggcggcgaaattgacggcgtgctgctcggcgatgcccacgtcaaaaaactgggccgggcgccgggcggcgaattccatcaagccggtcccctcgcgcatggccgcggtgatggccacgacccgctcatcctcgccggcgattcggagcagggtttccccgaagacctccgagtaggacggatgggttccggagaaagccggctcgccggactcgacgtcgaacggcggagccccgtggaaatgctcggggctgttttgagccggagtgtaaccgcggcctttccgggtcacgcaatgaatcagcaccggcccctcggcttctttcttggcccgttcaaacacctccaaaagcgagggaaggctgtggccctggacgggtccgacgtaccgcagcccgagctcttcgaacacgagtcccgggaaaaacgtctttttgaccaattcctcgagcccgcggccggcccggatgatcgccccgcccactcccggaacggatttcaaaagggttttggccttgtccttgacccggaggtaatgctggcccgaggccagatagccgagatacttggagatggctccgacgctctgagagatcgacatctcattgtcgttgaggatgatgatcatcgggatccgcaggttgccgatctggttgagggcttcccaggacaccccgccggtgagcgagccgtccccgacgacggcgatgaccaggcggttctctccggccatgtcccgggcgaccgccagccccagggcggccgagagggccgtcgaggcatgcccggtgttgtagggatcataggggctttcctcgcgcgagggaaatccgagaagcccgccttcgcggcggagggtgccgaaccggtcccgccgcccggtgatgattttatgggtgtaggtctggtggccgacgtcccagacgatgagatcccggggggcgtcgaacactcggtggagggccaacgtgagctcgacgactcccaagtttgaggacagatggccgccgtttcgggaaacgacgtcgagaatctcagcccggatctcgacggccagccgggacatatcggccaaggacagagtcttcaggtcggccggggagtcgatcgagtcgaggattcttttcatcgcgggaaggggaggtcaagcggagcccttgatccgcctccgtcccgtttttcggccactcatccggcgcatatcatccttctcataaaaggttattataacatgaaatcccgccgccgggagatcggcaaacaggcctgatcccctctccggagagagcggaaaggcaaagcgcggccctcttttccccgggatttagaacggaagctcggaatcgtcgtcttccgtcccggttttcggagggattttcctcgaggcgggtcccggtttggccaccggcggctttccgctttcggcctcctccaggctgaagggctcgggatgaacctcgccggcttcgtccttcaagaggatctcgatttttttctcggctttgtccagctcattgcggagaaaccgggaaagcctgacgccccgttcgaaccgggcgagcgactcgttgaggctgaggccgcctttttccagctcctccacgaccccttccaagtcggctaaggccttctcaaaatccagatccggcttcttcgttttgtccttttctttcatgatgacctctccctttcgtccggggccgtgaccggccggaccgggtcgaccgtccgcacgtcggcgatgaattccccccggtggaacgagaccgcgaccgcgtccccgggccggaggctttccgcccgggtgaccggaatccgcggcgttccttccttccaaacgacggcatagcctttcttcaagacatcaagcgggcttagggcctggagcgaagccgaaaggcgctcccattcgctcatccgtttcgccaataacgcccgaaatgcgccgccgatcctctcctcgaccagggccgcccggccggaggcctggccgagccgccggccgagaacggcggccatgcgcccggcggccaggaccgcccgcgcttttccgtcggcgattctccggcgttccgcgttcaccacatcgaacgcccgcccttccagctcatcgacgcgctgccccagcatccaaaggcggcgctggaaaccctcgaagacgccgtgccgggcgagctcgtcgacgccgccgcggcgcatctgaaggccgaaccgggcggcctgccccgcccggcgccggagattgtcgatccgctcggcgaacgtctcctctttttccacgaccatttcggcggcggccgtcggagtggaggcccggatgtcggcgacgaaatcggagatcgtgaaatcgacctcgtggccgacggccgagatgaccgggaccggagaggcggcgatcgcccgggcgacgggctcctcgttaaaggcccataagtcctcgatcgatccgccgccccggccgacgataatcacgtcgatgcccggccggcctccgaggaactccagcccctcgacgatttcggccgccgcccccgctccctggactcgggccggataaatcacgatccggaccttggcgaagcgccggtcgatcgtccggaggatatcgatcagggcggccccggtcggggaggtcacaacgccgatcgtcttcggcagcaaagggatcttttttttgcgggcgggatcgaacaatccttccgcccggagcttttccttgagctgctcgaaggcgagctggagggctcccttgcccttgggttcgacctggtcgacgttgagctgatagctcccccggggcgggtagacgtcgatccggccgcggcagacgacctgctggccgtcccgcagctcgaacttgagacgggcggcgttgcttttccaaacggcggcggaaagcgccgctccggcgtccttgagggtgaaataaatatgacccgagggatgccgccggcagttggaaatttcgccgacgacccagacctgggggacggcggtttcgagagcggccttgatgacctgggtgatctcggtgaccgaatagacgtggtcgcggagaacgaggctgccctcccggacgagatcccggccgctcttcgcctcctcgggcgggagccctcggccttctttttccccggacatcgcttctccccggctattttatacggacggcccggttcattcaattcgttccaaggcctggcctccgggccccggtcaatcctcggcgatgatctcttggacgatggagagggcccggccggtggccgtttcgatttcgacgacgacgcccgacaaaaacgatccccccttgtccggttcgaagcgaatcgggcgggacgtcagaaacttcaaaatggcctgctccttgcggattccgatgaccgaattccgcgagccggccattccgagatcggtgacgtaggccgtcccgccgggaaggacgcgcccgtcggccgtcggaacatgagtatgcgtcccgacgacggccgaaacccggccgtccaagtaatagcccagggcgactttttccgacgtcgcctcggcgtgaaaatcgacgatgaggcagggcgtctccttccggagctcctcaaccgccgcgtcggccgcccggaacgggtcatcgatcggctccatgaacacccggccctggagattcaggacgccgagcttcaacccgtcggggccggcgaccgccacgcttccccggcccggggcgggcggaggataattcgccggccggaggacccgggattccttctccatgtaggcgattccttctttcttgtcccagatatggttgccgctcgtcaggacgtcgaccatggaaaaaagctcccggccggtctcctcggtcaagccgacgccgccggccgcattctctccattggccacgacgaaggccggacgatgccggtcgcggagcaccggcaggtgccggcgcagggcttccctccccgaccggccgatgacgtccccgatgatcaggacgcggaaagacggccgcaaaacggccgtcccgctcttttcctttccggatttatcgggcatattcaaccgcccgcatctcccggatgaccgtcaccttgatctgtccggggtaatccagctcgtttttgatcttggccgcgatatccttggcgatcagcccggcccgctcgtcggcgaccttgccggcgtcgaccatgatccggatctcgcgtccggcctgaagggcgaacgccttggacacgccctcgaagcccttggccagggtttcgagcttttccagcctcttgatgtaattttcgagaagctcccggcgggcgcccggccgggccgccgacagggtgtcagccgcctgaaccaggaccgcctcgatggaggggaaatccacgtcccggtggtgggaggcgatggccgcgacgaccgcttcattctcgccgtacttccggcagagctcgacgctcagctcggtgtgggttccctcgacctcgcggtcgatggccttgccgacgtcgtggagaaatccggcccggagggccgtttgggtgttcaggcccagctcttgggccatggctgcgctgaggaaggcgacttccttggaatgctggaggacgttctggccgtaggaggtccggaatttcagcttccccatcagcttgatgagctcgggatggaggttctggatgcgcaattccatggccgccgcttctccgtcctgccggatcttgtcctcgagctcggctttgacgttttcaacgacctcctcgatccgggccggatggatgcggccgtccaggacgagccgctggatggccagccgggcggcttcccggcggaccggatcgaagctggaaaggatgaccgcttccggagtgtcatcgacgatgatgtccacgcccgtggccacttccagggccctgatgttccggccctcgcggccgatgatccggcccttcatgtcctcgctcggaagatcgacgacggagaccgtcgactcgacgacgtgctcggcggccgagcgttgaatcgctccgctgatcacctcggccgccagctggcggctcttggcccgcgtttcctcgtcgagccgcttgagcgtctgcatcgcctcaaggcgggcctcgtcctcgaccttgcggatgatctgagccttggcttcctcctgggtcatgctggagatgcgttcgagctcgaccagttggtcctggatgaccgaggagatccgcttcgcctcattctcgatttcctgctctttctgaaggaggctccgctccttggtcgcgatatcccggtcccggcggtcgagcccctggatcttgcgatcgagattctcctccttgtggacgaggcgcctctccacctcgttgagccggcgccgcttgtcctgggtcatccgctcgaactcggcgtcggccgaggccagcttttggcgggcttggttctgggcttgggagacgaggcgctgggcctcgctcttggcttgtccgacgagcccggccgcttcctcgccggcccggaacagcttcttggcccccgacgtccgcttgacctgaatgaaaaggatacccgcggccaggatgatcaggacggccaagccgatataaagaattccaatgttcacggtctctcctccttcccaaaagtgcagcgaggaagagccgtccggcaggggggacttacggggtggggccggtccgaaggacgttccaaggccgccggtgtccggcggcgggcgttttttcgctcgggttaagcatgatcatccttgaacaggttcgacgccacggtcgcgatttcggcttccatccggtcgatgcgttcgtccacttgttccaaccgcttccggctgacgaagtagtcatcggcgatattcaaagccgcgaggacggcgattttcgttgggtcctccgatcgcgacttcaccgcaatttcctgcatcttttggtccacataggacgtcagacggctgatatattcttcgttttcctcacctttcactctgattttatacgttcgtccgtagatttcgatctcgacgatatcgctcatcacatgcccagcttgtcgatctgggaaatgatcgcttcgatcttccccttcatttcttccctttcattttcgtattttttgagctccccgtcaagtttgacgactttccgggcaagatcctcggaatcccgtttttcggctttgagatccttgaccagctgcttgagtttttcgttttctgtcgacaagcgctggatatgatcgatcaccccggtgattttatcctcgaggattttcaagcggtcgatttcattggtcacgcaccgtctccttttcgaagctcgatctggaacgccgatttcaagactttcaagactttttggacggatttatccgcttcctcggccaggagcgtggcttggggattccggaagacaaaccgcatcgaaagcgatgtccggccgtcgggatgatgggggccggcgtaccggtcgatgatgtcgaacgattccaggtaggggaccgcggcccgttccacggccgacttgatctcctggtagaagatatcccgggagacgaaaaacgaaagatcgcggacaacggcgggaactttgggcggcggttcgtaagcgaaggccgcgggtttcttttccaggagacaacccaagtcgatttccgcggcgaagaccggtccggtcgtcccggcggccgcgcagaccgactcgcggacacgccctaaaaggccgatcttctcccccttgtaaagaacggccagggccgacccctcggcgaacgccgggtgttcagccggctcgtagacaagcgtttcatagcggagggccgccaaggcggattccagggcgcccttgagatgggggaaattcgcggctgagggcggacggctccagtggggaaggcccaccggcccggcgctcaggaggccgaggaaaagctcctcggcaggcggagcgtcctcgatccggtggaagatcctgccgatttcaaaaatatggacgtcctcggttccgtggttttggttgtgccggagattgatcagcaagccgccgagaagcgtcgtccggagagcggcggcatggacggaaaacggattgcgcagagtcaccggcgtccgttccgtctgcagaacagcctccttctccgggtcggcgaagctggcgttgacgacttcatcgaatccgtaatgaaagagccggcgggagaggcggtcgatccggtcccggttcgagggaataggttccaaggcatccagcggcgggacgaccgaggggatgcggtcgtatccgaaaaagcgggcgatttcctcgatcaggtccgcctcccgctcgatgtcgacgcgaaacgaagggaccgtgacgagccaggatccgggagccttggatttggtcgaaaagccgagatcggcgagcgttttctcaatgaacgcatcggggacggcgacgccgagaagctcggccgtccgggcggagcggagcacgacttcccgcggcttccgcggccggcgataaaggtcgaccagtcccttggagacgcgtccgccgaaggaacaaagcagcgaggcggccatcgccgccgcctcgggggcgaagccgatgtccgcgccgcgctcgaaccggtagctggcgtcggtcacgatttccagggccttgcgggtccggcggatcgaggccgggtcgaagacggcgctttcaatgaagatgtcccgggtggcggaggtgattccggattcctccccgccgatgatccctgcgacggcgatggggcgccggtcgtcggcgatgacgagcatgtccggggccatggccctctcccttccgtccagggtccggagagtctcccctttcttggcccgccgtaccacgacgcgcggcccggcgaccttgttcaagtcgaacatgtggacgggatggccggtggcgaagaggacgatattggaggcgtcgacgatgttgttgatcggcttggcccccatggcttcgatctttttccgaaggctgtcgggcgagggcccgacggacaagcccttgaccacgaatcccgtgtaccgggggcaaagatcctcgtccaaaacctcgacctcgacaagctccgacgtcgccgccggcagctcgaccaccggatggaggcgttccttgaggggggaacccgtcatggtcgaaatctcccgggcgatcccgagatggccgagggtgtcgggccggttggcataggtctcgatgtcgaggaccgtgtccccgtccgtcgtttccgtccattcctcgcagatgaggccgatcatcgtcaaccggttgagaagctcgctccgcggcatctcgatgtcgacgtattcctgaagccagcgcagactgattttcatttgagttgaaattgccggttgaaccggaggtcgttctcgtagaaatgccggatgtcggggatgccgtaggcgaacatggcgatccgctcgacgcccatgccgaaggcccagcccgagtattgctctggatcgatgttgacgttcttgaacacctgaggatcgaccatcccgctgccgaggatttccttccagccggtcccgttgcagacccggcaagccgggtccttctgcccgcaagccaggcattcgatgtccacctcggccgacggctcggtgaagggaaagaagctcggccggaagcgcgtctccagcttatcgccgaacagccgcttgaggaaatgttcgagcgtccccttgagatgggcgaaggtgatcccccggtctacgaccaagccctcgacctggaagaacatcgccgcgtgggtcggatcgggcgtctcccggcggtagactttccccgggatgatgattcggatcggcggcttgcgcttctccatgacccggatctgaacgggcgaggtgtgggtccgcagcagcaagtcgccgccgagataaagtgtgtcccagtcgtcccgggcgggatggtgcggggggaaattgagggcttcgaaattataataatcggactcgatctccggcccgtcctcgattccgaagcccatctcttcaaagatcgactcgatctcccgctggaaaatccggagcggatgggccgccccccaagccagccgctccccggggagggttggatcgatctccgggccccgcgtggccggacggcggagactctcctcgagagccgcgagcttctcttggactttggtttttaggacgttgagcatctgaccggcggccggcttatcggcggccgggagggtcttcatctgatcgaagagaagggtgaccgagccccgcttccggccgagataccggttgcggagatcctccaggccgtccgcgtcgcggactccggcgcactccccgtccagcttcgtccggagggcgtcgaccgccgtccggaatgtcttgaggtcaggcaagagcgtttttgacctggacgacgagccggccgaacgcttccggagcattgacggccatttccgccaggaccttgcggtccagggggctgcccatctttctcaagccctggatgaagcggctgtaggtcaagccgttggccatcgccccggccttgacccggatgatccagaggcgccggaaatcccgctttttcgcccgccggtcgcggtaggcgtacagcagcgacttctcgacggcttccttggccgtccggtagttcgagcttttcgcgccccagtagcctttcgcctggcccaggactttttcccgtttgatccttctcttgactccgcgcttgactctggccatggatgtctcctcagaactcgtagggcatcatatccttgacggcccgacggttggttttatcgaccagcgcaacctgaccgagattacgcttgcggttcgattttttctttgtcaggatgtggcttttgttcgcttttttgtgcagaactttctttgccgcggtcaccttgaatcttttcttggctccccggtgggtttttagctttggcatcttttcctcctgtcttggcggggacgagaaccgacgagacggcccagtccattctacggaatgcgccgtccagctttcccaagccggcgcaatcggcgacaacccggtccagcaccgccaggcccatttccggccgggatttctcccggccgcggagcatgatcgtgatcttgaccttgttcccctcctcaagaaagcgctggacgtgcttaagtttgaagtcgtaatcatggatcgagatcttcggccggaatttgatttccttcagcaggacctgcttctggtgcttcttggcctcgtgatcgcgcttgtgcagctcgtacagaaacttgccgtaatccatgatccggcagaccgggggctgggcttgcggggcgatttcgacgaggtccagaccgcggttccgggccagggccagcgcctcgtgggcggccatgacgccgagcggctttttctcctcatcgatcacccggatttcccggcaggtgatcatttcgttcgtccgatgaagtctctgcttgacgggcggaagcgttgggtgtcgtcttaagatgggcgtcctccttgatgttctctcgttaataggcgatcgccagcgaccggcggtcgctgagcgccttgaccttgtccaggaactcgggaagagtcacggtccccttgtccccctggccgtggacccgaagcgaagcggttccagccgcggcttccttgtccccggcgatcaggagaagggggatcttgtgcgtctcggcctcgcggatcttgtagccgagcttctcccgccgcaggtcggcccgggcccgaagaccccgggccgcgatctcggcgacgagcttttcggcataggggttgtgccgctcggcgatgggaatgacctcgacctgaatcggggccagccagagcgggaaattcccgttgtaatgctcgatgagaatcccgaagaaccgctcgagcgaacccatcaaggcccggtggaccatgaacggccggtgctccttgccgtcctcgccgatgaacgccatgtcgaaccgttccgacatgttgaagtcgaactggatcgtggtgcactgccagtggcggccgagcgcgtccttgatcttgatgtcgatcttgggcccgtagaaaacggcctccccctccatccgctcgtacggcaggccgcgggcttccaaagccttgatcaacgaggcctcggcccggcaccagcggtcatcctcgccgcagtacttcgccgcgttcttgggatcccggaccgaaagctcgatcttgttgtcggtgaaaccaaaatcggagaggatgctcagggagaaatccaggacccggagaatctcgccgtcgatttgatcgggcgtgcagaagatgtgggcatcgtcctgagtgaatccgcggacgcggagcaggccgtggagggttccgctccgctcgtaccggtagacggtcccgagctccgcccaccgcagaggcaggtcgcgataggagcgcatccgggacttgtagatctggatatggaacgggcagttcatcggtttcagatagtaattctgcccgtcgatgtccatcggcgcgtacatgctgtccttgtaaaaattcagatggcccgaggtctgccagaggttttcgcggccgatgtggggcgtatagaggacttcgtagcccccctcccagtggcgctcccgccagtattgctcgatgatcgcccggatgcgggcgcccttgggatgccagaggatcagccctccccccaggtcctcggtcgtgccgaacaggtccagctcctggccgagacggcggtggtcacgcttcttggcctcttccaggagacgaagataaccctccaattcctcggccgtgggaaaggccgtgccgtaaatccgctgcagctggatgccccgctcgtcgcccttccagtaagcccccgagacggagagaagcttgaaatgcttgaggcggccggtggagggaagatgcggtcccaagcagaagtcggcgaaaccgtcctggcggtacagggagacgacgtctccgcctttttccttgatcagctccaccttgagcgtctgccctcggtcttcgaacaggcggaccgcttcctccttcggcagcatctcccggacgatcggtgtgtcggacgcggcgatctcccgcattttggcctcgatcgcgtccaggtcgtcggaggaaaacggctcgtcccggagaaaatcataataaaaaccgttctccacggccggcccgatgccggcctgcgtccccggaaacaggttcaggacggcatgggcgagcaggtgggcggcgctgtggcgcagaacgtccagcgccgcttctccttcttttttcgatttttccatagtcatttcaaacgtcccgttcctgaagacaaaagtcccgcttcggacgtttcgccggataacgaacccctcttctatggagaacggccggcccggccatattacgcgacggccggcgtcgtaaacgtcgaaaacgtcttctgtttcatcggattccgtacatcgctccggcaaaggtggtaggcgcggaggggattgaacccacggcctcttccgtgtcagggaagcgctctcccactgagctacgcgcctatatccgtcaccaaagcccaattatattaatgaaaaccaaagtcaaaatcaaccggaaataagagaatagagcccggggggcgaaagagaccggggaagcggccggcaggagaatcccggccgccgcggcgattcacattgcctccttcgactccgctcggctataatccgggcatgatcgggattctatcggattcccatgacaacttggacgccttggagaaagcgatccgcttctttcaagacgccggctgcgccctgctcatccacgccggcgacttcgtcgcccctttttccgcccgggtcctgaaccggtccgggtgcggcctcaaggcggttttcggcaactgcgacggtgaaaaagaagggttgaaggcgataatcggatcctttgggacgatccgaagagccccctattgttttttttatgaagggaaaaagatcgccttgactcatctggacgccccggccgggggactggccgcccgccgggaatacgacctagtcgtctatggtcatacccaccggccggaaatccggacggccggatcgacgctgctcgtcaaccccggagagaccggaggtcaagtgaccggtcgaagcacggtcgccttatacgatccggcgacgggccgggcttcgatacacaccctgtaggaggcggacatgtctcactccgtttccaaccggcaaaagcccgtctggcggcagattcgcaagcccatcccgcccccgggacgcccccagacgacgagaaaaggcaaaaaagcatacaaccgcaaggataaatcctggaagacggatattctttaaaataaaccaagaccagggctgttttcatgaaaaagggggcgctccgccgtaaaaggaatcgaatcgggcggccgccggcttcacggcccgggcaaccaaggcatcatgcccggcgcggctccagccaacttcaaggaaaatcggccggttccaagcccggccgagcagattttagtgaaagcccccttccggcggcaagttgcgtgaccggagcggctgttgtatactatctccttatttttttaaaacttaacgttcctattttttataaaggagtagtttctatgaaaaacgtcattatcatgggcgcggccggccgcgattttcacaacttcaacacgtatttccgagacaacccgaacttcaaggtcgtcgctttcaccgccactcaaatcccggacatcgccgggcggaagtacccggctgttttggccgggaaaatgtatcccgacggcattccgattttccccgaggaagagctcacggatctgatccgcaaaaataacgtcaccaaggtttatttctcttatagcgacacgtcccacgaatacgtcatgcaccgggcttcccaggtccaggccgccggggcgtctttcatcctcctcggccccgtcgatacgatggtcaagagcgtcaagcccgtcatctcgatctgcgccgttcggacgggctgcggcaaaagccagacgacccgcaaggtcggcgccgtcctgatcgccaagggccgcaaggtggccgctattcggcacccgatgccctacggcgacctggccgtgcagaaggtccagcggttcgccgcctacgaggacctggacaagcaccactgcacgatcgaggagcgcgaggagtacgagccccacatcaaggccgggatcatcgtttacgccggcgttgattacgaggccatcctccgggaagcggaaaaagaagccgacgtcattctctgggacggcggcaacaacgacttccccttctataaatctgatctcgagatcgtcgtcgtcgaccctcaccgggccggccatgagctcctctattatccgggcgaaaccaacttccgccgggcccaggtcatcgtcatcaacaagatggacacggccccgaaagagggcgtggacaagatcctagagaacatcaaggcgtataatcccggcgcgatcgtgatcaaggccgactcccccactcatgtggaaaacggcgaacagatccggggcaagcgcgtgctcgtcgtcgaggacggcccgaccgtcacccatggcggcatgccgttcggcgccggcgtcgtcacggccgagaaatacggcgcgggcgagctggtcgatccccggccgttcgcggtcgaatcgatcgccgcgacctacgccaagtatccccacatggtcaagatcctgccggcgatgggctacggcgaaaagcaggtcgccgatttggccgcgacgatcgacaaggtcgattgcgacctgatcatcagcgccacgccgatcgacctcaaccggctgatcaagacccgcaagccgatgcttccggtcggttacgatctgcaggaaatcggctctccgacgatcgaagacgtccttcagaaattctaaaccggaggccccagtcttatgtccgccgttaaacgccgcctcgccctgatcgccttcggagggaacgcccttctttccgaaaagcagaagggcacgcaggaggaacagattgcgaacgccgaggacgccgcccggctgatggcggccgtcgtccgcaagggctacgagctgatcatcgttcatggcaacggccctcaggtcggcaacctgctcatccagcaggaggcggcggcggaccacatccccccctattccctcgatctctgcgacgccatgaccgaaggcagcatgggctacatgctggaacgggccctggtcaacgagttccggcgccattcgatcgataaggaagccacgaccgtggtgacgatggtcttggtcgacaagaacgacccggccttcgccaagccgaccaaaccggtcgggccgttctacacagccgaacgggcccagggattgaagaaggaaaagggctggacgatggtcgaggacgccggccgcggctggcgcaaggtcgtggcttcgcccaagccgatcgacatcgtccccaagtggattatcaacgacctcgtccaggcgggccggatcgtcatcgccgccggaggcggaggcatccccgtcatcctcaacggcaacggcctgtacgagggcatcgaggcggttatcgacaaggattacgcctcgagcctcatcgcccgggaaatcggggtcgacctgttcatcatcctgacggccatcgaccgcgtctgcctcgacttcggcaagccggggcagcgcgatgtggcggttttgtccgtctcggaagcccgccggtttttgtccgaaggccagtttcccccgggctcaatggggccgaaaatccgcgcggccatcgaatatatcgaggcggggggcaaggaagtcctcatcaccgacgccgcccacctgaaggcggctttgctcggccggtccggaacccggatcgtcagagacgaccacaaaacagaaggagcctgatatgaagaaagatttcatctccatccacgacctcacccggtacgagttcttcgaactgatggaccagactaaaaaaatcaaagacgatccggacgaataccgaaagaagctgaaaaaccaggttctggcgatgatcttcgagaagccgtcgctgcggacccggatgaccttcgaagtcggaatgctcgaactgggaggaaaagccatctacctcagccccagcgagatccagatcggcaagcgcgagaccgtcgaggatgtcgcccacaacctcgagcgctgggtcgacgggatcatgatccggacgttcggccacgacaatgtcatccgcctggcccaggccgcctccgtgcccgtcatcaacgctctgaccgacctcctccatccctgccaagccatggccgatttcttcaccctgaaggaacacaagggcaacatctccaagatcaagctcgcctgggtcggcgacggcaacaacgtctgccacagcctgatgttcgccgcggccaaggccggctgcaaaatgagcgcggccgttcccaagggctatgagccgaatcccgagatcgtccggctggccctcgaggacggaaagggatcggatttcgagctgatcgtgaccaacgatcccctcgaggccgtggccggagccgacgccatctacgccgacgtctggacgtcgatgggccaagaagccgagaaagaggagcgcttgaagctcttcgcctccttccaagtcaacgaagccctgatgtccaaggccaaggacgactgcgtcttcatgcattgcctcccggcccatcgcggggaggaagtcacggctgaagtcttcgacgggccccggtccatcgtctttgatgaggccgaaaaccgccttcacgcccagaaggcgatcatgctggccttgatgggcaaataaacgagaacctatatggaaaaggacaacgctctcgtccaggtgaccccggacgacatctccttcatcgagaaggagctggccggctcgcggaaaccgacgacgaccaaagatctcgccggcaagctggcttaccagaaaaccgccggcgagaggacccgggccgtcaagctctacgatccggcctgctcctacgaggtcggggatacgatctgcaaggaatatgacgaggatctgatcgtcggggcgaaggtccacgaacactttcagggggccgttgtcctgaccgtcatccgcaagttcttttacaaggacttcgactgcgagatgctcgaggtcgattacaccggagggggcaccttccgcaagcacatcgactacatgaaaaagtccaagatccaagtgatgctcccggccaacgagggcgggacaaaccgcccgccccggatcatgccccaggccgaggatcctcggctgaccgagctgccgatgaccgagagggacctcaaaaccctggaacggctgctgcgggcggccctggccaagtctccggcttttttcgcctggggcgaccggtggcagctgacggccgcccagccctccctgccggaagaaacgatcaaggagatcgaagcccacctggccgagaccaaggcttcggccgcgacggccgagcttgtctcgacgtttttcaggatggagccgtcccacgatctcttcgacctccattgcctggccctcaaccgcctcctggaaacaaaataccggagggatttcgtcctggttcagccggtcgactggggccggtggatgctcaagagcgttctttcggccatgccggagggcctgcctctagcggctcccatggccgcccttccgccgtttgaaaacgaggaaacgatcgccgtcactcccttccacgagtttccgctgaaagtctacctcggctggcgggaaatcctctccggcggcgtcaagatccccaagggattcaacaaagagctgtcccaagcccgggaatatgttttcaccgacgccgacgaaaagaaaagctacaccgtccattacttcccccagcaggggtatttcctggggctgcgcgaatatttcgaaacaacggcgatcccccagggcacaagcatgaccctggaaaaaaccggtccgatccagttcaacttctggctgaaaaagtcgaagaagaagatccaagtcgcccgcatggcctatgaaaccaaaggcgacaccttcgccgaagcgggcgaaatggccaccctggccatgccgaacaagatcatctatctcgaacgcgaacacctcgagcggctgacggtcctgatcccgcagcggacggggttggacctcaagggtctcctcatcctggttttcaagcagttcagcctccaatcggcgaattattccctccattacctccgggcctatcatcttgtcgacattctccggcggaccacccaggaggacgtggaattcacccttctcaacagtccggaatttgaaaaatcagacaagaagaaggggattttctactaccatgaaaccccttcggagacgcctgtcgaggaagcggagggagaagaagccgcggccgaggaaatcatttccgaagaggccggcgagctgacctcggatgacttcctggaacacgagttcacgattctcgagcaagccccgccgccggcgccgccggccgcggctcggaaagaggaagaagccgcagcgatggccgaagcggaggccgagctcgaggcgttcgaggcggaaaagaaagtcaaaatcgagaaggaagcggccccccctcctaaaaaagaaaaagagaagaagaaaatcggcctcgaaagcgaccgccggccgagatcccgcaaaagcgaacggcgggtcaaggaagaggagctcgtggagctcgagtccgtgcgcgaggcgctgttcgccgaaaaaggcgcggaaagcgaggggctggagcttcccgccgataagacggaattcgaacagcccgaagtcccggtcgaaacggctccgccggccgggcccggcccgcttggcgcgttcggcggcggcctgttcgccgagaagctcaaggtcgctctgaagaagaaaagaggggaaaaggccgaagagccggacaaaccggacgaaacgtcctgaaccgcttcccgtttcgagtttcatgggcaggcagagaaaggccggcgtgatcggccgattcacggtcgccgcgcctctcgctttttttctcgttagcgttccgagcagccttctcggccgggaagaaacgtctcgtccggccggccggttccggaccgcgttcggcctggattccctggaacgcaaatattaccagccggagttccgcttgtccgcgccgctcggcggtcccggcgggaacgggctttttctcgacctgagctacctccaaaaaatcaacggcgacatggaaggcccgatcgacttctgggttcgggccggctgggccgcccccctgtcggccggagtcgaggccgaggcgagcttgaatcatttctgccggcaccagacgtcgctgttcagcgattatattctgaacctcaacgagattgtcgggcgcctccggcttcgacacggcggattccgggccggcttcggcttggggacgtatctcggaggaacccctggctatgacggcttggcggttttcgaggccgccgggacgggactccttttcccggagatttcctgggcggccgaggtcaaatgggtgaatttctccgagatcctctacgaggcggagctggccgtcgccctttccccaggcgcggagctggtgctggccggcttaaagacctatcggctcccggcggcgactcacgtcggcgttcgtttcggagcctacggcggaggctcccggtttctcgacgcctttgacgtgacggccggagtctatcccttttacgacgcctacaaggtgatgatcgacgggaccttccgcctgccgcttctccgccgggaatcccggcgctttttcattgacaccgccttcagttcgccccttctgaccggttccggtttctggggccaattctggccggaccggatgatgtactccgtcacggccgaatacgagcggccggtcgggagggcgttcgcctccgtctacgggcgttacatcgccgatatgccggtggataaagccgttcgattccgggccggcgcttccaccggtctggccatccgaaaccagcccgatttcaaccgccttgacggcccgatccgcttcgaggcccgggcgggcttcgatttcaagttcgcctatgacttcgggatgaagatcggcctcaacacgaccggcccggcggacctgaaagccggcctcgatgtcctcttcgaggccaacgacgcccgccgcaccgttgaagcccgggttttcctcgatttcggccgggacgtgtccgtccggccgtttgtcggcgttcggcgcgtcgtccccctggccggagactccgcttccgacggaacgttcccgcggatcgtggccgcggggatttctttctacacctggtttgactaggacctcgaagacggcgacgagggctcttccagaatctcgcggccggcgccctttcttcgggtgacgcccatttcgtcaagcagctccaagaggggaatcgcgtatttccggctgaggcccgtcatctccttgaattccgcaaccggcaggtcccgcggtcctttgacccgaagcttttcgatcagatcctccagccacggccggtggacgtaatacccgtcttttccggcgatgatccgtttccgctcgaccagaatgtccaacaactggttccgggtttcaggcgaaagattcatccgttcgcagacttcagccggggaaaccgagcggggacggccggcgaagcattcctcttcgatcttttggaggatgcgttcttcgcgctcaggcagctcccggacgaaatcggccagggcgtagaatccgtggtcctcccggagcttgccctcatggacgagggttttcaggcacagaagcaaaatctggcgcgggatttcgaagcgctcctggattttggaaagggcgacgccgcgctccttgatgtgcgaggaatggaatttctcgagataggcgacgaatttctcctcgaaataatcgatcgcctcccgggcgacaagatggagaggggcgaaggagaggatgcggatccggccttcggactccagcgccttggccagatcggtcaatccctggaaatccggggggaaaacgccggctaaatccttttgccggagcccctgcaatccataagccttggccagggcgatgatcttggggccgtcgccggccggaagacgcttgggaatcggagggtgggaggcgcgcatggtgactgttctcgaaaccgcgtttcattgtaagggaaacgagaaagaaagaaaagaaacaggcctccccgggagtccgtccgtttcagcctcgacgaacgcccttgatggctgaagaggaaatcctttcaatgaaagacggaattcaatgtccgcgcttttttcggccgcggcttgtttttcgttcggggccggctggctcttgctccgccggcaacaccaggctcatccgccggttgacgggatcgacggcggcgatctggacggaaaggccctggccgagctcgtattgccggccggtgcgcttgccggtcagcgcgccgcgggagcgcttggcgaaataatccccgcccaggtcgtcgtaggcgagcaacccggaaacgaaatactcgtcaagctcgacgatcagcccgccgcgggaaaagtcgacgatcagaccggagacgacgtcgccgaggcgttccttgagaaaccggaagatccgccattcgacgaggtccttctcggccgcgtcggccttgcgttcctgttcggacgaatgaacggcggccgcctcgagcccggccgggcgagggacgcgtccggccaggtcgtccttcagaagccggtggacgacgagatccgggtagcggcggatcggggaggtgaaatgggtgtaatccttgagcccgaggccgaagtgcccggatcgttccgaggaatattcggccagccgcatcgcccggaggatctggacgctgacgaacttctcgagccgcgttccctcggccgcccggacggcggattgtagatcccgggaagtgatcctcttggattcggggagcaggatgtggaagaaggccagcgttgcccggagcttctcgaggtcctcctcggccggggcctcgtggacgcggtggagggaggggatcccgcggaggcggagatattcggccacggcgacgttggccgcgaccatgaattcctcgatgagctcatgggcttcgttccgggccaaagccgcgaccgaggcgactttcccttcctggtagacaagctccggctcgaccaggtcgaagtccaggctcccccccgccagccgccgcttccggatcgcccgggccagcgttcgcatgtccaggatgtcggggacgatcgaggcgcgggcctcccgctcggccggatcattttccatgatcttgaagaccgaatcgtacgtcatccgttcgaccgtccggatgaccgagggatggaaggacgtcccgatccgctccccctccgcattgaaatccataacgacggaaacggccaagcgctcgaggcgcggccgaagcgagcagagatcgttggagagccgggccgggagcatcggcagggtcaggccgggaaagtaaacgcttgtcgcccgggcgaaggcctcggcctccagggccgtccccggccggacgtaatgcgacacgtcggcgatgtgaaccccgagccggaagccgccggacggcctccgggaaatggagacggcgtcgtcgaagtcctgggcggcctcgccgtcgatcgtgaacgttttccatgagcggaaatcggcccggccggcgatcgtctcggccgcggagacggcggcggtttgctccgcttccgcctcggccgccggggaaaaagcatccgccagtccgtactttcggatgatgacttgggcgtcgacgccgggatcgtccggccggccgagcacctcgacgattttcatgtccgcccgctcgacggaaacgatctccccggcttccgggaaaaacgatccccgggaaacgatcgggatttcctcggccgacggggtttcgaacgggacgaaaaacgggcggccgaaccgctcaccgaagatccccaggagccgctttttgactttcttgacgatccggacgacccggccttccagccgcccgctccggccggacgcgttcacgatcacctcgacctggtcgccgtggaccgccccggaggaaaaccgggatggaacaaagacatcctcccccttttcggagacgacgaagccgaagccgcggccgaaggtttcaaacgttcctttccgcaggtcggaggccggcggcaggagccagcgatccctcgcccgacgggccagcttgcgatgaacgagactctgaaggcggtcctcgaccttggcccgggatttgcgatcgacccgcagctccttgaagatatcccggagcttcaggccctggggattccggcggagaaggttgagaatccgggcttcatcgctttgcgctttggccatggggggcgatcctttcaccggcggaggccgccggccccggccgggccgggccgcatccgctcaataataatagagcgacacatagggaatccggtgtttctcccggagatttcggaccagccggatgcgggcggcggattccttctccgggccgcgaagaccggggtggtcgcggtcgacggccgcttcggcgtcgccgagacgggcgggcccggccgagtcccggatccaggcgtcgatcttcccgtccagccgctccagggcctcgtcgtccggacgcttcgccttcaagagcgaccgagccttctcgaattcgggcaggagcgcggcaaatccggccggccgccggccgaggaattcatccacggccgcccgggctttttcgattttctccgttgatctcgtttccaactcgggactccgtcgtcccacgtcccgctcgcggctccgctcgagggcccgctcgacggccgcccggcagaaggacaacgttcggatcttccccggcgcgcggccccggccggggcggagggcaaacgccgcctccaggccctccaagaccgtttcgagggggatcccggcggattcccaggcttcgatcaagcagatgtcggccggggaaagcgaaaacggcgctccccgcagggcgatgaaacggtcggcgatgccgcggaaataccgctcccggaatccggctgcgctcggctcgtcgctcatccctcgatcacgaccttcacggctcggacggccggtccttctgtcgttcgaagatgatccgaagcccttccaggacgagattcggctcgccggcgtcgatggccggaacttcagccgcgatttcttcgccgaatccgccggtggccacgacttttgttttctccccgagctctttccgcagcccgtcgatgatagtctgcgtcaggccgatgtagccgtaataaaggcccgactgcatgctgcccacggtcgttttcccgatgatccggtccggcttgcggatttcaatccggggaagccgggccgtcttgagatagagggcttcggccgagatcaggattccgggagcgatcgccccgcccaggtattcgcccttggccgagacggcgtcgaatgttgtagccgtgccgaaatcgacgacgatgcacggaccgccgtatttctcgtaggcggcgacggccgccgagatgcggtccgcgccgacctcggccggggcatcgtagaggatgggcatgcccgtgcgcagccccggcccgacaacgaacggcctgacgccgaacaacgacccgcagagcttctggaaaaccggggtcaggggcggcacaacgcacgaaatgatcgccgccttgacggcggccggatcgatcccggccatgcgaaggagattgaggaggatgacgccgtattcgtcgctggtttgatcccgatccgaccggagacgccattcccggacgagcttccggctttcgaaaacgccgaaagccaccgaggtgttgccaatatcgcaggccaatagcattgtttttctcctcgcccggatccgggggttccggacctgatttgaaggcggtcctttttccgattatactccaaatgactcgccggaaggggcccggtcgaggccgaacgaaacgatttcggccgagacaaaccgcctcgtccccccggccgttctcacccggatagccccgtcgatatccagcccctcgaacaatccggcaacgtcccccgacgccgttcgaagccggatcgcttcccccggcccggcttcggcgtggagaagaaaggcgtccaccacgtcctccggccgcttttcgaagagaggcgcgaccgctccctcgagctcctccaggaacgcggcgaggacgtcttcccggtcgatgattctccccgcggccaggcggagggatccggcccgggcccgccattcctccgggaaatcgctttcgtcttgactgaggttaaggccgaggccgacgatcgcgtagcgcgaacgaaatccggacaatccgctttcgcagaggattccgccgagcttcctcccttgccagacgatgtcgttcggccagcgcactttcgccggaatccccgccgtccgctccacggaccggcgggcggccaggccggcggccaggggcagaagcgaaagcgcggcgtccgtcccgggacgcaggacgacggagacatacaatcccgccccccggggggaaaaccaggagcggcccttggtcccccgtcctccggtctgttcccgggcgacgacgaccgtcccggccggagcgccctcgcgggcgcgtttccgggcctcatcattcgtcgaaacacacgtgtccaggaagcagaccgagtcattcatggggatgcgttcaccgcttgccgtcgacggccttgagctcctcgaccaggaccttcttgaactcggccgagacgatgtcccgggcccgttcctccatttcggcctggttgcgaagaatttcctgccggatcacgtcccggattttccgctcgacgtcgtcggtccactcgggcaggttccccgagtccggagtgaccgggccggatgcgaccgaggcggtctcgggaagactctgcggctcgagaaagggatcctcgggaagcgagggcagctcttttttgcgatcgatcgccgtccggatccggctcaaaagggtttccccgtcaaacggcttccggatcaagccgtcgtgccggatgacggacagcttggccacgtcgacggcctcgaaggcgcccggcagaaggaaaagggccgtcgtccggtagaccggttgggaacagagaaaggcggccacatcgtatccgtccatgccggggagggaaagagcgacaaggacggcgtcggggaagaattcgggaaggatccggatcgcggccaggccgtcgggcgcggtccggacttcaaattccgctccgggcagggccgtttccacggccttgcggaccacgggggaagcgtcggccaggaggattttcatgctcatttcaataatcaacccggatcgaatccgggcccaggagcgtttcaagagaagtcagcaggtcgtccgtgggcgtcacgcctttcagctcggggctttggaggaccacccggtgacccgacggcgtttccaattcgaacacggccgggcattcgccgggcgatttctccagcacttcccgcatgtcttggagaacggcctcgttcagggggcgggcgggcagccggacgacgaacttcttggccagcttctgggcggcctcctccaggggcaggatgtgggacaggtaaatcttgtgggtttcgccgtcgagctggtaatggcccttgatccagacgaggcttccctcctggagaacatggtaatagcgcttgtagggttcggcgtagacgacgacctccacccgcccggtcaagtcctccagctggaagacggccatccgttcgtccttcttcgttttcttcatctggaaatcggcgatcacgccggccacccggatctcctcggggatatcggcttcctcttcgaaagacgccgtcgagtgggacgtcagacgggggaggatgcgccggtaatgggaaaggggatggccgctgatgtagaagcccaaggcttccttttcgtaggaccacttgagcatctcgtcccactccgaaatcgcggcgatttcggccggaatctccggaggggcgagcgcgtctcttccgaacaacagggattgggttgattcccggattttctgcatctcccggttgtagtcgatcaggttgtcgatcaggcggaagcttcgggcccgggggagtccgaacgaatcgaaagcgcccgccttgatcaggctctccaggaccttccggttgatgatccgcccgtcggcgtggccgacgacgtcgaaaatcgtctggaacgggccgcgctccctccgaacggcgatcagcgcccgggcggccgtctcgccgacgttcttgaccgcggccaggccgaagcggacggcccggtcctcgacgatgaaatcgaaatcgctcttgttgatgtccggcggccggacctcgaggccgaggacctggcactcggcgacgtacttgacgatctgggaggtcgccccgcgctccgcctcggacgtcatcagcgcggccatgaaatgcgtcgggtgatgcgccttgagataggccgtttgataggccagggcggcataggcggcactgtgcgatttgttgaatccgtattcggcgaacttggcgatctggtcaaagattttcgcggctttcgaggccgaaatggcgcccttccgtttcgccccgtccaggaaattctgcttctgggcggtcatgatctcggccttcttcttgcccatggccttgcgcagaagatcggccttgctcaaagaaaaaccggccagctcgaccgcgatccgcatcacctgctcctggtagatgatcaggccgcgggtttcctcgagaatcggcttgagctcgggaatgtcatagacaatcttctcgggatggaatttccgctcgatgaagtcattggccatcccgctcttcaggggccccggccggtagagggcattcagggcgatcaagtcgcggaactcctccggcttgtagctccgcaggagcgctttcatcccttgggattcgaactggaagaccccgtcggtgttgccggccttgaaaagatcgaatgtcggcccgtcatccaggggcagggcgtccacgtccggggccgtcccgaagtccttggcgatcaggttctgggcgtcgcggataacggtcaggttgcggaggcccaggagatccattttgaggaggccgatcgcctcgatttcgctcatggcgaactgggtcgtcacctcgcccttgaccgactggtacaagggaagaaattcagtcagcggccgcggggtgatgaccagtccggcggcgtgaatcgacgggtggcggacctggccctcgaccttctcggcgatgtccagaagggctttgatccgaggattcctctcgacgtattcctggagcgggcccgcgtcctggacggccgaggcgatcttgacgtccggaccgagaggaaccatcttggccactttatcgacttcgctcagggggacttccaggacgcgtcccacgtctcggatggccgcccgggcggccatcgtcccgaaggtgatgatctggctgacgttctcctgcccgtatttctcggtgacataggaaatcatttccgcccggcggcgggcgcagaagtccatatcgatgtccggcaggctgattcgttcaggattgagaaaccgctcgaaaagaagatcgtactcgagagggtcgatgtcggtgatctgaaggcagtaggcgagcagcgagccggcggccgagccgcgccccggaccgaccggaatgttccgggaccgggccgtccggagaaggtcccagacgatgaggaaatatccttcgaactgcatctgcttgaccagctggatttccctctccagacgatccttgtaggcgtcaaggtcatggacaagcttgcccttggcccgcagatcgcggagtttgtcggcccgctcggaaaatcccgcccacacgacttcctcaaagtaatcccggagcgacttcccttccggcggctcgaaccgaggcaggaaatacgttcccttgggaaattcgaaatcgcaccgggcggcgacgtgaaaagtgttgtcgagggcctcggggatttcgccgaacagccgctccatctccgccggcggcttgaaatagaactccgccgagccgaacttgatccggtcggtatcgctgatcttcttattcgtctggatgcaaagaaggacgtcgtggctggccgcgtcggctttgccgaggaaatggatgtcgttggtggcgacaagcggcaggccgagccggcgggccaggccgacgagcttgggattgacctcccgctgcggctcgaggccgtgatccatgagctcgatatagaaattccccggcccgaagatctcggcatagctttcggccgcccgaagagccgcctcctcccggccttgaccgaagagataggcgatctcgccgcgcaggcaggcggaaaacccgatcagtcccttgctgtgggcggccaggagctccttgtcgatccggggacggtaatagaatccctccaagtaggccttggacaacaggacgcagaggttcttgtagccggtctcgttctcgaccaggagcaagagatgatagtgggccggctcgccgtcgcggagctcgcggtcacggcggctccgcggggcgatataggcctcgcagccgaaaatcggcttgacgcctttgtctttggcgattctctggaacttgaccgctccgaagaggttgccgtgatcggtcagggccacggccggcatcttgtggtcgacggcggcctggaccaaggcgtccaggcggacggcgccgtccaggatgctgtattccgagtggttgtgaagatggatgaagccgggggccatggattcattcccattcgatcgtgccgggcggcttgctggtgacgtcgaagaccacccggttgactccggccacctcgttgacgatccggttcgagatccgggccagaaggccgggggacgccgggaaccagtcggccgtcatcccgtccacgctttggaccagccggatgacgacgacccgctgataagtccgccgatcacccatgactccgacgcttcggacgggcagcagcacggcgaaggcctgccacaggcggtcgtagatcccggccgcccggacttccctaacgacgatgtcgtcggcctcgcggacgatccgcaaggattcctcgttgaccgggccgacgatccgaacggccaggccggggcccgggaacggatgctgggcgacgaaggcccggtcggctcccagctccacggccacggcccggacttcgtccttgaaaagctcccggagaggctcgaccaggacgaagccgtgcgatttcggcaggccgccgacgttgtgatgggacttgatgacggccgagggcccctggacgggacggctctcgatcacgtcgggataaatcgtcccctgggccaagaacttcgccccgcccaggcggcgggcctcctcccggaaaaccttgatgaacaagccgccgatgatcttccttttccgctccgggtcggagacgccgcccagtgctttgacgaaggccgcggccgcgtccacgccgacgacgtccaagtcgagcttgacccggaacatctccatgaggccggcatactggccctcccggagcaggccgttgtcgacgaagacgcaagtcaggcgttttccgacggcccggtgaaccaggagggccgtcaccagcgaatccacgccgcccgaaagcccgcagagaacgcggccccggccgaccgtcttccggatctcctcggtcttgcgctcgataaacgatcccatattccagtcggggatcaggccggcgatcttgaagaggaaattagctagaagcttccggccttccttggtgtggatgacctcgggatggaactggacgccgtagaaatcgcgccgcgggtcttcgatcactccggcccgcgtgttccccgtccggccggagacgcggaagcccggcgggagcttttcgaccttgtcgccgtggctcatccaaacctgttcgccgtctttgaggccggacagcagcccgctccggcggacgagacggagagcggcgaagccgtattcacgccggggagacgggacgacccggccgcccagaagatgggccatgagctgcagtccgtaacagatgccgaggataggaacgccgagggtgaagatctccggggagatcgtcggagcccctttcccataaacgctttgcggtccgcccgaaaggataagcccctgcggccgggcggcccggatcgcctcgaccggggccgtcggaggccagatttcggagtacacgcccagctcccgcaccttgcgggcgatgagctgggtatactgcgacccgaaatcaatcaccaggattttattcacgaagcgattgtatcacccgcggcccggggcctcaagggcgaaagcggcgggttcgcggcatgtccgagaacggagtccgcgcgcccctcccggggaacgcggtatgctataatatcgtttccatttcattcggagagtcgccatgagctttgaagaactgtcccgcgagctcgcggttcaaaccgacacgaagatcgttctcttcgtcatcgacggcctgggcgggctgccgcgaaacggacggaccgagctggaaacggcggccgcgccgaacctcgaccgcctggccgcccggtccagctgcgggctcaccgatccggtcctcatgggcgtgacgccgggcagcggcccggcccacttggcccttttcggctacgatcccctccgccaccggctcggccggggaatcctcgaggccctgggctcggatgtcgaggtccgggaaggcgacctcgtcgcccggggaaacttcgccactctcaaggacggcttgatcgccgaccggcgggccggacggattccgacgagcgagtgcgaacggatctgcgccaaaatcaacgccgcccgggccggaatgtccaatcctgaaatcactctcttcgccggcaaggaacaccgcttcgtcgcccggttccgggctcccgggctctccgacgccttgaccgacgccgatccgcagaaagacggcaagccccgcgtcccggcgtccgcgctggacgcggcctcggagaaagcggcttccatcgtcaacactttccttgacgagattctagggatcctcaaggacgagccggcggccaacgccgccctgcttcgcggcttctcggttcagccgaccatcccgaccatggccgacctgttcaaactccggccggcggcgatcgccaactatccgatgtacaagggtttggcccggctgatcggaatgcatgtttataaagtcggccccgagccggaggacctcttctccgctctcgaggcccgctggaaagaccacgactttttctacgttcactttaaaaaaacggacgcggccggggaagacgggaacttcgaagccaaggtccgggcgatcgaggaggccgaccgcttccttccccggatcgaagccctcaaacccgacgttctcgtcgtcaccgccgaccactcgaccccggccttgatgcgcgggcattccttccacccgaatccgttcctcctggccgccccgaccgccttgcccgacgatgtcgtcgccttctcagagcgggcctgcgccaaaggcatcctcggccgctttccctcgcttcgggccatgccgctgattctcggccatgccgggaagttgaaaaaatacggcgcctgattcggaggccttccccggacgagccggcggtccttccgccggcccgtctttttcggcaaatcaaccgtgttataatatttctcgaacaaaacggatgagtggacgaacaggccgtctctggacgattttcccggtcctgattctctccttagccgccgccccggccgaaaaaacggacgttcccgtcctctccgaagtctataacgtccggtcctacgcccatcccaactacacccgcatcgtcctggacgtgggcgctccgcgggaatacgtctggaacgagaccctcacgccgccggagattaccgtcgacgtcatccgggcccggcttaatcccatcgttcccgaaaccgtcaccccggccggcgccggctacatccggcgtctccgtctcgcggcaaagaatccgacgaccgtgcgcctgacgattgaggccgactgggaccgcgtccgccggtatgacgtcttcaacctctttgatccgttccggatcgtcatcgacatttatccgaaagaccccgcggccggccccgcggcggccgccccgccggctgaaaaaatcccgaagcccgcccagccggcggggggcggatacagcctcgcccgccagctcgggctgggcgtgcggacgatcatcatcgatcccgggcacggcggatcggatccgggctgtctcgatccggccggtccgaaggaaaaggacctgaccctcgacatcgccctcaagctcaaagcgatcctcgaagccgagtccgatctgtccgccgtcctgacgcgggaaaccgacatcttcgtccccttggaagcgcggaccatcgtcgccaatcaacggaaagccgacctgttcatctccatccacgtgaacgcctaccggctgaaagcgcggcaggggctggagacgttcttcctgaatttcagccccgatcccgcggtcaacgagctggcagccaaggaaaacgcgacgacgacaaaaaccatcggcgagatggacaaaatcgtcaagaaagtcgtccaaaacagccggatcatcgaatcccgggagctggcccggacggtccaatccgccctggcttcccatctttcccgtcactacgccggcgtcaaggacctgggcgccaaaggcggcccgttctgggtgcttctgggaagcgagatgccggcgatcctgatcgaagccggacatctttccaatcccgaggagatcaagcggctccagagcgcggtgtaccgccagaatatcgcccggggaattttcgaggggatcaaagcctacatccgttccctcggtaaaggataaacccatgaaacgaagaacgtttctcaagagcgccgtctggggcggcgcggctctcagcgccgtccccggcctgatcggccggccggccgcggcccccggcccgcccgacctggccgtcatccagggaaattcgccggcggacatcgcccgggcggccgtcgaggccctcggcgggatgaaccggtttgtctcccggggggacgtcgttctcatcaagccgaacatcggctgggaccgcaccccggagatggccgcctgcaccaacccggacatcgtccggaccctggtcgagctcagcttcgccgccggggcgaaaaaggtcgcggtgatggacaacaccaccaatcaagcccagcgctgctatgtccgctcgggcatccaggcggcggccagggaagccggggccgaggtgcccttcatcaacccgaggcggatcaagaaaatgaccatcggcggcgcctggctcaaggaatgggacgtgatccaggacttcgtcgaatgcgacgccctcatcaacgttccgatcgccaagcaccacaacctctgccgggtgacgctggggatgaagaactggctgggggcgatcggcgacccgcgcaaccgcctccaccagcgcatcgacgaggcctcggccgatttggccgccttcttcaagcccaagctgaccgttctcgacgcctggcggatcctcatccgcaacggcccccagggcggccggccgtcggacaccaagctcttgaagacggccgtggccggaacggacgcggccgcggtcgaagccatgggagccgttcttttcgatatcgtccccgccgagctccctctcctgcgcttcgccgttgaaagaaacatcggccggatcgatctggagaagatgaacattgaaaaaagaacgctctaagaaattccgccgcctccagatcgcccgaatcgccgtccaggcggcgttcctcggactgtttttcctcctcctcttcggcgcgcatttcaccggagaggattacatcggccgggtcgaggctttttttcatttcgaccctctcctggccgcggccacgatcctcgcctcacgcgtcttcctcgtttatttcgcctgggccgcccttacggtcctcgtcaccgtcctgttcggccggatcgtctgcggctggatctgccccctggggaccgtccaccagctcttttcctggattttcaagaaagcgcggttcctccggccgaaaaagccggcctcgggcgggttatggatcaaatacgccgtccttgccttcgtcctcgtcgccgccctcttcggcctcaacgccgcggggtacctggacccgctgtcgttcctgacgcgcgcctcggccgccggccttatcccggccttcggtctaggagcggacgcccttctcggggccgtctacgcggtcaggctcgaggccttcggcgacacgctggcccaggctctctcgactctgaccctgaacacgaccttccggcagggatttctcctcggcttgatttttctcggagccgttcttctgaacaaaatccgggagcgcttttggtgccggtatgtctgccccctgggggcgctcctgggcctcttcagccgatacaacctgttcaagctgaaaatcgacgaatcgaagtgcacccaatgcggcctctgctcgatccactgccaaacccaggccgctcccttcccggccgggggatggaaaagctcggagtgcgtgtattgcgagacctgcgcggcgatctgtccggagcgggcgatcacgttcccggtccgcctcggcgcggagaagccgccggccgtcgccttgacccgccggcgtctgctggcgacatcgtttttggctttcttcagcgtcccgtttttccggatcacgtccgcccggactcgggccgatgaacatctcatccggccgcccggatcgctgcccgagccggccttcctccggacctgcatcaagtgcggcgagtgtctgaaagcctgcccgaccaacggtctccagcccgccctgaccgaagccgggcccgagggcctgtggacgccggtgctggtcccgaaaatcggctattgcgagtactattgttcgctctgcacccaggtctgtccgaccggggcgatcaaggaactgaccgtcccggaaaaaacgacggtcaaaatcgggacggcctggatcgacaagaaccgctgcctcccctatttcctcggacggccctgcatcgtctgcgaggagcattgccccgtctctcccaaggcgatcaagttcatcctcgtcgagacgaaacggcccgacggaacgacggccgtggaaaaagctccgatcatcgatcccgagctgtgcatcggctgcggcgtttgcgagaacaagtgcccggtggccgaccggccggcgattttcgtcacgagcgtcggggaacgccggtcgaaggaaaatcagctgctcttgaacgtcggcgagtaagcggatccggaccggccgcggccgacgacgattgaagtcccggcccatctgtactagattgggagaccgccgccggggaaaccctcgagacatcccggcggcgcgccaaaccgcgctcacggaggatacgccgccatgaaacaaagaaccgccgccttcatcttgacgcttgcgcttttcgttccgtccatcgccgcgcccggcccccggcccgccccggccgccgaaacggcggccgtcacctcgccggaaacgtttttcggattccggcttggagccgaccggcggatggcgccctgggacaagatcgtcgcctactaccgcctcctcgcccgggaaagcgataagatcaaggtcgtcgacctggggccgtcgacgatgaaccagcccttccttctggtcgtcatttcctcctcccgcaatctcggccgcctggaagagctccgaaaaatcaacctccgcctcagcgatcctcgcgatttggacgagacggccgccgaaaagctgatcgccgaggggaaggccgtgatctgccagtccatgagtctccacgccaccgaaatcggaggcacccagatggccccggagctggcctatgatctcgtttcgcgggccgacgaggagaccgcgcgcatcttggacaacgtcgtctttctcctggttccgtccttcaatcccgacggggcggtcatggtttacgattggtaccaaaagaccctgggaacggaatacgagggatccgacctgccgtggctctaccacaaatacgccggccacgacaacaaccgggacgcgtttcagaccaacctggtcgaatcccgctacatggcccgcctcctgttccgcgattggattccccaagcctatgtcgaccaccaccacatgggcagctacggaccgcggatctacgtgccgccctacgccgagcccatccgcccgctggccgaccccctgatctggcgggagcacagctggtacggggcgcatatcgcgtacaaggaggaagaagccggattgtccggcgtcatcaacgcggctcaattctccggctggggtcatttcggattccactggatcaccccctttcacaacatcgccgggatgctgaccgaatcggccgacgccaggctggcctcgccgctctatatccacccccaccagcttaagggcgacgaccgcggattccccgcttacgaagcccagaccacgttccccaatccctggccgggcggctggtggaggcttcgggacatcatcgaccgccagaaaatctcggcttgggcggtgctcgacctggccgccaggaacaaggagaccgtcctgcggaacgcctttctcaaggcccggagacagaccgagcgcggcgcccagggaaagcccgccgcctacatcatcccggccgtccaacacgatccgctgacggctgtcaagctgatcaacaagctgctcgaccagggcatcgaaatccgccgggcggccgaggcgttcagagccgccgacggaaagccttatgccgccggatccttcctggttcccctcgctcagcccaaaatgggcctgatccgctatctcctcggccggacgctctatcccgacaattccttcacccggcggccggacggaaccccggaatccccttacgacatggccaccgacacgatggccgaattcatgggcgtccgggtggaggctctcgacgaggccgtcaccgggaactttgaaacgctgaccggggcgctcgcgccggccggacgcgcagccggaagcgccgccggccattccctcgacgggcgcctcaacgacgccttcgcggcggccggacggctgcttgaccggggcatccggctgcgtcgggccgaagaaagcgccggcggccttcgtcccggcgacttccttgttccggccggaacgtcaagcgccctgctttccgaaatcgcccgaacgacgggcgtcgacttccgggccctcgagccgggcctcgatcgaaccggtcgcgaggtcaagcggcagcgcctcggcgtgtaccagcgctactggggcggcaacatggacgagggctggacgcgcctccttctggaagagttcgcgatcccgtacacgaccctgagggacgcggagatccaaaagggcggactgaacgccgccttcgacgtcattctccttccggacgacgcgccggctctcatcaccggggaaggattggatcacaggcccggactcctggaatccacgcctccggaataccgcagcggaatcagggccgaaggtttcgaagccttgaagtcctttgtggccaagggcggcacgctggtcgccttcggccgcgcctgcggcctggccgtggagaaattcggcctcccggtccgcaacgtcctggccggaatcaaccgcaaggatttctggtgcccgggatcgaccctgcgggtgacgtacgatccaaagaatcccttggcctacggtcagccggacgaggggctggtcgtgtttcagatgggaaatccggctttcgagatccttccaacaaatcacaacgagcgggctgagatcgcggcagccttcgcttctcgcgatcttctccaaagcggctggcttttgggggaatcccgcctggccgggcgggcggccgtcgtttcggtccggcacggcgagggccgggtcgtccttttcggcatccggccccagcaccgggcccagacgcacggcaccttcaagctgttcttcaacgccctgatccgctgacggcggcggccggcgggatcccgccggaaatgatcaggagccgagggctttgatttccgcgatcaaggcgggcacgacctgaaacaggtcggccacgattccgtaatcggccaccttgaagatcggggcttcgggatccttgttgaccgcgacgaccaccttggacgaggacatgccggccaagtgctggatcgctccgctgatcccgaaggcaaaataaagattggggctgacggttttgcccgtttggccgacttggtgggaatggccgatccagccggcgtcgacggccgtccgagacgccccgacggccgcccgcggaaggaccgccgccagatcggaaagccgggcgaatccttccgggcctttcatcgcccggccgccggcgacgacgatatcggcctcggccacatcgatcgccgccccggactcgctcaagatctccgcgacttttccggcgacggccccctccgggatcgcgaccgcgtgggggacaacctcggcctcggggccgggttccgcgtccagcggaaaaacgttgggccggagggtggcgatcgccggcccggccggaagagcgagggtcaggagggctttgccggcaaaaatcggccgggtgaagaccaggcggccgccggaaacggaaacggccgtgcaatcggaagccaggggaacgcccaggcgggcggcaagccggggagcaagatcccggcccatcgccgtggccggaaagaagacggcccgggccgctgtttcccggacgagcccctcgacggccagggcgaatccctggctcgaataatcggttaaggccggattttggagatgatggatcttcgccgctccggccgcgccgatttcggcggccgccccttcgggagcgctcccgacgaggaccgcttccgccggaaaacccagggcttcggccgccctccgccccgcgacgagcgtctccagcgagcttttcttgatttttccgtcccggatttcaataaagcaaagaatcatcatccttctcctcacagggccttggcttcgttccgcagaagccggaccagttcccgggccgcttcctcggccgtaccgggcaggatttttccggcttgtttggcggccgggagctcaaggctcaggatctccacgcgggggacggcctcctccccggacaagccgagctcggcgagcgtcacgacgggaacggtttttttcttggcggccatgatccccttgagcgtttcatagcggggctcgttcagccccttctgggccgagacgacggccgggagacggaaggcgactttttcgagggcgccctcgatttccctgcaggctgcggcttcttggccgctgatttcgagcttggtgacaacggtggcttggggaagcccgagcatctcggcgaccatcggcggaaccgcggcgttgtcggatccgaccgacatccggccgaagagaatcaggccggcgtcgggctgacgggcgcggacgaaggcggccaggacgcgggcgatccgcaggggatcgtacgcctcccggaggtcgtccttgatcagcacggcctcgtcggcccccatggccagggctttgcggagagtcgacaaggcttcgtcggggccgaaagaaacggccgtgactttgccccccttggcttcccgaagccggagggcttcctcaagggcgtactcatcataagggctcaggacgaaattcaagccttcctcgacgatggatttcgcctcccggtcgattcggatccgggattcggtatccggcacacgcttgatgaagacaaggatattcatcggtttctcctcacattcattccccgggcttgccggctcgcggcgagccccgggttttcgccggcgtctttctcccccctcagccgtcgcaccggcgaaggagaagcgtggcgttcgttcccccgaatccgaaggaattcgaaagagcgtaaacgatttcagcagaccgggcccggcccggaacatagtccaggtcgcagtccggatcggggacttcgtaattcgccgtgggcggcatcgtctggttcctgatcgctaaagccgtgatggccgtctcgatcccgccggccgccccgagggcatggccggtcatggacttggtcgagctgacggccaggcggacggcctgcgatccgaagaccttcttgatcgccgccgtctcgatccggtcgttgagcggcgtggacgtgccgtgggcattgatgtattggacatcggccgggggaacgccggcgtcatccagggcggcttgcatcgcccgcacggccccgtctccgtcctcggccggggcggccggatgataggcatcgcccgtcattccataaccgacgacctcggcgtaaatccgggctccgcggcggacggccgcgccgagttcctccaggagacagatgcccgcgccctcgccgataacgaatccgtcccgcgttttgtcaaaaggccgcgacgcccggccgggatcgtcgttccgctccgaaagggccttcatcgcgcagaatccggccacgctcagcggcgtgatcggggcctcggcccctccggcgatcatccggtcggccaggccgtgctggatgatccggaaggcgtcgcccacggcgtgggcgcccgaggcgcaggccgtgacggaggccgagttcggcccccgcgacttgaagcggatggagatccggccgctcgcctcgttgatgatcgtggcgatgagaaagaagggcgatatccggtcgggtcctttttccaggaggatcttgtgatactcctcgatcgtcccgatgccgccgatgccggaaccgacataaacgccgcaccgttcgccggctaaaaggtccggcggaatcccggcgtcctcggcggccagaacggccgccccgatcgcgtattggatgaacggatccatcttccggatttctttccggtcgacaaaccgcaggggatcgaatcccttgacctcggccgcgatccgcgtggcgtgccgggaagcatcgaaacgggtgatcgggccgatgccgctcgatccggagatcacgttctcccagacgtcggagacacctgtgcccaggggcgtgaccagccccactcccgtgatgacgacgcgtctcagatcgtggcgatggtctcgggtttcccggctatttggcatggccgagaatgtattccatggccttgccgaccgtcgtcagcttttcggcttcttcgtcgggaatatccaggccgaattcatcttccagggccatcacgagctccaccgtgtccagggaatccgcgcccaaatcctcgatgaaggaggcgttctccgtgacctggtcctcgctgatgctcagcttgtcggccacgatcgtcttcatctttttcagcaattcgtctctgtccataatggacctccttgtgaaaatttggatcgtcacatataaaggccgccgttgacgtggatcacctggccggtgatataggccgcgtcgtcggaacacaggaaccggaccgccttggccacgtccgcgggttcgccgaaccgttgaagagggatgagagcgagaaaggactgcttgaccgcctccggaagacccaaggtcatgggggtcgaaatatagccgggggcgaccgcgttgaccgtgacgccgcgtgaaccgacttcccgggccagcgacttggtgaatcccacgacgccggccttggtcgcggcgtagttggtctgcccgggattgcccatcgcgccggcgaccgaggacaagctgacgatccggcccgagcgggccgaaagcatgctccgaagcacggccttggtgaaattaaaaatgcccttgaggttgacggccacgaccgcgtcccattcctcctccctcatccggagaagaaggttgtcgcgggtgatgccggcgttattgatcagatggtcgatttttccgaactcctgaacgaccgaggcggcggccgcctcggcttgggcgaacgcggcgacgttggcttcccggacggacgcccggccgccggcggccttgatggaagcggcgacggcctccagcttttccttttggatgtcgacgaggacgacgacggcgccctcggcggcgaagtcccgggcgatcgtctcgccgattccctgcgaagctcccgtgacgaccgtgaccttgtctttgaaaatcatcaggctttaacctcccctggggcgaccgtccgggcgagttcctcccggattctgtcctgaacccgcttgacgacgaattcccgggccagccggacggcgtttttaacggcgttggaattgctccggccgtggccgacgatgcacatcccattcaggcccagaagctgggctcctccgtattcgctgtaatccactcttttataaatccgcttgagatggcctttcatgagcagcaggccgatcttggcgaacaaattcttcgtgatttcgcgccgggccatgtggaaaagcgtctcaatgacgccctcgctgaccttcaaggcgacgttgccggtgaatccgtcgctgacgatcacgtcggcttttcccgcgtacaggtccttgccctcgatattgccgatgaagttcaggccggagaccgaaagacggtcgaaggtctgccgggtcagctcgttgcccttgccctcttcttccccgatgctcatcagggcgaccgagggattcgggcggcccatcacctgctccatgaaaaccttgcccatgaccgcaaactgggcgaggtcctcggtctggcaattggcgttggccccgacgtcgaggagaagggtgtgtcctttcagggtggggattaaaagggagagcgccggtttgttgactcccggcagggggccgagaatttggcgggccatggcgacgacggcggccgtgttgcccatcgaaacgaaggcgtcggcctgtccgtcccggacaagctggattccgatccggatggaggagcgctttttccgccggagggcgaacatgccgtctcccatgccgacggactcgggggcgtcgatgatggggaaatccgaaggttttcccccccagcgggcgacttccgggctgatctgttccttcgctccgacgaaaacgacgtccaggtcattttccttggcggcctggaccgcccccgggatcgtgatccggagacctaaatccccccccatcgcgtcaacggcgattttcatccgacgagaatccagaattatttttcggcggctttgatcaccggtcgaccgcggtaataaccgcattccggacaagcatgatgcggcatcttcggcgttccgcaattgggacaagaggagaacgacggcacggtcatgaaatcatgcgcccggcggcggcccttgcgggcatgcgagtgtctgcgtttgggattcggcatttattttcccttatctttcctaagaatttttagcggctcgagacggacatccgtttccttgacctggcagccgcaggctccctcgcgccggattttgccgcacacggcgcacaagccctcgcagccgggagagcacaacggccgggccggaaacgtcaggttcaattgttcgaggatcacctcccggaggtcgatccgccggctccggtagaacagccggtcggcatcctcgtcgtcgaattcttccttcagctcctgcatctcctcggggagaaaaaccaagtcgaagcgggaatcgacgggaaactcaaaaggcgcgaggcaccgtccgcaggtgaagcgcaggacggtcttcacgcggcccttgataaagacctcctcttccatccgcttgaccgagagctcggcttgaacgggttggaggaagacggcgtcttcctcgaccaggtccacgctcggaaaatcgaaattccggctgatgtccagtccgtctttcggcaacttatctatatcaataatcataggttacacccgcaaaaggtccgcttattataccatgtgacttccctttgtcaaccaaccgccggccggcggcccgagggccggagcgtccccggcgccggcggcggccgggccgccccggccgccgccgggttccggcgtattttcttcttgattaatctctccaatcggattatttataagacatccgatgaacggcctatcgacgaccattctttattccgggatttccttcctggtccaaacccaggagggcggaccgcaaacccattccctggaaacgctgatttaccggcgcggccagctcgtctattcgcgcaagtcctcctgcacggcgctccttgacgatcccgagcgggccgaacgcttgacgcatctcatccgtgatcagcatcaggccgttctcgatgacatcgccgggggacggctcgacattcctctgctcaaatcctgacgatgcccggaaaaatcctctatctcatcgacgggaattccctgctctaccgatcttattacgccgttcagcggctctcgacggccgccggattcccgacgaacgcgatctacggttttctgatcaccctgcgcaagattttagacgaggccgcccccggtcatctcggcgtcgttttcgacgctcccggggaaaaaatccgccgggaagtttaccaggattacaaagcccaccgaaagcccatgcccgacgacctggccgcccagcttcctaagctgaaagaagttcttcaagcctgccggatccccctgttggagagcccccgccacgaggccgacgacgttctcggctgcctggcgctccaggcggccgcggcgggatttgaaaccgtgatcgtcacgacggacaaagaccttttccagttggttgactccaagatcaaggttttcaacccggccaaggagaaatttttcgacgaaaagaccgtgggcaaggagttcggcgttccccccaaccgcgtggtcgacgtcctttccctctggggggatccgtccgacaacattcccggagttcccggaatcggcgaaaaaacagccaaggccctgatcaccgagcacggaagcctggacgcgctcctcgaacatcccgagcggatcaagaatttacggctccgggaagcggtgaaaaacaaccgggacaagatcgaaatcagccggaagctggccacgatcgaatgcgccttggacgtccccttcgatccggtcgcctttcaggtcgaggagccggacaagccggccctggcccggctgtattccgagctggaatttacgagcctggccgccgggatctccgccggcgccccgctcgagaggaaaaaaacccgcgtttaccggacgattctcgccgttttggacctcaggcgcctgaccggccggatccgcgaggcgggtttcgtagccctcgacaccgaaaccgaccatatctccccgacccgggcccggcttgtcgggatgtccttctcccttgagccgagcgaggccttttatcttcccctgcggcatgattacctcggagccccggctcagattcccctcggccaagccctcgacatcctccgaccggtcctggaggatccgaagatccgaaaaatcggccagaacatcaagtacgacctgatcgttctccgccgggaaggcctcgacctccagggcttggacgacgacaccatgatcctgtcgtatcttctggaaccgaattggggccgccacaacctcgaccgtctggccgcggcttatctccaggagacggccattccctaccaagccgtcgtcggcaagggcaagaacgagatcacgatgaaccgcgcgccggtcgaatcggccgccccgtatgcctgccaggacgccgacttcgccctgtccatcgcccggatcctccggccgcgcttggaacaggagggactcgacggcgtctaccgcgacctcgagcgtccgttgatccggatcctggcggacatggaaacggccggcgtccgggtcgacgaggcggccctccgcagcgtttcggccgagctcgaagccagcctccgcctccttgaaaaacagatctacgagcacgccgggctcgagttcaacatcaattcccccgcccagctgtcgtccgttctctttcagaagcttcttctcccggccccgaaaaaagcccgcggatcgggcgccgtctcgaccgccatcgacgtcctcgacggtctccgcgatctccaccccgtcgtccccctcgtcatcgaataccgccagacggccaagctcaagtccacctacgccgacgccctgcccgccttgatcgatccggccgacggccgcattcacacctcctacaaccaggccgtgacctcgaccggccgtctctccagctccgacccgaatctgcaaaacatcccggcccgcggaccgatcggcaagcgcttccgcgcggctttcattcctgaaaaaggccgccttcttctggccgcggattattcccagatcgagctccgggtgctggcccatctctccgaggatcccgccctcattgacattttccgcagggaccgggacattcatgccgagacggccgaccgggtcttcggccgaaacgccggcgggacggatgaggaacggcgacgccgggcgaaaatcatcaatttcagcctgatctacggcgcctcggccttttccctggcccgggagcttgaaacgtcgacccgggaagcccaagaatacatcgacaagtactacgaacggtttcccggggtcaaagcctatctcgaaggactcgtcgcctcggccgcctcccggggatacgccgaaacgctgttcggccggcggcgtccggttcccgagctcaagcagtcggaccgggcggcccgggatgccgggcggcggatcgcccttaacatgcccattcagggaacggcggccgatatcatgaagaaagccatgatcgcggcgggcgcggaactcgggcggcgagcgctcgccgcccggatgattctccaggttcacgacgagctcgtcttcgaagcgccggaaaaagaacgttccatcctggacggcctggtccgaaacgtcatggagtcggcctgccccggcttccgcgtgcccttgaaggtttcgctcggctggggggccagctgggccgaggcgaaataatcctccgtccgcgagaacgcctcgttccagggaggaacaggtccgcatgagccgcagacaaacggaaacgcccgggaaggccggtccggccggacgttttttttacatctcggaaatcctgaaccggccggtcgtctcggccgccggcggaacaatcgggaagcttcacgacctcaagatccgcctgaacgagccgtaccccccgatcgtcggcttagccgtccggaaacgccgcttccccaagctgggcgaagtggaatgggcggccgtcgaacggctcgatgcggcggcgatccgtctgtccggggaagccgaaaagacatttccttctccggcgacggcgtctgatgaaatttggctgcgcgaagaacttttggataagcaagtcgtcgacacctccggggccaagatcgaacgggtcaatgacatccatctcctgagcgtcaaccgggatctccgggtcgcccacgtggatttcggttggcgggggcttctccgccgcctcggctggctccgcctgacggataagatcaatctttggctcttcgactaccgcgccgaggaaaagatcatttcctggaaatatgtccagcctctgatggccgatcccgacaagaagaagctgaagctgaacgtcgccgcccgatggcttcggacgatccacccctccgacctggccgacattctggaggagctggaccggaccaaccggtcctccctcttccgctccctggatcttcaaaccgccgctcaagccctggaggaagtggaggatccgaagctccagatctctctcatcgaatcctccccagtcgaacgggcctcggacatcctggaggaaatggcccccgacgaagccaccgatctcttggccggacttcccgcggatcagaaggaccggctcgtccggtcgatggagaagccgtcggccgaggccctcacggcccttcttcaattcaaggagggaacggccggcggcatcatgaccaaggactttttctccgtctcggaggataccccgatcggccaggcgatcgaggaattccgggcgacgacctaccccctcgagtcggtcgcctatatctacgtcacctccggcgacggccggctgcgcggagtcgccaccctccgccatctcatcatcggcgagccgaacgctccgatcgggaggttcatgaacgagcgcttggtgaccatcgatccgcaggacgacgtgggggatgtcgcggacattttcaagaaatacaagtttttggccgttcctgtggtcaacaaggatgggaggatggaaggattgatcactctgacggacatcatggaagagcggctggccgggtgaacgcgagttcgtccctccgatgagacaactccgcctccgctggaaatcgattctcctgttcttgtccatcgccggcccggggatcatcacgtccaatgtggacaacgacgccggcgggatcgcgacctattccatggccggagcccatttcggatattccctcctgtggtcgctcgtcccgatcatgctggccttgatgatcgtccaggagatgagcgcccggatgggcgtcgtcacgggaaaggggttgtccgacctgatccgcgagcggttcggggtcaagatcaccgtttacctccttttcgccgtcgtcctcacgaacatcggcaatatcatcgccgagttcgccggcgtggcctcgagcctggagattttccgggtctcgaaatacctctccgtccccctggcggccgcggccgtctggcttcttgtcatcaagggcacgtaccgctccatcgaaaaggtctttctctccgcctgtcttttttacctcacctatatcctggccggcttcctggccaagcccgattgggccgcgatcgggagaagttttgtccggccgcacttcgatttttcctccgtggggatggggatgatcatcggactgatcgggacgacgatcgcgccctggatgcagttctatctccaagcgtcgatcgttgaaaaaaacatcgctttgaagaattaccggttcgcccgctgggacgtcatcatcggcagcgtcatcgtgacgctgatcgcggcgttcatcgtcctgacttgcgcggcgaccctgttcccggcgggggtccgcgtcgagacggccgccgacgccgcccaagcgctccggccgctcgccgggaaatacaccgcctttctcttcgctttcggcttgttgaacgcgtcgctgttcgccgcctcgatcctccccttgtccaccgccttcgttgtttgcgaagccatgggctgggaaaacggcgtggataaaaaattttcccaagctccgcaattttacggactttactcgatgctgatcgtcttgggtgcggccatcgtcctgatccccggaatcccccttttcccggtcatgtatatttcccaggtcgtcaacggcgccgcccttcccctcatccttgttttcatgctcattctgaccaacgacaaaaagctcatgggtgaatatgtcaacaaaaaaggatacaatatcatagcctggagcacgatcgtgatcctcgtcgccttgacgatgatctacctggggctccttctcggaatcctatgacatgaccgaagccgccggccgccccctcatcctcatcgtcgaggatgagatcatcatcgccatggaaatccaggtccgattggaaagcgccggcttcgccgtctgcggcctcgcctcgtccggggagaaggccatcaccctcgcccgggaaaaaaatcctgacctcgtcttgatggacatcaccttgaaaggcccgctcgacggcctggaaacggccgggcggatccaagccgaaaagagcatcccggtgatttttctctcggccacggacgacgaggccgtgctgcgccggatccgggaagcccgcctcggcctcagtctcgccaagccgttcaaggaggccgacctgatcgcggccgtccgcgtctccctcgggctctgagtctccccggcatctccccccgtttgccggtcgcggtatcgtttgttagaatggaagcggaatttcatgatgaagctctgcaaagggttgcgggtggtcctcgcccttgtttttctggctccggggtcggcggctcagagctttttcacgcgcacctatgaagaaaacgacggtttagtcaattcgaccgtctacgacctggcccaggacgcctccggccggatgtggttcgccacgagcggcgggatttcggtctatgacggagcggcctggacatcgcacacgtctggaaccggattgcccgcccaggacgtccgctgcatccgggtagacaccgaaggccggatctgggcggtgggatccaatcccgcctggatcctgatgtgcttcgacggccggagttgggcttcgtttccctttcccccctccgccgccgtctcgtattgcaccgctttggccgtccgtccggagggccgggaagtccgcgtcgccgtgggaacctccggttcggggattttcgtcttcgacgggatccgctggaggacgataacgaaaaccggaggcctggccgggagcgaagtccgcaacatcatcccgtatcagggcggttttctcgtcgcgacggaaaagggattgtcctgggccggggaaaattccatcgagaaccggtgggccggggtcgatcctcttttagccggggacatcagaggagcggccgttgaggccgcctccggaggcgacgtcatctggctcctgggttcgcgctggctggggatctttcaagacgggcggctccgcatcctcagacgggagaatccgctgctgttttcctcgaatttcccggcagcgaaggttttacccgacggaaagggcgggctctttttcggaaatccggtctccatcttctattatgatccgtccagcgccagcgcctaccctctgggagtccgaaacggcctcatcgccgaaggcgcggcggctctttttctcgaccgcgaaagcaacgtctggatcggcggcttccggggcgtgagccggatctccagccgccgcttccataattaccggagcgcccagggcttgctggaagacgaagtgacggccattcaggccttcggcgacggggtggtcgccttcggccataacttcggcctgaccatttgggacgggcgggaattgagaaagatcgcccttaaagcgaaaccggacgctcctccgggccagatccgcgtcctcgatttagccggagacgatcggggcggcctctggttggcggccgcaagcctcggcttgggaagcttggaaggaaacgaccgcatccgttggcgtgacgtccccgggaacccgactcaccccgtcacctccgtcgtcttcgatgaaaaccggcggctttggatcgcccaaagcgacgccctgttccaacttcgcaaaggccgcccggtcgaggtcttcccgggaatgttcaagggctgctacatccggaagatcgtcgccgcccggggagggctgctcttcgtcgcgacgacgaaacacggcctcttccgctgggacggaagctcctggacgcggtcctcgggagatgaggcttccggcgtgtccaacgtcttttcggtctatcttgattccaacgggcgaaccctggtcggaacgctggccggcctgcgcctgctcgccggcgaccggttggaccttttctcggaaaacggattcgagatccgccgccccgtgtatctcatcctcgaagaccgggccggccgcctttggttcggaacggacaacggcgtcgtccggtgggacggccggacacgccgcgatttcacgaaagccgaggggctcgccggacgggaagtcaaccggtcggccgggatgatcgaccgcctgggccggatctggatcgggacgaacacaggggcctcatgctaccgagagaatttcgacctggggccggacgacgtccccccgccgacagtctccatcaccggcctggacgtcaacgggacgccggccgatttatccgcggaaatcgtcctcggataccgggaaaacaacctcatgttccatttccaagggacctccttcatcaacgagggcgccctccggttcgaaagctacttggccgggtttgataaaacatggggagccgaatacgcggccgccgaccggcggatccgctacacgaatcttccggcgggatcctatgttttccatctccgggccaagaacgccctgggaacccggagcgaagcagtctcctcccccgtcatccgcatccggaatccgttctggctgcaatggtggttcctgctggcgtcctttttactcgccggcggattgatactcaccattggcttggccgtcacccagcatcggcaggccgaacgcctggaggccctggttttggaccggacggctcaaatccaggcttctctgcgggagaaggaagtcctcctcaaagaggtccatcaccgggtcaagaacaatctccagatcatctcgagccttctgtttctccagtcccgccgtatctccgaccccgggttgatgagcgtgttcaaggggaccatcagccgggttcgggcgatggccctcgttcacgaaagcctgtaccgttcggaccagctgacgctgatcgacatggacgagtatttccggaaactggtctatcaccttctggaaatctacgacgtccggaaagctcccgtagccgcggacatccgggccgagaggatctctctgcccctggaaaccgcgatcacctacggcttgatcgtcaatgagctggtttccaatgctctcaagcacgcctttccctccgagcggaaaggcgtcgtcaaaatcaccttgagccgcgtcggactggacgcggaggaggattcctcccgggagaagggaatcgagctgacggtcgtcgacaacggtgtcgggatcccggaggccgtcaaaaacggatcgcccgactccctcggccttcgcctcgtccagaacctggcctctcagctggacgggaaaatcgatgtccggaacgagggagggacggtggtccggatttttttccctgaataggccggctcagagatttttcgtgaagacgcggaacttcttataaagcacgccgcccatcttttccatttccgcccggaccttgacgttggactcgagctcgtgatgggtgtcgaggcactcaaaacccgcttcccgggccgaggcgatcatccgcgtgcccatgaaaacgtccaacccgaatccctggcagtcttcccggatccctcccagaaggaggtccagctgcttggttttcttggccgcccggaggattttgaacaagccgaaggggaacagccggccccgggcttttcggatgcccgcggtcatgtcggggatgccgacgatgaacgccacgaaatccggccctttcttgacggctttaacaaaccgcggatccaagacgggcagatattttttcgccagttcgtccatctccttctcgtccaggggatggtacccgtagatattcgaattgacatagcagtcgttcatcagagagaggatcggtcggacggacggcttgatctctttccgggatctgaattcgaccatctcatactggccgcggcgctggatccgttcaaagatctttttataaaattcgggaagaacctcgggaatcgccagccggtagacataataatcgacgtcctttccgtagccgtcctcctcgatccaccgcggcatccattcgtaattgtaataggtcgcgatcgtggcgtggttctcaaagccctcgatcatccagccctcgggatcctggtcggaaaagccgtaggggccgataatccgggccatccccttctcccgggcccattcctcaacccggccgacaagggctcgaaagacatcccggtcctcatacgtttccaggttggcgaagcgggcgatgttttccttccggtgctcgttgaatcggcggttgatgatgcccatgatccggccgacgggctttccgtccttccaagccagcaggagaatcgtgtcgcagaacgcaaacgcccggtttttcttcggattgaagtacgtccactcatccatatagagagggggcgtccacccgggccggccggcatgaattttttccgggagatggatgaacgtcttgagatctttcttcgtctcgacgtttcggatgattaggctcatcgtctcctcctctcgtccgcgcttccgccctcattcaacatttttcccgaaaaaaaagcaaacggaatcttacgaaagcgttttcctccgggggcgaaggcgccggcggcgggccgggcggaagtgtaaaaccctgtggaaaacccctggacaaaccgttgaaaatccttgacgagcccggatccgatgagtatactttccggtccacccatgagccaagaaaccattaccctactcacggtcctcgttcctatcatcggctcgatgacgatccccctggcgggcctgatttcccgggccgcccggtcggtttgggccgcggcgctcggcgccgcgacctccgtcctggcgatgtccctgttgccccgggccctggccggaggagaaacggtcgtccggaagaatctcgttctggggctggacttcatcctgttgatcgaccccttgtcgatcttcatggcctgcgtctcttcattcgtcggattcctgatcatcgtttattcgatcgggtacgtccgggacgaggagaaccagaacgagtattacctcctggtcgtcctgttcatcggcagcatgatggggctggtgttttcgggaaacctgatcttcctctacttgttctgggagatcatcgccatctgctgctggcgactcatcggcttctaccgcctgaaggagcacgtgaagaaggccgacaaggccttcctgatcaccttcttcggcgcggtggtcatgctgctcgggttcatcttgatctacggtcaaaccggcagcttcgacctcacggtgatgagggggctgcccgtttccggaaccgccgttcttctgatccttttcggaatgttctcgaaatcggccacggttcccctgcacacctggcttccggacgccggcgtcgccccgacgacggtcacggctctgctgcacgcggccgtcctcgtcaaaatcggcgtctacgccttcgcccggttgttcgtctacggcttccgggttccggagggctgggctgacgcgctcccctggatcgcggtcgtttccagcctggtcgcggccgccgcggcgaccgtcgaaaacgatttcaagcggattctggcctattcgacggtcagccagatcggctacatctttctcggctacgccgtcctgacggacgccggggtcacgggatcgacgctgttcatcctgatgcacggcttggccaaggcggggctgttcctctgcgccgggatcgtcatccacgccacccacaagcgggacatccgcgagatgggcgggctgttcaaatcgatgcccctgacggccctctccttcctcttctgcgccttctcggtcatcggcatcccgcccttcggcggcttcttttctaaattcctggtgatcatggggacggtcaaggcgggccgagtcggcgtcgccgccgtggccctgttcaccgctgttttgaccatgttttacctcctgcgcgttttcagccaggtctttctgggagaagccaaagctccggcccatgaagggacgcggtccatggtcgccgtcgtctcgatcctggccgtcctctctctggtcgcgggcctgctgatcgcctatccttcggtcctggccgaaacggccacggctcatctcatggggtggctcaaatgacgcctacaactcttctctggaccattcttctgccggcccttacgggcgtcgcctttttcttgatcccccggacggtcaaatacgtccgcgaggttttggcggtcgtttccgccggcgtttccctctatctcggattcgcccttttcgccgtcaagaatctggcctggaaagctccgtggttgggctccgggatcccgatggagctccggctctaccagttcccggccttcattctcctcggcctctcgggttttctcttcctgatcgccctttactcagcggccaagatgaaggaccatccgcgcgtccgcgagtactacgcatacgtcttcttctcggccgccctggcctttggggcggtcctggccgacaacttcgtccccctggtcttcttctgggaagggctcctggtcacgctgtacgccctgatctcgctggggggcaaggaagcccatcgaacggcgaccaaggcgttcctgatcaacggattctgcgatttcgccatgatcctcggcatcgggatcgtttggtcgctcgccgggacgacgaccatttcccaggtctcgctcaagcccgagggaccggccgccctcgccttcatcctgatgatgatcggggcgatcggcaaggcgggagcgatgcccttccacacctggatcccggacgccgcgatcgacgcgccggtgacgttcatggcctacatgccggccgcctttgagaagcttctgggcatttacctgctcgcccggatctgcctggatatcttcacgcttcagcccggctcaggcctctctctcctcctgatgattatcggggccgcgacgatcgttctggccgtcatgatggccctggtccagaaggacctgaagcggctgttatcctaccacgccgtcagccaggtcggatacatgatcctgggcatcggcacggccatcccgatcggcatcgccggcgggatttttcacatgatcaaccacgccatgtacaagagcgggctcttcctcagcgccggctcggtcgaacaccgggccgggacgacggatcttcggaagctgggcggcctggcccgggaaatgccgatcacggccgccgggttcacggtctgcgccctggcgatttcgggcgtctggccgctcaacggcttcgtctcgaaggaaatggtcttccacggcgccgtggagtccggctcgatcctcttcgcgatcgccgcctgggtcggggccgtcttcaccttcgcctcgttcctcaaggccggacacgcggtcttcttcgggaagcggtccgaggagcggtctcccggccgggtcaaggaaagcccggtcaccatgctgatcccgatcctgattctcgcccttttgtgcatcaccttcggcttgttcaacaagctgcccctgacgcaattcatccagcccgtcgtcgccgcccacgccgaggcgggcgcgccgatcgattacaccgcccatgccttggatcttttcaacgtcatcgccggcatctcggtagcctgcctgatcctggccttcggtcttcacgtctacgggttcaagcgcggcgggaaaaaggcctggctggcttccgagcccattcatcacgctccgttcttcaagcagatgtacgacggcgctgagaagcggttcttcgatctttacgaacaggggatcaaattcctgcgcggcttgtcctggatcttgttcaagggcatcgaccggccgatcgacgccgtctacgaaaagggcgtcaccgcagtcggaacggcgttcaccggcctgctgcgaaaggcccacaacggtcactatgccaactacttggcttggggcctgggcgggctggtcgtcctgatcgccctgatcaacgtcattttgaagtaacgagagaggaggacttttgattttcatctacatcggtttgcccctggcggtggccgccgtcctgcctctcgccggcaaagcgtcccggcgggttctgcccgacatcctctccaacgccgtcctggcgggccttctggcctatgccgtgaccggagccaagacgctcctggtccacgggccgatcgtccagcaggtgcggtggttcggagaggccgtcaacatccggatcgccctggacggcttcagcctgttcatgctgatggcgatccaactggtcagcctgtgcgtcggcctctattccatcaattacatggagcattacggcgccaaggccaattactacgcccttctgctggtgatggtcgcgggaatgaacggcctcgttctttcccaggatcttttcagcgtctatctgttcctcgaagtcgcggccgtggcctcctacgccctggtcgcctacggcctggaagccgaggagctcgaagcctcattcaaatacctcatgctctcggtcgtggcctcggcggccgtcttgttggcggtcaccgtcctctacggcatgaccggagccctgggcttcgacgccgtggccgagggtctccggcaattggaggccaaggccgtcgtcggcgtcgccgccgccctgtttctcatgggcttcgggctgaaggcggccctgatccccttccatgcctggcttcccgacgcccacccttcggccccggcccccatttcggccattctttcgggcctgctgatcaaagtctcgggcgtttacgccatcacccggatcttctttcacgtcatcggcctgacccccgccctgtcccaggtgctgatgtggctggcggccgtttcggtcgtcgtcgccgccttcctggctctcggtcaaaaggacatgaagcggatgctggcttattcctccatcagccaggtcggatacgtcgttctcggcctcgggctgggaacgcctctcggcgtggccggcggcctcttccatctcttcaaccacgccatcgccaagagcctcctgttcttcaccagcggctcggttcaacaggcgaccgggacgcggaacctggacgagatgggcgggctggccaaacggatgccctggacggccgggaccaacctcgtcggctcgctctcgatcgccggcgttcccccgctggggggcttttggtccaagctcgtcattatcatggccctggtccaagcgcgggaatggtccctggccgtgatcgcggtcctagccagcgtgctcaccctctggtattacctcatccttcaacgcaaagccttcttcggcaagctggccgagcgctgggcgcaggtgaaggaagccccgttttggatgacggcggccacggtgatcctagctctcctggtcatcggggtgggcttgtggtttgccgccgccttctcctcctgggtccagccggccgcggacgcgctggcgaagggattttaagccatgacctttcaaatcatccttctcgcggcgctggttctggcctcggccgcggccatcctggccaaggatcttctcaagtccgccgtcgccctggccgtcgccagcctctttttgggaatcatttttttccgcatgggagccccctacgccggggtattcgagatctcggtcgtcgccgggctgatcacagtcctcttcatgctgacgatcgccttgaccaaacagggcggggacgtccgtgaatccaagaccgtgaaagtcgtctttccgctcttcttcgccgtctttctcttgatcgacttctttgtcatgcgggggatcctggcccaggtcccggccctggaaggggcggccgaggcgggaactttcggagacgttctctggaaggagcgctcgttcgatctgatcggccagttggccgtcatcctggccggcgtcttcgccgtcctggccctcttccggaaaaggaatcaccatgatcattaatgagtgggtcgtttacctcctgtttgccgccgtgctgttctttctcggcctctactgcctgctgacgatgcgcaacctgatcaagcttttcatcgggatcgaagtcatcggcaagggcgtgagcctggtcctcctctcgacgggctgggccagacagagcattttcctggcccagagcctggtcgtgacgtacatcgtcatcgaagtcagcttggtggccacggccctggcggtcatcatcaacctgtaccgcgtgaatcagaccctcgatatccggtcgctgacccggctgaaaggttaatccgacatgaacggaatcgatatcctcctctcccccccggtggccttcgtcctcatcctggccgtggtcgtcctgatctatctgctgggcaaacggatggcccccaagctcacccggaccggcggcaagctgacctcctacgcctgcggcgaggacatcccggggacgaaagtccagttcggctaccggctcttcttcttcgtcgccctgttcttcaccatcatgcacgtggccgctctggtcatcgccacggttccggccggaaaaatcgccttgttcgccgtcctttacctggcggtcgtcttcctctccattctggccttgatcacaaggagctgacatgttcgaacgcgtcatccgctggtcccggaagaaatcgccgtggatcctgcacctcaactcgggcgcctgcaacgcctgcgacatcgaggtcgtggccgcgctcacgccccgcttcgatgtcgaacggctcggcgtccttctgaaagccacgccccgccacgccgacgtcatcgtcgccaccggcccggtcacccgccagctgcgggaccggatcattcggatctatgatcagacccccgacccgaagtttgtcatcgccgtcggggcctgtgccatgtccggctgcgtttaccggggggcgtacaatatctgcggcggcctggaccaagtcattccggtcaatatctacatccccgggtgtccggtccgccccgatgccatcctggacggagtcgtcaagctcctgaataccctctgagagaacaccgatgaacgacgaacaaaaaatcgagaaactgaaaaccttcgtctcccccgaggccgtcgcccacccggcttcccaccggattttcgtcaccgtcgccccttccggccttgtgaccctggtcgaacggatgaaagccgagttggacaactggtacgtcatcacgatttcgggcgtggacaagggtgaaagctacgaaattctttatcatttcggggacacgaccggctcgatcacggtccggacgcagatccccaaggccgacccccgcctcccgtccatttgcggtccgattccgggcgcggtcctctacgagcgcgagttgcaggacatgttcgggatagccgtcgataacctgcccgatccccggccgatgctcatgccggacgactggcccgccgggaacttcccgctgcgcaaggattggaaattcgatcggccggccgaggtcatccccggaggcgaaaaatgaaattccaaatccccatcggtccccagcacccggccctcaaggaaccgatttccatccgcctgacggtcgaaggcgaggtcatcaaggacgccgacctccgtctcggctacaatcaccgcggcgtggagaagctggccgaggaaaaatcctggatccagaacatctacctgtgcgagcggatctgcgggatctgctcgcattcccacgccacctgcttcgtccagggcgccgagaaacttctcgaaatcgagccgccccggcggggcgtctacctgcgctatctcgtctccgagctcgagcggatccacagccatcttctttggctcggcgtggccggccacgaagccggcttcgacaccttcttcatgtacacctggcgcgaccgggaggtcgtcatggaccttctggagatgatttccggaaaccgcgtccattacgccatcaacaccttgggcggcgtccgccgggacatcgacgaaaccctccgcgggaaaatcctcgagggcctcgccgttctcaaggcccggagcgaatactacttcaagatcggcgccgccgaaccaacctttgtcgcccgtttggccggcgtcggccccctgaccaagcagcaggccatggattattgcgcggtcggccccatggcccgggcttcggggatcgaccgggacgtccggaaaaacgacccccacgacttctacaacgaggtcgaattcgacgtcgccaccgccgactcctgcgacgtgctcggccggacgatcgtccggatcaaggagcttttcgaatcctacaagatctgcgagcagatcctccggaagcttccggacgggccgatcgcggtcaaggcgccccgccgggccaagccgggcgaagtcgtcagccgctacgaggcccctcgcggggaaaacatccactacatcgtcgccaacggctcggacaaacccgagcgcctcaaggtccgggccccgacgctggcgaactatccggccacgatcgagattctcaagcacggcttcatcgccgacgtccccctcatcttcgcggccatcgacccgtgcatctgctgcgctgaacggtcagtggagctggtcgacgcccggtccggagaggaacgcacgctccgcttctcggatctgcgccggatggcgaacgatcgcgcccggtcactgtcactgcaaaggaacgtcgcatggccgctttgaaaacgattctctacctcttggtttatcctggttttcttttcctcttcgtgtactccacgttcgtcgaatggttcgaccggaaagtctacgcccggctccaaaaccggatggggccgacccataccgggcgcgccggtcttctccagccgatcgccgacatcgtcaagctgatggccaaggaagacatcgtcccggacaaggccgacaagaaagtcttcaccgccctgccggtcgtcggcctggcggtcgtcctcacggccggtcttctcctgcccgtttggaacatcgacctggccgcggccagcccgatctccttcccgggcgacctcatcgtcctgctgtacctgctcagtctgccgaccctggtcctttttctggccggctggtcctcgaccaacgctttttccatcatcggcgggacgcgcgtcctgaccatgctctttggttacgaagtgccgctctttctggccgtcctctccccggccgtgctggccgggtcttggcggatggccgagatcgccgccttctaccgggctcatcccctcctgatcctgcccaacctcatcggcttcgggatcgccctgatcgccgttcaagctaagctcgaacggacgcccttcgatatcccccacgccgaaacggagatcgtcggcgggactttcaccgagtattcgggaaagaagctggccttcttccggctgatggccgacgtcgagctggtcgtcgccgccggcctgctggcgaccgtcttcctcggaggcttcgggggaagcgtcctgccggccttcgtccagttcgtcctgaaaacgctcttcgtcgtctttctcctctcggtcctcagggccgtgacggggagaatccgcgtcgaccaggtcgtctccctcgcctggaagtggctcgccccgctggccgtccttcagcttctgatcgtcattctgattaaagggtttgcattatgaagatcgccgccttcctgccggagcttttccgtcatcttttcaaaaaaccggccaccctcgactatcccttcaaaaagatcgcggtgccgaaggatttccggggaacgccgttcctccaccccgagctctgcatcgtttgcaaagcctgcgaacgggactgtccggccgaagcgatcgaaatcacttcggtcaacgaggccgaaaagcgcttccggatgacgatccacaacgaccggtgcatccactgcgcccagtgcgtggattcctgcccgaccactccggtcaaggcgatggaaatggacactcttcatgaaatcgccgccttcgaccgtcatgatcttaaaaagtcgtgggaatacgtccgcgccctgccgaagaggccggtcgccacgcccgcgcccgtcaagccggcggcggaaaccgcggtcaaatcaggggcgtaatcccccgctcgcgctgagatcctgagagccccgttccacagggaacggggctttttttttatcgacgaccgcccggcgttgcccgaaggccgggaaatgccttatcatgccagggaggattccccatgaacgaactctctccgctcgattggaaagccgccgtcgccgcggcgatggatacggccgggagagtcgttgtctgcggcatcggaaacgacctccggggcgacgatgccgccgggattctctgccttcagaggctgcggagggctctgtccgggaggtccgccggatccgctcctgtccgcccggttctgtttgtcgacggcggagaaaccccggaaaacgagaccggaaagatgcggcattttcatccggacctggtccttcttatcgacgcggcccgaggaggccggccctccggagagattttcaccgtcgatccggaatccatcgccgacgaagaaatctccactcaccgtatttcgctatccctccttgttcgctacctggaggaaagcgtcggggcgcgcgttctctttctcgggattgagcccgtctccacgtccctccacgccccgatttcggatccggtccgccgggccgtggacgcgctggcggcgtttttagagcaaacgctttaaactccctcccagggccgccggaaaagggcccctctcaacggcctgaatccggaaagttcataattttcaacacgatatccacagccccctatttttatgcgatatatcttattaacttaagtgattaaaaagaaatgatttcaaataaggatttgttttatcgaaaaaagatgcctaaaacggtggatatctcgttttactgccctggcgagtccgttatatcttcatcggcatcaagacatatttgctttccaggcctgtctctccgtccggctggagcagggccgcgctgttctcatccttgagctcgaaacggattttatccgtttcaacggctcctagaaaatcgaggaaatattgcgcgttgaacccgatctcaagtcctggccccttgtattcgacttcgatcttgtccctggcctcgccgatctccggattagaggaaaacaagcgcaaacgattcttttcgagggtgagtttgactcccttggaccgctcggccgagaataaagaaacccgcttcaccgcctcctcaaacatttttttattcagcgtcatgacatgcgggttttccttagggatgaccgcttcaaaattcgggaacttgctttcgatgatccggctgatcagcgtccgccttccacaacggaagaagagattattttcatccatatcgaattcaatctcgccgtctccgaacttcctgatttcattgagtgttttcttggcgatgatgacccgtatttcctttgaaatatccaaagaatccgttttacggaggacataggacatcctgtgcccatcggtgctgacaagttccaagcttttcggcttgataaccatcagggctccgttcaagtagtatctttgctcctgggcgatcgcgaaatagacccggtcgatcattccccggaaatcttccaccggcaatttgatcttcttttcgaatttcgcctcagccacttggggataatcgtccttcggcaggcaaaggactttaaattcgctctcgccggaagtcacctgcatcatcaaatcatcgtggttctctttaaaggaaacgctttgcccttccggcagggatttgacgatttcaaaaagcttttttcccgagacggtcacggtcccggtttcctccacttccgccggaaaatgggttttcatccccacttccaggtctgttccggtgatttccacctcggtctcggccacgttcataagaatattggccaagatcggcatcgtattccttttttcaacgatcccttgaaggatttggagctcttcgagaatgatttccttcgtcacgttgaatttcatgggttcaccttcccagatttcgatcgattatcaacattcttcattcttcttcttaagatctattcataagattaataaagaaaataaagaaaagcaatggaaatgtgcatcaccaggataaccccctgatattcctattggatatactggatcaacctgttgatttccctgtcgaattccttgtcgtctttcctcatcttttcgatttttttaatgctgtggatcacggtggtatggtgttttccaccgaatttctttccgatttcgggaagcgagctgggggtcagctccttggcgagatacatggccacttgacgaggaaaagcaacgaccggggaattgtttttggatttcaactcggccggcttgatcttgtattcatgacaaatgatcttctggatcttttccacagtgatgagccgggcttgggaatccagaagatccttcagcgcgtccttggccaagtcaagatcaatggattcccccttgagggaagcatacgccacaacccgccggagatatccctcaagctctcggatattggattggaccttgtcggcgatgaatagggcgacgctttcgggaagaaccaagccctcgatctcggcttttttcttaaggatggcgatccgggtttcgatatccgggaccttgatgtcggcgatcagtccccattcgaaccgggaccgaaaccgctcctccatcccttggatctcccggggcgagcaatcggaggagatgacgatctgtttttggctgtcatacaggtgattgaaggtgtggaaaaactcctccttggtccggtcctttccggccaaattatggatatcgtccatcaagaggatatcgaccgagcggtatttttcacgaaaatcgagaattttcccgaattggaggtgagtgatgacctcgttcatgaacttttctgtggtgacgtagacgatcttaacgccgggatcggcggccagggcggcgtggccgatggcgttcatcaagtgagtttttccgaggccggatccgccgtagatatagaggggattgtaaaccttggccgggttcttggcgaccgcgacggcggctgcgtgggcgaattgattactcgacccgacgacgaagctctcgaatgagtagttcggattgagattgggattgagaaggacgccataccggttccgccgctcctcgggcatcccccgcttgaacgtcagggaggcgtcgtcgaagatgtacttgatgtcgaacacgcggccgaacaggttctgggcgctctcgttgatgagcgttgagtaatggaacaggagccagtccttgaagtacgagtttgggaccttgacgtagagatcgtccttgtcctggccgatgaacgccgtgggctcgaaccatgtttcgaagctcttggcgtcgaccttgtcttgaaggaccaagagaatctcgttccagggattggtcttttcttccattgatgcgctcgcgggccgcctgatcgtcaaagcttccgttccgggaaccacggaaacgcccgcgccccacttccggtcgggaatgcccggtcatcatagcaccggccaaaacggatttcaaggggagcgcctcttgccgtttgtcttgcgggcggaaagccgccccggtataatcggcccatcctttcccgaggagaaaagaaatgggcgtgtggctcgaaggaaaacccccggccgaccgggtccgggaattcgtcaagagcgaggcccggcggcttcgcgaggccacgggcgcggttccagggctgacggccgtcctggtcggggacaacaagtcctccctgagctacgtccggaccaaggaaaaagcctgccaagcgctcggcctgaacgggagcgtcattcacctcccggccgagacgaccatggatgcgcttcacgaccggatccgggccttgaacgacgacgatgccgtcgacggcatcctcgtccagctccccctgccgccgcagctgcggaccaacgaggtgatcggttggatccgcccggacaaggacgtcgacggcatccacccggcaagcctcggcctgctgctccaaaaccagccggggctccggccgtgcacgccgatgggcgttttggagctgatcagggagacgggggcggcgatcgagggccgggacgcggtcatcatcgggcggagcctgatcgtcggcaagcccctggccgcccttctgaccaatgccaatgccacggtgacgatttgccacagcaagacccgggacctggccgggacggccgcccgggctgatattcttgtggcggcgatgggcaaggccgctttcgtcacccgcgagttcgtcaagcccggagccttggtcatcgacgtcggaaccagcgcggtgtccgacccggaaacggtccggacgctattcggcgacgatcccctccgggccaaggacttggccgataagggctacactttggtcggcgatgtcgatccccgggtcatcgacaaagccggctggctgaccccggttcccaagggcgtcgggcccttgaccatcgccatgctgatgaagaacaccttggaggccttcaagcttcgccgcaagctcgcctgagcggagggccccccggtcccgtccgacatccgctccggcccggttttaaggacacgcgcggggccggccgcccgcgattcgggacatcacgcaagggccgactgaaaaatctcccccaaagccccctcccgctgttttcaaatgcaaaggccggttcatccctccgcccgatcatcccccgcgccgccacgagccccctcttcaccttaatgcctatctcacaaggattggggcccttggctaaaccggacattttcactttgcttttacaaaccgatgcacgtggttgaaaccccggcccgtttatgttataaaagacaccctttaaataagttcgagagaatcatcatgccgaaaacatgcgacatttgcggtaaaggtcccgtctttggaaattccatcagccattcccataaggcttcatcgaaaaagtggaagccgaacctccagcgggtcaaggcccggacggaggccggggggaacaagtatatctggacctgcacccgctgcctgcgctccggaaaagtccaaaaagcggtctgaccggctcaagcgcggtccacggacacaacgccgtcgacgcgggcgatctccgtccggatcgcctccaagtgcccgatgttcctgaccttgagggtcatccggatctgggcgtttcggtcggcgtaagtcgccacttcggctttgacgatatccgcttcctggccggcgacgaccgccgtcacccgggcgagaactccgggccggtcgaccgccgagacgacaagcccggccttgtagacgaccggcttgaggtctccccaggagacctcgatgaggcggtccggcgacagcaattcattgacgatccggtggcagcggccggcatggacggtgatcccctttcccgtcgtgagatatccgatgatctgctcgccctggatcggggaacagcacttggccagccggacgaattcccgggtgcggtcctgcacctggatctcctcccggccgccggccggacgtttcctccggggctgaaggcccggccaaatccggtccatgattttccggttcaggacgatcttcccccggccgagaagggcgtagaaatattcgagcgaccggaggggcacggaaacggcctccttcagcccggccaacaagtcgtccccctcgggaaatccggccggcagccggtagcgggcggtttcccgttcccatagccttcggcccagggctacagcccgctggaaatcccgctggttgagacgacgcttaataagatgccgggcgcccgaggtgaaggccatcgacagccaattgcgggagggttcccggtcgggcgcggtgaggatctcgacgatatcgcccgttctcaggggcgtccgcaggggcgaggatttcccgttgattttcgccccggcggcgtgcaggccgatttccgtgtggatgcggaaagcgaaatccagggccgaggctccggcgggcagggggatcacccggcccctgggcgtaaagacgtacacttcctcggggatcaggttgattttcaactgcttgaggaattccttcgggtcgcgctgctccttgaagagctcgaccatttcccgcagccagtgcagccgccggtcttccttgaccagggcctgggcgtccttgtccttatagcgccagtgggcggcgatcccgttttcggccagggcgtgcatctcggccgtccggatttggatctcgaagctgctctggtcttcggtcaggatggtcgtgtggagagcctggtacaggttgggcttgggcatggcgatgaaatcgcggaagcggctggggatgggcggccagctttgatggatgaggccgaggatctggtagcagttccggaccgagtcggtgatgatccggagcgccagataatcatagacctggccgaaatcgatcttctgcgtcttcatcttctgccagacgctgtacggccgcttgatccggctctggatctcggccggaatccggctttcggcgattttccgcttcagcgtccgttgaaactcggccagggtccgctcggattttttacgccggggctcaagcagcgcggccatccggaagtattcctcgggttcgacatagcggaacgccaggtcttccagctcggccttgatccggcccatccccagccggtcggcgatgggcgcatagatctccatcgtttccgcggcgatcctcttctgggccgcttcgggaaggaatttcaacgtccggagattgtggagacggtccgccagcttgatgaagatgacccgcatgtcgtcggtcatggccaggatgattttccgaatcgtctcggcccgctggagttccggcgaggattcctggacccggctgattttcgtcacgccctccacgagagaggcgatgtccttgccgaacgtctcccggagctcttccgcggtgacgtccgtgtcctcgagaacgtcgtggaggaggccggcggtcagggcggtggcgtccaagttcatgtcggccaactgggcggtcacctcgagggggtggctgaggtaaggctcgcccgaacgccggacctgacccttgtgggcccgggcggaaaagaccgttgctttttgaaggagggcgatttccttctcgctgaagcgagtggaaaccttttccaggatatcgtcgatgcggatcatttccggacggatttttcccgggtcaaaatccagcccgcggcctccaggatgtcggcggccacggccgggagaggatccgtccccttttccagcagatcgcgggccccgcgcccgtagccggtcaggactaaaacgggtgtggctccgatcgcccgggcgaaccggatgtcgtccgctttatcgccgaccatgtaagaacgggccaggtccaaggatagatcggccgcggcttggagcccaaggccgggaaggggtttgcggcagcggcagtcgcggccgtaccggggatcccgggaggcggcgaaatgggggcaggaataaaaagcgtcgagacgggcgccggcggcggcgaaggctccggccaggcgggaatggatgtcagccagctcgtcctcggttaaataaccccggccgattccggattggttggtgacgacgacgaccgtcagcccggcttcgttcaagcgccgcacggcctcgaagctttgcgggaaaatcgccatctggtcgaagcggctggcgtagccggcgtcatcgacgatcgttccgtcgcgatccaggaaaacggccggccgtttcataaaaaactcccggccgcctcagccgcttcctcggccgggattcccgccaggcagcggtggtcataaggacaggcgcggtagagacagggccagcagacgacgtcctttttcaagatgatccggggctcgtggtacggagcggtgacggccggatcggtggggccgaagagggccacgacggggacccggaaggcattggccaggtgcatgggccccgagtcgttggtgacgaagacggcggccgcctggatgactccgaggagctcgcggagggtcgttttccccgtgaggtcggccgccgggcggccgaggccggcgcatatgatcgcggcggcggaacgatcggccgcggttccggtgacggcgatttcggctccatgacgttcctggaggattcgggccagggccgaaaagcgttccggcgcccagcgcttggccggaccgtaggcggcgcccgggctgagaacgatcaggggacggcgggggtccaatccggcctcggcaagaagatcccgcccgcgggcggcttcttcctccgtcacggagagacggatatcgggaagaggggccgggattcccagcccctccatcaggtccgtgtagtaccggaccatgtggacgggctcgtcgcttttccggatccggacccgccgggttaaaagagggccgcggccgtcgcgcgcgtatccccagcgctcgggaatccgggcgagggcgaacaccaaggccgaggcgaaggaatttgtcaaaagaagcccggcctcgaatcgctcgttcctcaactcggcggccgcccgccggaggctggatccccgggccgacggaccccggtggaacgagcgcgcctccgtttccggtccggaatagagatcgccgattccatccggggcgatgatcgaaatctcatcgtccggaaaatgccggcgcagggcggtcagggcggggaaggccatcagcgcatcgccgagccaattcggcgtccggacgacgattttcatgggccgggatttccgcctcttactccgcgccggcgaccggcttggcggcggattcggccgctttttcggccttttccttccgcccggtctttttctttccctcggccggggaggcgccctttttagcgtagtcgttgatgtagaatccggatcccttgaactgaatggctggagaggagatcagtttccggagaggccctccgcagtgagggcatttttggcaggggggatcggaaaccttctggatccgttcgatccgctgccggcatttctcgcaggcatattcataaatcggcatcggcgcatccttcgcgatgagatttaacccgttcattatagcaaagttcgagcggatgggaaaatttgacaattcgttccccttgggtaaaatagaaccgaagcttttctgcggaaggtatgttgttatgaacggcttttttaagacattcctcgggatcgtcgttcttttctcggtgtttttcctcgggttcaacctgggcaaggataaagagcggcgcaaaattcccgaattccagaagaactgattcttcgggaacgggggcgttccgcccgtccggcggcgcgggccgttcctttttttcgcccggccggcccgatcgggaccgggggctggctggaaagaggcggcaatgaacatcggcatgatcggcatcttcgtcattttcggcatcttcatcattctgcttgcggccaatccccgcctctcctgtttcgggagaaagctcaggtcgccgctctaccccctttatcggaagaagaagatggaggaggaggcccggcgtctgcgccaagcgaagctgcggaccttgaaaacggaggattacggattcaagctcgacgattccccgccggccgcggatgccggggcgccttcccgcccgtccgtttcggagggggccggaaagaacgccgcctcggccgaggactacgggctcaagctggattgaagatagacgagaaatcgtgaaggcccccgcctccttcccttccggatttcgtttccttctgggaaccgcgctggtcgtctggggcttggcggccgtggcctgtcgcccctcccgccccctcctccgaccgggcgaggacttgcgggagcttgagggatacgcctcgctccgcctgacccgcggggaagagtcatcccgctcgaaattcgccttcgccgttcttcttccgcaccgggcccggctggatatctttgacgccctcggccgggcggtttcgattttcctgatccggggcgaagacgcctatctcgccctgccctcggagcgcatatactggcgaggggggcgggatgaggtcatcgagaaattcctcggatttcccgtccgccccttggaaatggccggattgatttccgggcgatggagcgaaccgtcccaggaaggctggaaattggttcgtgatgcccggggacgggtcgtctcgggcgagcgcggcggtctgtcgttccgcgtcttggaattctcctccgggggaagcgacgtgccgcggcgctggacgttccgccacgccggaacggaagggaccgtcaccctgctggaggcggcctttgaccggtccgaaccggatttctccttggattttctccggacctgccgttccgtgacctggccggaaatcgagaagctcttccggtgaggattccttcgttcgccaaggtcaacctcgggctggagattctgggaaagcgcccggacggctaccatgacatccggacgctgtttcagtgggttgatttcttcgacctcttggagttgcggcctctcgacgggccggagatccggcttcgaggggacgatccttcaattccctgggacgagtccaatctcgttttcaaggcggccgttctccttcgggaggccggcggaagccgccgcggggcggaaattgtcgtggccaagagggttccggccggcggaggattcggcggcggaagctcgaacgcggccgctgttctcctgggactcaaccggctctgggagttggggctagaacccgccgatctcgaagccttggggcggaagttgggaatggacgtcccctattttttcaccggcggtctatgcctgggggaggagcggggagaccggctgacccccctgcccgatctgccggtccgttggctcgttctcgttcttcctcccttgaccgtgtcgacgcgcctgatttacgagtccttgcctccagcctccttgacttccgccgataaagccagtaaaattacgcagtttctcgggacccgggaactcggctccctgacgaatgcgctcgaagagacgatttttcgcttcttccctcagttgaacgagatcaaacgctttttgcgggatcagggcgcggttttatctctcgtcaccggttccggggcgggtgttttcggccttttcgagaaacgcgaggaggccgaaagatgccgggccgcgttggccggccgttgggacgccgtgacggcgtcgacgctgagccgggcccaaggatgggacgcaatcacgtctggggcgtcgccaagcggtaaggcagcgggctttggacccgcgattcgggggttcgaatcctcccgccccagctccggaaataaacgcgccgggcgcgcgacataaaaggatacgaccatgaagctgttcgccggttcatcgaatcccggcttggcccgggagatcgccgcctacctgcggatcgatctgggcacttgcgtcctggatcgcttctccgacggggaaatccatttctacatcgacgaaaacgtccggggcgaggatatcttcatccttcagagcggctccaacgaggccaatttcaacctcatggagctctttatcatgatcgatgccttcaagcgggcctcggccgaccggatcacggcggtcattccgtattacgggtacgcccgccaggattggaaggaccggccccgcgttccgatttcagcccgcctggtcgccgatctcctggagaccgcgggggccgaccggattctgaccatggacctgcattctccccagatccagggattcttctccgttcccgtggacaacctcaccgtggtcccggtcatggtcaagcatgtccaaagccgcggcctgaagaatatcaccatcgtctcgcccgacgccggcggggtcgggcgggccaagcatttcgcccggcgcctggacgccccgctggccatcatcgacaagcgccgcccggcccccaatgtcgcccaggttttcaacgtcatcggcgacgtcgtcggccaaacctgcgtccttttcgacgacatggtcgataccgccgggacgctgtgtctgagcgccgaggccctgaagaacgccggggcggccgaggttttggcctgctccacccatgccgtcctttccggcaaggccctggacaaaatcgagtcatcgcccattgaaacgctcatcgtgtctaataccatcgctccggagaagcgtcgggcttgtgccaagatcgagacgctgtccgtggctgagctcttcggcgaggctatccgccggatcaatgaaaaaagctccgtgagctcgctgttcgattaaggaggacgacttccatgaacctgacgatccccacccagccccgcgaggcgttcggcaagaacgcgtcctaccgcatccgacagaccggccggattccagccgttctttacggcgaaggccggcccagccaggcccttgtcgtggataagaaggacatcatccggattctcaagtctgaaaccggtctgaacaccctcttcaagattacgctcgaagacggagagcgcgacgtcatgatcaaggacgtccagatcaatcccttgacggacgaggtgattcacgccgatttgatccagatcgacatgaacaaggcgatccgggtcgaggttccgatcgagctcgtcggcgaagccgtcggcgtcaaggccgagggcggattcatcgacttcatgacccgcgccttgatgatcgagtgcctcccggcgatgatccccgaacacctgatcgtcgatgtctcgggactccgccttcaccagtcgatcaaggtctccgaagtcgtccttcccgagggcgtcaagctgatcacggaaccaggcgcggtcgtcgccttggtccaggtcccgcacgaggagaaggccgaagcggcgccggcggtcgaggaagaggtggaagcggcggcggcggcggcgccggccgagcccgaagtcatcaagaaggagcgggccgaaaagcccgagccggagaaatagagcgtgtgggcggtcgtgggcctggggaatccgggcttgcggtatgccgacacgcgtcacaacatcgggtacatgttggtgaagaaggcggccaaggcttgggaaatccgtttgagaaaacccaagttttcagccaggacgggcgaaggacggcgggcgggcgaacggatcgtcctggccctgccggagacgtatatgaacgagagcggccaggccgtcaaggcgctcctcgtcgggatggagatcccgacggagcgcctggtggtcgtcttcgacgacgtcgacctgccgcttggcgagatccgtgtccgccgcgagggcggccccggcacccaccgggggatggcctcgatcgccaggctgattgggacgtcgttcccgcggatccgcgtcggcatcgggcccgtgcccgagaacgtcgacatcacggatttcgtcctggagccgttccggaaagcggaaaagaagcttttggacggaagcctcgaccgggccatggacgccttggagcttgtcctggacggccggatcgatcaagcgatgaacagctataattagcgttcgttgaggaagcgaaaacttcctccttgctccccccgccgaagagggggatgctgtcaaaccaaaaggaggtttggatgaagcagtatgagacggggtttctcctcgccccgaatatgaccgaggaggaggctgagggcgtcgtccagggcctggccgaggtcgttcccctgaaaaacgggaagatgatccggatcgaaaagtggggcaaacgccggacggcctatcccatcgggaaggcccacgaggcgtattatgtgttcttccattacgagggcggagcggagatcccgctcgagctcagccggcggttccgccagatggacacggtcatccgccacctgacgctggtcaaagaaacgcggatgaacgtccggaagaagaaaaaagtccggaagaacgccccgtccgcggcggacgcggagacggcggccccggccgccgagcccaagcgcgaggaggcttgatcatggccgaagaaaaacggttcgaacgctcagaccggccggagaagccggcgtacaggaaattctttcctccgaaaaagaagttctgccggttctgccagcggaacgtcaagttcatcgattataaaaacgccgacatcctgaaaaagtacatccccgaccggggccggatttcgccccgccgggtgaccggcacgtgcgcttttcaccagcgcaaactggcggcggcggtgaagcgggccaggcacatggcccttctgccctacgtcaccgagtaagaccggaggtcccatgaaagtcatcctgaaacaagacgtggaaaacttgggccggaagggagacgtcgtcaacgtcgcgtccggctacggccgaaattacctcatcccccgcaagctcgccctcgaagtgacggcttccaacctcaagatgatcgaaatcgaaggggcggccttgaagaaaaaagccgaacaggagcgggcctccttccaggagacgattcagaagctcaaccaagtgaccctgtccttcacccgcaagaccacggagaaggatcacatcttcggctcggtcacggccgccgacatcaaggaggcgttggacgcgcagggcttcgccgtcgataagaagcggatcgtcctccccgagccgatcaaacagttgggttcccacaaggtgaccatcaaggtctatcacgacgacaaggccgagatccaagtggacgtcgtcgccgaggaagagccgccggcggaaacggaggctcccccggcggaagcctgaggccgccggcgggccggaaggcccgaaaggaggagcggtggatctggattcgctgtttctgaaacgaacgccgccccacagcccggaggcggaacgggcggtcctgggcgggatcctgatcaattcccgcaattacagcctcgttctctcgaccgtggccatcgaggatttctacaaggacgcccatcggaaaatcctggagacggtcggccggctcgtggaccgcggagtgccggtggagcttttggcggtcagcgaggagcttcgccgggaggggcggctggaggatgtgggcggcgcggcctacctgtcctctttgatggacggcgtgccccgcagctccaacgtcgaatactacgccaggatcatcaaggaaaaaagcctgctccggcggctcatcctttcctccgcccagatcatcgccgccagctacgaggaaaaggaggacgccgacgatctggtcaacgccgcccaggcggcgatgatcgacgtggccgaacagcgggaccgccggggcttcgtccccttgagccaggtgatcggaccgacgatggagcacgtccagaagctcgtggcgacccgagactcggtcaccggagtggacacgggcttctacgagctcaacaagctcacggccgggtttcacccgtccgagctcatcatcgtcgccgcccgcccctccatgggcaagaccgccttctgcctgaacatgactcagtatatcggccttcgggcggggaaagccgtgggctttttctcgatggagatgtcccaggagtcgctcctcatccggatgctctgcgccgacgcgaggatcgatctgcagcatgtccggtccggcttgatcagcgaccgggacctggaccgtctccgcttgagcgcggaaacgctcggcccctgcccgatttttctcgacgagacgcccgccctcaccctggcggagatgaaggccaaggcccggcggctgaagctggagggccttctggacatcgtcttcatcgactacatccagctgatgcgggccggggggcgttttgaaaaccgcaaccaggaaatgtcgttcatttcccgctcgctcaaggaattggccaaggagctggccatccccgtcgtcggcatctcccagctcagccgggccccggaaaaggcccgccgcgagcctcgccccatgctctcggacctgcgcgagtcgggggcgatcgagcaggacgccgacgtcgtcattttcatctaccgtccggagatgtacttcacacctgaagaaaaggcggttcaaacggagctccggggaatcggcgaagtgatcattgccaagcagcggaacggcccgacagggcagttcgaactggcctttcagaacaagttcgccaagttcgaaaacctcgaaacgtcccatcgcggcccggaggagtgaggattggccgcccctccgcgttcgatcatcgtccgtttcttcgagcagttgggggagctgtccctcctggccggccggaccttccggagcttttttcaaaagccctgggaggggaagatcttccttcagcaattggaggaaatcggcctccggacgcttcccgtcgtctccctgaccgcggccttcggcggcctcgtcttcgggctgcaaagctattacggatttcacaagtacatcggccaggggtcggaggcctacggcgggccgatcatcgccgtcgggctcgtccgagagctcattcccattctcgtcggcctgatggtcgccggacgggtcggctcctccatggccgccgagatcggaacgatgcggatcaccgagcagatcgacgccctcttcaccttgggggcggactcggtccgctacctggtcgctccgcgcacggcggccgctttcctgatgcttccctgcctgaccctgttcggcgacctcatcggcatcctttgcgccgaattctacaatgtcgtcctgatgggcgtgaacaagaccgtctactggcgcaacacggtcacgtacttggacctctgggacgtcggctcggggctggtcaaggcggccgtgttcggagtcctgatcgccatcatcggctgctggcagggcctggaaaccgagggcggggccgagggcgtcggccgggcgacgacccgggcggtggtcatcgcctcgatcatcatcctcatcagcaacttcttcctgagcgagcttcttccttccagcctatgatccgattcaacggcgtccacaaatccttcggcccgaagcgggtgctgaccggcctcgacctggaaatccggaccggggaaacgctggccgtcatcggccagagcggatcgggcaagagcgtcctgctgaaaatcctgatcggcatcctcgcccccgagcgggggaaagtctttgtcgacgatgtcgaagtgaccgccctgggacgggacgagcgccaggcgacggcccgcaagttcggcatgctcttccaggcggccgcccttttcgattcgctgaatgtcgccgagaacgtggccttcggcctgaggcgccggatgcgcctgagcgaacaggagatcgccggcctcgtcgccgacagcctggccaaggtcggcctgcggggaatcgagaagttgatgccccacgagctttccggcgggatgcgcaagcgcgtcggactcgcccgggccatcgcctaccggccggagatcattctgtacgacgagccgtccaccggcctggatccgatccgggccgacgcgatcaacgatctgatccttctcctgcagaaggaaatgggcgtgacctcgatcgttatcacccacgacatggtcagcgcctacaaagtcgccgaccggatcgccatgttatacggcggaaaaatcatcgccgtcggtccgcccgaagagatccgccattcgccggatccggtggtccagcagttcctccaggggcgggcggagggaccgatcaaggatttttaatggaggaaggcatgagccgaaaaacgcgagtcggccttttcgtcggagggacgctggccgtcatggctgttttcatcatgttgctcggcgacatcgggtacgtctttaaaaagaggggatacaccctcaatgtcgacgtgccgacggcggccggtctggacgccaaggcggtggtcaagatggccggggtcaagatcggcttcgtccgcgacatccagctctccggcgtccgggcccgggtcgtcatgaacatcgacaacggcgtgcgggttcccgtcgactcgacggccgccttctccacgctcgggctgcttggcgagaaatacgtcgagatcgatcccggcgaatcggcggagttttgcgctgacaacgcctccatcgccggctcccagaaacccggattcgaccaggtcggtgagatgctctcctcggtcggccgggagttgaaagccgtttcggcctccttgagcgacgtgcttaacgaggagaaccgggccaagttcaagcgggccttggagggagcggcgggagcggcggccgagctcgaaacgattctgaccgtcaaccggtccgaattcgagcggctgatccggggggccaacgagacggtcgacggcgtcggccggacggtggccgacgtctcggccgacttgaaaaaatcgttggccgtcctccaggagacgatcgccgagaaccgcgaaccactcaaggccgacttggaaaaaatcggcgaggccgcggccaagctccgggcgatcctggaaaaaatcgagaggggcgagggcacggccggaaagatcatccaggagcccggcctttatgacgaagcggccgaggtcctctcctcggccaggaaagccgccggcctcctttccggggttaagggatacgctgatttccagacggggtattatggaacaagccgtctcgtccgggcgggcctcgcggccgggatccggccggcgaacggctcgtttgtcgaggcggggatcgttcgggatccctgggccgggcggtttgtcttttccctccagggggggctccggctgggacggttcgccccgcggctgggattcatcgagaacgagctcggcttcggcctcgattatctcggcggcgatctttggggattgagccttgagggattcaatttcaaccgggaggaaagcccgcggttccggttgacggggaagatctttcccacgcggtcgctctacttggtcgccggggccgatgatttcactctggccgggcgccgggagtttttcttcggcctcgggctggctcttcgatgaagaacaaatccgtcttcgtctgccaagggtgcgggacgaaatcgccgaaatggatgggccgttgcccggcctgcggcgagtggaacaccatggtcgaggaagcggaggtcgaggaggccccgctggtcgagcaggccttcgctccggccgaaccgattccctatcaggacgtcaagaacctggccaagccccgggctcgggttgaaatcaaggaagtcgacgcggttttgggcggcggggtggtcctgggatccctggttttgatcgggggcgagcccggtatcggcaagtcgacgctgctgcttcagatgtcccgggatttcgcggccggtcgaacgccggtcctctatgtctccggcgaggaatcgctggaccagatcaagctccggggcgagcgtttgggcgtcggcggcgggcctctttttcttttggccgaaacgaacctggagcggattctggctcaggccgagaagcttcgccccggcgtcctcgtcctcgattccgtccagaccgtcttttcctccaagctgtcctccagccccggaacgatcagccaggtccgcgaggttgccaaccaggtgttccgattcgccaagcgcaacggcgttcccgcctttctcatcggccacatcaccaaggaaggatcgctggccgggcccaaatcgctggagcacatcgtcgatgtcgtccttctgttcgagggggagcgcgaccacagccaccgggtgctccgggccctgaaaaaccggttcgggccggtctcggagctggccatcttcgagatgacggcggccggcctggaagcgattcccgatccctcggctttcttcctcagggaaaggccgaagaacgagtcggggagcgtggtggtcgcgaccatcaaggggacgcgccccctgctcatcgagatccaatcgcttgtttcgccgacgctgtttgcctccaatccgcgccggatgacggtcggtctcgaccactaccggacgtcgatgctcctggccgtcatcgagcgaaagctgggttacacgttcgggacggaggatatttatttgaacgcggccgggggaatggagatcggcgagccggcggccgacttgggcgtcgtcctgggaatcgtctcctgcctgatgaaccgacccgttccggccgggctggcggttttcggagaggtcgggctcagcggggaaatccggtcggtcggccaggccgcggcccgggtccgggaagccgcggccctgggattcgggacgatccttctgcccgagggaaacgtcgccggcctggccaaagagaaaatcgacggggtccggctgctgggagccgggacgctgaggcgggcggtcgacctcgttttctgatatgatagagcctccttgcgagggatcttccactgaaagaggatgcggtcatgggcatttttctttttcggattttcttcgtcgctgtgaccgccgcggccggatacttcgttccgcccttcgggctcgaccggattccggcggccgccgtcgccgggtttctggccgcggcgaccctgtttctcgagtcgcgcgtccgccgggcgtccttcacggtcatttggggctcggtcgtcggaaccctggtcggcgtcatcctaggctggatcctcggggcggcttaccaatccatgacctccgatccggggacggccgccttcgtccgggtcatgtttctccttcttttgccggcggccggcttcttgatcgggatccggaaatcggaatggctcgatccgtcgtatttgttccgctttttccgtgaaaaaaacaacggccggatctttaaaatcctggacacaagcgtcatcatcgacggccggatcgccgagatctgcgaagccggtttcctcgaggggacgctggtcgtgccccagttcgtcctcaaggagctgcagatggtggctgattccccggacgggctcaagcggcagcggggccgccgcggcctggacatcctcgatcatctgcaaaaatccaagacggccaacgtcatgatcaccgagatggattttccggaaatccgcgaagtcgacacgaagctgatcgaggtggcctgccgcctcgagggcaagatcgtgaccaacgacgtcaacctgaacaaggtcgccaggcttcgcggcgtggccgtcctcaacatcaacgaaatggccaacgccatcaagcccgtcgtgctccccggcgaatccatgatggtctatctcatcaaggaaggaaaggaaaaggaccagggcgtggcgtacctggatgacgggacgatggtcgtcgtcgacaacgcccgccggatgatcggccgcaacgtcgacatcatggtcacctccgtcctccaaacgacggtgggcaaaatgatcttcggccggtacaacgacgaggcgaaatgaagaggacggccgccgtgatcgtcgccgccgggtccggggcgcggttcggcgggcccaagcagttcgccctcctgggcggccggcccctggtcgagtggagctgcgcggccttccaggcccatccccgcgtcgaggacattatccttgttctgccggagacggccgcgggggcggaatatctccggcgctttcccaagatccgggccgtcgcggccggcggcccgcgccgccaggattcagtcgcggccggcgtttcccggctggatgagcggcggacgggagtcatcctcgtccacgacggggcccgtcccctggtctcggccggcctgatcgaccgggtgatcgaggccgcggaaaaacgaggagcggctgtgccggcggtcccttgccgggataccctgaaggaaatcgacggcggccgcgtcgtccggaccctcgaccgcggacgcctgggacgcgttcaaacaccccagggcttcgcctcggctctcctccggcgggccctggccgcggcctcggccgaggggatttcgggcaccgacgaggcggcgctcgtcgagcggctgggggaagaagtggccgttgtttccggggatccggaaaacatcaagatcacgacgcccttggatttgatcgcggcggaggcgatccggcatgagaatcggattgggatatgacctccaccggctgaccgccggccggccgctctatctcggaggcctccggatacctcactcccggggccttctcgggcattcggacggcgacgtgatcatccatgccgtgatcgacgccttgctcggagcgggcggcgagggcgatatcgggcggctgttccccgataccgatcccggcctgaaaaacgtccgaagcacggaattgctccgggacgtcgtctcgcgcctgcggcggaagcggcttcggatcgtccatgtcgatgccgtcgtcgtggccgagtcgccgaagctgggtccttactttgaaaagatgaaagacgtcctggcccctctcctcggccttccccgggaccggcttgggctgaaggccaagaccaacgagggtctcggcgagatcggccgcggccgggccatcgcctgttgggcggcggcttcgctgcggcccgtctccgggcggaagccgaaagagtaaagcccgttccgggaagaaacaccccccgccggcgtccaagaggggaggaaaaaccatgagaaaaaacgttttcattgtttgcgtcgttttgttctcgagcctggcggcgtcggcggcgttcgacctcggcggcagctgggagttgacgacggtgacgccgaggggcgaacgggtgtcgatcgtcgtcttcgtccaggagggcgaacgcctgaccgtcacggtcaaacggccgggccgggacggccgcctggtggaaatgacgtccgaagggacgtttaagggagaaaccatcgaatggaaggaaacccggcggggtccggagggacgggaaatgaccgttgcctataaagggaccgtcgccgccgacggcagcctgaaaggcacgatggagttcagcgggggccgcggcttcgccggcggggaaggcgcgcctccggtgttcgagtggaaagccgtccgcaaagcgtcgtgaagccgggcgttcccgtcggatcgcgccttccggatgaataggtccgccggatcccgtttttgctataatggggcggatttgcgcgccgccgccgtcttcccggacggggaaggaagacgcgggcggaggatgcggccggtctatgcccccggggaagaattccccccgccttcgcgtctaatggatgacggaggcaaacgagcgtgaacacggatggacgaaaagacgctggtcgagctgtcccggaacggacggacggacgccttcgaaaagctggtgcgcatgtatgaccggaaaattttcgccctggcctacggcttcgtccgggacagggccacggccgacgacctggcccaggagatcttcctcaaggcctaccaatcgctgccgtcgttccgcgtcgaatcgggattcggcacctggatttaccggatcgcggtcaatcacgtcaaggatcacctccggaaagcttcgcgacgccggactgtttccctcgacgatgtcggcgacggcccggtttccgtcgacgaagaaaccggcctccgtctccgcgaacgcgaggaggaagaacggcggaaagaggttttccgggtcatggaaacactgccgccgaaattccgggcgattctcaccctccgggacgtggaggggcttccctatgaggaagtcggccggattctcgggatcgccccgggaacggtcgattcccgccttttccgcgcccggagaatgcttcgaaagaaaatggagccctatcttgaagccgaaggaggaaggccatgagctgccgccgggtggagcgttgtcttctcgcggcctttgaccgggatctttccgcgccggaccgccggtcgatggagcggcacctggcggagtgtccggcttgccggaaacgggccgaggcccacgccgagatccgccggcggctttccggctcggctgttcccgagccgcttccccgcttctgggaacgtcttgaatcccggatgacggcctcaggccccgccctgcccgcggcttgggcccgcttgtgggccgaggcgatcccgatttccctgtccttgatcgccgggttcgtcctcgccaccttgttcttgttcccttcctcgcggtcctccgacctgtccggctcggaagccctgctcctgaccgagggaaatccgatcgcggaaacccgggcgatcatcgaggaaggccgccgggacgtgcgcgacctgacggtgctgttcgccgccgatgaacagcccgccggaaagagatgaaggccatgaaacaaacgcgttggggaatcgttctttcactggggctggcgtttgccgcgggcgcggcggccggcatgttcatcgaccgcgtctttttctttccccgggggcatcaccgccccggcccgtcgccggaccagtgggagaaggacctcggcctctccggggagcaaaaagcccggatggaagagatcttcaagaaaaatgacgcgcggatcgacgccctgcggtccgatttctataagcatttgggagagatccgggccgagatccggaaggaaattgataccgtcctgaccccggaacaaaaagccaagcaaagcgccatgatggaaaaattccgcaagtcgcggagcaaggattccggttcccggccgtccggcccgggccggcccccggacggcggcttctcgaaggagaacaaagatgaaaaagaaagtgctggcgggagcggtgattctagccgctatcgccgtcctgattatcggcatttcctttattaagaaaggcaagaacaatgcgctcccgtaccggacggaagccctgacccggggcgacatcgagtccctggtcgtcacctctggtaccgtcaatcccgtcgacatcgtcgaaatcgggagccaagtttcgggcaagatcgtccagcttcacgccgatttcaattccgtcgtcacggccggccaagtcgtggccgaaatcgaccaggagattctgaaggccaaagtccagcagaacgaagccagctacttgagccgccaggcgtcccttgaacaggcgaaggtcaacctcgaaaacgccaggaaaaaatgggagcggactcaggatttgttcgaccgccagctcgtctctcacgaggagcgggagaccgtcgaggccaattatgtcacggccaaggtgaatctccaggtcgctgaggcgagcttggcccagcagaaatcagccctcgattccagccgggtcgacctgtcctatgccatcatccgctctcccatcgatggaacggtcatcacccggaacgtcaacatcggtcagacggtggccgccggtttccaaacgcccatcctctttaaagtggccagcgacctgaccaagatgcaggttgaatgccccgtggacgaggccgacatcggccgggtgaaggaaggccaagcggtccggttttcggtggacgccttccaaggcgaagtcttcaccggcgagatccagcaggtccgcaattcgccgacgaccactaacaacgtcgtcacgtacacgacgatcatcaagaccagcaatccggacttgaagctgaagccggggatgaccgcgaccgtctcgatcatcaccggggaagcccggggaacggtcaagattccgcgggccgccctgaaattcacgccctccctgtccgaggaagagatgaaaaaaatgtgggaagaggcgagggccaagcgggaagctctgcggggatccgggccccggcccgaaggctccggcccgcgcccgacggggccggtcaccgaagagatgcgcaagcaattcgcggccgcccgcagccgcgacggcttcggccaggtctgggttctcgaggaatctggaaaaatccgtcccgttcccgtccgcaccggcatcacggataatacctacgcggccttgctgaacggcgacttaagcgaagggatgaaagtgatcctggggacgggaggtgccgcggcctcgacccaggcgcagggttccgcgatgggcggcatgatgatgatgggaccgccccgccgctgagaacgaaggcaccggcgatcatgaacgcagacatcattcggctggagaacatcaccaagacgtatatcgtcggggaaaccgaggtccgggctctccgcggagtgagcaacattatcccgaccggggatttcgtggcgatcatgggggcctcgggctcgggtaaatcgaccctgatgaacattatcggctgcctcgacaagccgaccagcggccgctatttcctggacggggaggatatctccaccctgagccgcgacgctctggccggcatccgcaaccgcaagatcggttttgttttccagtccttcaaccttctgcctaggacgaccgccctggaaaacgtggagctgcccctgatttacgccaatgtctcccataaggaacggctggcccgggcccgggcgtcgctggcggccgtgggcctcaagggccgggaagcccacaagaccaatcagctctccggcggtgagcagcagcgggtcgccatcgcccgggcgctcctcaacaagccccggctgattttggccgacgagccgacgggcaacttggattcaaaaacgagcgacgagatcatgaacgtcttcgagcggctcaaccatgaagacggcatcagcatcgtcatggtgacccacgagccggacatcggcgcccgggccaagcgccgcctccatatgaaggacggccttgtcgtccgggaagactgaccaaggagcacgggaatgaacgtctttcggatattgcgcgtttcgctccgggccctggcccggaacaagatgcggacgtttctcacttgcctgggcatcatcatcggcgtggccgcggtcatcgccatggtcagcatcggagccggggcccgggcggccgttgaatcgcagttcgcgtccatggggacgaacctgatgttcgtcaccggcaactggcggatgatgggcggcgcccggacccagaccggccaattcaaccgcttgacagccgaggacgccaaggccatcgggcagctgccctcggtcgaggccgtctcccccagcgtctcgacccgggcccagctcatttatggaaacaacaattggaacacgatggtccaaggaaccggagagagctatcccctcgtccgcaagtgggatatcgaggacggcgctttcttcgacgagagcatggtccgcggagcggccaaggtctgcgtcatcggggccgacatcaagaaaaacctcttcgaggaggacgaggacgccgtcggcaagaccattcgcatttcccgggtgccctttttgattctcggggttttcaagtccaagggggaatcggggggcttcggcagccgggacgactttgtctgcgttccgtatacgacggccctcaaccgcctctcccgctcggagtatctccagtccatcgacgtgtcggcggtttcccaggcgaaaacgaaggaggcccaggacgaaatcaccgagcttttgcgcatccgccaccggattcccgacggcgggaccgatgatttcgtcgtccggaacatgtccgaggtggccgagggcgcggccgaagcgaccgggatcctgacgatcctgctcggctccatcgcctccatctcgctgctcgtcggcggcatcgggatcatgaacatcatgctggtttcggtgaccgaacgcatccgggagatcggcatccggatgtccatcggggcccggccgcgggacatccttctccagttcctggcggaagcgatcgtcctgagcctcgccggcggacttctggggatcatcctggggatcggcgtctccaaggtccttaaatacatccccgttttcgcctccatcacgaccatggtatcctggtcatcggtcctcctggcgttcgccttttccggatcggtcggcattttcttcggattttatccggcccggaaggcgtccaagcttgacccgatcgaggccctgcggtacgaataagggttgaaacgaccaaaggagaaagaagatgcatatcccgcgacggatcgccgttcccgcggccttgatcctcctcgctgcgacggcgggggcccaggaaacgacccgatccctctctctgaccctggaggaatgcctcgtccgggccctccggaacaacctctccatccaggtggccgtcttgacgccccagggctccgccttgtccgtccaaaaggcccgggaaaagtttctccccaatttcagcttcggcttgacgaagaggaactcgagcagtccctcgttttcctggctggaatcccaggacgagaccttgacgaaatacgggaactattccgcccagatcaccgaagtcatccccttgggcgggacggtgaccctcggcgtgtcgtcggccatgacggacaccaaccagaccggaacgacgattaatccgcggtacaacagccagctccagctctccttctcccagcccctgttgcggaatttcgggctgaagatgacccagatggagatcgtcatcgcccggaacaacctggatgtctccgagatccagcttcataaaaccatccaagatacgatcttcagcgtcatccagtcctattggaatctcgtgtacagcatcgaaaacctcaaggtccagcgcaagtcgctcgagctggcccgggatttcctggcgaaaaaccagcggtcggtggaaatcggcacgctggcgcccatggacatcctggccgccgaaagcgaagtcgccacgagggaagcgggcattctagcggccgaggcggcggtcaaggccaacgaagaccagatgaaaaacctcctcaatttcaccccggaagaggaacaggggctccgggagatcgtcgccctggattccccccgtttcgaggaacggctgatcgaggtggatgaagccctggccgtggccatggagaaaagaccggatctccggatctcccggatcaacctcaaaacccagaacctcaacctcgattatgcccgcaaccagctcctccccgccctgagcttcaacgcgtcctatgccagtccgggcgtctccgggacgcggctgatttacgacagcgagtatttcggcgacatcatcggaaccatccccggttaccggtcggaatcctggaatgacgtcttcggattcagatatgagaattggagcgtcgccttgaccctggacatcggcttgaacacggtcctgtcccgggcggcttacgcccaggccgagttggccacgcagacggccggcgtgggtctgaaaaacaccgagcgggccgccgtcctggaaatccgcaacgccgtccggaccgtccagacggccttcaagcaagtccaggcctacaagatcgcccgcgacttggccgaaaagaagctcgccgccgaggaggagaagcttcgcctcggcttgagcaccaattacacggtccttcagtatcagcgcgatttgacgaccgcccaagtccaggaattgaagtcggtcatcgactacaacatcgccctggccgacttggatcggtcgatgggaacgctcctggagaatcgaaatatccggattgccgacgcgcttggcggcggatcttattaagaccgcgttcccggcgctttgtgatcgaggagacgtcgcgccggatgccgggcaggccggccatggcgaggcttcgcttcgacggccggatggtcatccgttatgaaggacggggcctgggcttccgggaggtcgccgagcggccccagcgcgttcaggccgtcctggtgatccggccgaagccgcccgagttcatcccgcctccaactcgctggtggaaggtctatcgggggcccgcggagaccgaagatctcagatgaagagaaaagcggaaagattcacgttgccttgagatcggccgcccgcgtcttgacccccgaagggggcgaagtttatcatagggccgtgagatcccgacgaaagacagagaggcggcggattgttttttgcctggccgccgttgttttgcaatttcttttttcggcggccgccgcccttccgggaatcgtcttttgccatcggcccggcgggcggatcgccgcggaattttccggtccgtccggcgcctgtctctgcgacgagtgcgagcattgtctcgagcacctcgccgcggcggccgccggtctttccccaaacggcccggtcatcgatgcctgccactgcgttcatgagccgtttcggagtcaggccgaccgagccgtcttgaaacgggacgaagggagaacgcttcccggcccggaggcgatccgccttcatgcgccggccctcttcccgctttcggtccgcctccggtccttcgcttcttctctcgatcctcggccggacgccggcgtcttgcctcccggcgcccaggccttacgctgttagatccttcccccgccggaggacgccgaacgtcccccggagcccgccgtcggcggtcaacgcggtttatctccacatccgccgtccctccgtttccccggccgccctggaggcggctttcccgttgaggagtcagtctcatgagccgtatctttcgccctctcaaaaaccggcgtcgagccgccgtcctgtccctcggccttgccttcgccgccgccttggccgccgcggccgcggccggccgcgacgaagccgaggagctgtccctggccggagccgtcgagctcgccctggccgggcatcccgaaatcctcctggtccgcgaggaagccaaggcggccgccgcccgccgcaggcaggcggaagcccgccccgatccgcggctgacgttcgggacggccggcatcccctggacgctcaaagccggagaagtcgaaaccgaatatgccctcggcgtggagcgggaattcgaatatcccggactccgggccgcccgggtcgaaatcgcccggagagacgaggaagccgcctccctggagatcgagcggaccgggctcctgttggccgcccgggtcaagaaggcttatcaccaggccgtcttcgccgaggaaacgcggatcgccttggaatctctcggcgcggtaatcgaccgtttgacggacgctctcttggtccggtttgaaagcggggaagcggcctatgccgacgtcctccgggcgaaggtcgagaaagcccggctgcaaaaccggctgattgaagcccgaagagacgagtcctccgcccggaccgggcttcttctctttctcggcttttccccggacaagccggtccggctgacggatcgcctggctgttccgcctctggaggcttcgctcgatcgcgtcctggccgaggctgggaaacaccgtccctcgctccggctcgcccgattgcgccggtcccgggccgaggcggaagtccggatggcttctctggccgctaagcccggcttcgaggccggtctgttcgtccccagcaaaaatatcaagggctggggtttttcccttgggatcagcctgccgcttttctcctcccggacggggggccttcaagcggaagcggccgccgcccgggaaaaaagcctgatcgaaaccgtcgccgtggagaggcggctcaacattttggtgagggcggcttaccgggaggcgcgggccgcggaggagcaggtcgaggtcttcgaaaagaggctcctgggcgaaatcgaggcggagattgaaaacggattgactcagtactgcctgggacggatcgaggcgtacgcgcttctcgatcttttccgctcgctggccgaggcgcgcctcgagcatctccaggcccggtttttgtatgccgtcgccctggccggaatggatgcggccggcgaggacggcgagtgaggggaggaagatcatgaatcgaacgaaaatcacgacgatcctggcgctggccgcggccatcgcggtttttccggcctgccgccggagtctcctgccggaacacgccggacacgacgcccaagagaacggccgcgttccggctggaacggtgattctctcgatcgcggccgcggctgacggaggaatctccgcggcccgagtggaaacggccgtcttggccggccggatctccgttccgggagagctcgaattcaatgcccgccgcctggccgaggtctcggcccgggtcgagggccggattgaaaaagcggccgccgtcgccggagaccgcgtcgtcccgggccagatcctggctgaaatctacagccgggaattcttggccgcgcaggcggaagtccttcaggccgcggcccgggccgcccgccttcgggacggcccggaaggtcaggcggccgaggccttcctccgggcggcccgccgcaagctcctccccctgggctggggcgacgaggagatcgacgccttgcttgaggccggagagccggttccttttctctccgtccgggcgccgttggccggaacggtcatcgaggcgccggcgttggccggcgcgcatgtcgagccgggcgatccgctgttcaagctggccgacccggaaagtctctgggcgcgcgttcacgttttcgagaaagacctggccgccgtccgcccgggatcttcggccgttctccggacccaggctttccccggccgcgaattcccgggccggctcgttctcctcggaccggtcatggatgaaaaaaccaggaccgtggaggggcggatcgaagtcggaaacgccgatggatgcctgagggcggggatgtatgtcgaagccgcgctcgcctccgggagagaaagaacggccgtcgtcgttccggcctcggccttgcaggagttccaatccctccccgtcgtcttcgtccgggagggagagacgacgttccggctccggccggtggaaatcggggaccgggagggcggcttggtcgagatcgtcggaggcgtttccgccggagaatgggtcgtgacgaccggcggcttcctgctcaaatccgagcttctgaaatccagcctggcggatgaacatggacacgattgaacgactgatcagccgctcgctccgcaacaggctgctcgtcctgatcggcgtcgccttgctcgtcggcttcggaatctggtcgttcctcaagattccgctcgacgcctttccggacgtcactaacatccaggtcgaagtcttgtcctcggccccgggcttgtctccgctggaagtcgaaaaattcgtcacctttccggtcgaaacgacccttcaaggcctgccccgcctgacccagctccgctccgtttccaagttcgggctttcggtgatcacggtcgtcttcgaggacggtgtcgacatctatttcgcccgccagcttgtcctggagcggctgatcgaagcccgggagcgcgttccccaagggattgaaatcaccatggggccggtctccacggccatgggagaaatctaccagtacacgctcgagggccccgtccccgaaggggaggacgaggaagcccgggcggagcgcctgaccgagcttcggacggtccaggattggatcctggcccccctgctcaagtccgttcccggcgtcagtgagattaactcgttcggcgggcacatccgccagtatgaggtcaccgtcgatcccgaccgcctcctgaagtacggcctgacggttgccgacgcggccgccgccttggagaggaacaatctcaacgtcggcgggagcgtcttggaggatgccgccggacaggccctggtccggggcgtcggcctgctgcggtcggcgtccgacatggagcggatcgtcctcaaatccgaggccgggacgcccgtctttctcggcgacgtggcggccgccggaaagagccgggccgtgcggcagggggcggcggtcaaggacggaaagggggaagccgtcggcggcgtcgtcatgatgcttcgcggagccaacggccgcgaagtcgtccgggcggtggaagcccgggtggccgaagtcaacgccggcgcggtgctcccgtccggcctccagatcgttcctttctacaagcgctcggacatcgtccaagccagcctccacaccgtcagcgaggccttgatcatcgggggaatcttcgttctcctggtcctgtacctgttcctccggagcttccggggggcgttcatcgtcatcctggccctgccgctctcggttctgttcacgttcatcgccatgcgcctgggcgggctatcggccaacctgatgtcgctcggcggcctggccatcagcatcgggatgatcatcgacgcgacgatcatccaggtcgaaaacgtccagaggcatctttctgaaagcggacccggaaggaccaagaccgagacggtcctctcggcggttctcgaggtccgcaagccgagcattttcggcgagctcatcatcgccctgaccttcatcccgatcttcgccctccagggcatcgagggaaagatgttcgcccccctggccttcactcatgtgatcgccctctgcgcgtctctttgcctgtcgctcttggtcatcccggcgttctgccgtcttcttctcaaaccccagggcgaaaagcggatcttcctggttgaagccgcccggaaagcttatcttcccctcctccgctggagcctggatcacaagaaaacggtcttcgccgtttccctcggcttgctggccgcgtcggccgttctgatcccgcgcttgggaacggaattcatgccgatcatggacgaaggggcgttcgacatggatgtccaattcgctcccgggatctcgctgccccaatccctggccatgaatcggaaggtcgaggagaagctcatctcctttccggaaatcgagaccgtggtgggaaagaccggccagaccggcatcgccctggaagcccggggcgtggaaaagaccggatatgtcggcattctcaagccccgacggcaatggacctcggcccgctcccgcggcgagctgacggaaaaaatgcgggaggccgtatcgaccatccccggaatggccttttccttcagccagccgatcgcctgccggatcgacgagctggtcgccggcacccgggcccagctcatcatcaagctcttcggcgaggacctcgacactctgacggccaaggccggcgagatcgcggccgctttgagacgactgcggggggcttcagatctggttgtggaaagcgtggccgggcagccgtatctttccgtcctgcccgaccgggagaggatcgccaggtacggactttcggtcgaggatgtccagacgctcgtcgaaacggccgtcggcggccgaacggtcacccggatttacgaaggggagcgggcggtggatgtccaactccggtatgcggagaaacggcgcggctcggccgaggcgatcggcgctcttcccttgcggacggaacggggagagatcgtccccctcagccaggcggcggcgatcgtccgctcggaagggccttcccagatcagccgcgaagcgggccggcggcggatcgggatcgaatgcaacatcagcggccgggatctcggcggattcgtggccgaagcccggcgggaggtcgcccgctcggtctctcttcctgcgggttactttttatcgtggggcggccagttcgaaaaccagcaaagggcgatgcgccggctgggcgtcattctcccggtcaccgtcgggctcatccttctgctgctctttttgactttcaacgccctgcgtccggccctgctcgttttattcaatctgccgttcgccctgatcggaggcgttctgtccctgtatctgtccggcctgtatctctccgttccggcctcggtcggcttcatcgccctcttcggcatcgccgtcctcaacggcatcgttcttctctcggccgtcgcccagcggagggaggaggggcttgcggcgcgggaggcgattctccagggatgcctcaaccggctccggccggtcctgatgacggcgacgatcacgatctgcagcctcttgcctcttcttttcgcccaaggcccgggatcggaaatccagcggccgctggccgtcgtcgttgtcggcggtctggcgacttcgacgctgatgacccttctcgtgctcccggctctcgaggcggctttcggtgaggatcggatgcggcggggaggcaggggccgccggccttgtccggaaccggccgacgggttatgataaaaccatgaaagacagggccgggcggggagcgatcttggtctcggctgtgcttcttttgatgagctgcgcgccgccgggccgaggggtcattgttttttgcgcgggggacagtctcacgaaggcggcctatcccgatttccttaggcgggaattgaaccgggacgggatcgcggcccgcgttctgaattacggccggagcggctacacctcgggcgaatacctgaaattcctcgtcaagttcaggccgaagctcatcgaggaaaaaccggacgtcgttcttcttcagctcgggacgaatgatgtccggatcgaccatgacgccacgccgacggatgcgttcaaggaaaacatgaggcaaatcctggcggtgttccgaaccttccggagccggtcggggaaaatccctttgatcctgatggccacgattcccgatattccggagactccgcccaattttgacgcctcctcagcccgccgggtccgggcggagatcaacccggccatccgggaaatcgccgcggccgaagggatcgcggtcgtcgatcaacacgccgtttttctccgccggcccgaccttctgcccgaagtccatccggtccgggaaggctaccgcctgatggccgaagtctggcgggaggccctccgcccgcgctattgacgcggggggagctcggccttggaggagaatgtcaccggggcgggattacggggtcataatccggccggctcggaggagaagggatgcttgttcaaaaagggcgctattcagctgctttatgatgagggccgcgcgtttcgccggcggggcggccggcgtttgatcctttcggccggtttgtgataaaataaatccaaacgattttctgaaatattccgacgccacgccagggaatacggagacttctcatgaacagacgcctgatccggccgcatttaaatgaaatcaaggagaacctgaaaggccaggagacgccggtgccccaccacggacggccgtcttccgccggccactcaggccatgcgtcttcgcgcggaccctatgcttcccagacgcagtcccagccgaagaaaatgtacccgccgacggacaccggcgccgagaactactactatctcaagcagatgggaaaaaagacgccgatggccgtcgtttttcaagacggcgaaatcctcgagggctacgtcgaatggtacgaccgcaactgcatcaagctcaaccgaaacggcgcgccgaatctgctcgtctataagaacgccatcaagtacttgtacaagctcggcgaaggcaaggaatcccccgaagaggacggcgagcccgaaagaaaatgacctttccccggatcgggatctcgattggagatcccgcagggatcggcccggaagtgacgctccgggcgctgttcttttccggggcgcttccccccgctcggtacgttcttttcgggccgcgttcttttttggaaaaagaagcggcggctttcggcctgtccacggagatcccttcctggaaaacggacgaatcatgcgccggcgcgggcgtttatctccgggatctgccaggaccgcgcgagccggtcaagaaaggcgagcccggcgcttccgcgggccgggcgtcgtttgcctggtttgaggaggcggcggcggccgcccgccgcggagagatggacgctctcgtcaccgcgcccgtggccaaggtcggctggaatttggccggaatcccttggcgcggccataccgaatacttggaatccttttttcccgacgcggtgatgagcttctggtcggagaagctgaccgtcgctcttctcagccatcatcttcccctccgggacgcgctggcccgggtgaaccggccggccctggcccgcctgttccgcatcctgagggaatgtcctccggcccgggcggagggcccggcttttgaaatcctggtcgccggactcaatccgcacgccggcgagggggggattctcggaacggaggagagggacgtcatcgccccggccgtcgccgaagcccgggcggcggggacccccgtgcggggtccgttccctccggacgtcgttttccgcctggccctcggccgtccggaaaagatcgtggccgcgctctaccatgaccaggggctcatccctttcaagatgatcgcctttgaaacgggaatcaacgtcaccctcggcctgccgttcatccggacgtcgccggatcacggaaccgccttcgacatcgccggccgaacgccggccgatccggccagcatgaccgaggcgctccggcgggccgcgcgttcagcgtccgcctgacttgagggccgcccggatctggcggttgatgtcgcgctccttgagggcttcctttttttcgtggattttcttgcccttgccgagggcgatttcgatcttaacgagacccttgtcgttgagcatgacttgaagcgggatcaacgtcagcccgcgttcctgaaccttgccggtcaagcgcttgatctcgcggcgatggaggagaagcttgcggacgcggcgggggtcgtggttccagcggttggcggcttcgtagggatggatgtggcagtcgacgaggacgacttctccgtcgcggatgtcggcgaagctctccttcaagctgatccgtccttcgcggacggatttcacctcgctgccctggagcacgaggccggcctcgaacgtctccaagatctcgtagttgaaccgggcggcccggttgacggcgaggactttcatgtttcgacccggatctggctgatgtgccgcttgttcatcttgacgacgatgaagcggcggccgttgtggagaagaacgtccttctcccggggaatgcgtccgaattcctggagaaagaatccggccaaggtcgtgtattcggagctttccggaaggccccagcccagcgttttgttgatgtcgttgatcccggccgagcccttgaccaggacagccccgtcctccaggggcgcgtgccaatcctcctcacggtcgtcgtactcgtcccggatttctccgacgatctcctccatgatgtcttcgatcgtcaccaagccttccatgttcccgaattcatccacgaggaaggccatctgaacgccctcgtcctgcatttgaagaaggactttttcgatcggggcggactcagggaggaaaaagggaggtcggagcacggccccaagatcaaagggccggtcgtgagccaggtagccgatcaggtccttggtgtagatcaagccttcgatgtgatccatccgtccgcggtagacggggaagcggctgaagccctcggccacgaccgttttgagaatttgctcccggctggaggaggcctcgatggccttgatccggggccggggggtcatgatttccttgaccggccggcgggccaggtcgacgatttccgtgatcatggctttgcgatgctcgggcaggcccttgatcccggaatgaaggagggctttggcctcttcctcggccatggcccgggagagggcttcggatgtcttggccccggatcggaacagccgccgggagacgaaggtgaaaacggcgaccaggggatagaacaggacgaggaaaagacggacgacgggagcaaagaaaagggccagcttgtccggatggcgggcggcgtagatcttcgggttgatttcggaaaaaagaagaaggatgagcgtcgtcccgcccgtcgccgccaggacggccgtgttcctgtttgggatcaaggaggcggccagggccgtggccagagaggccgcggcggcattgacgagggtgtttccgatgaggacggccgagaggaaatcttcaagacgagaaaggattttttttacccggccggcccgcggcgagcccttcgtttccaggtaatcaagggtgtgcggcttcacggcgatgaaggccgtttcgcttgaggaaaaaaaggcgctcaggatgatgcagaggatgaacaagaggatcaaggaaagggtcatgaccgccggtcagacgtcaaggccgactttaacgtctttaaagcaagtggatagaatcgacgcgattttcttttcgatctgggcggccggcatggacgacacctgggcgatttccgaaacgaccagttcccgggctttttccatcatcttcttttcccggaaggacaggggcttgatcaagctcaggtaatgaaggctcttgagaacggcgaccatgtccaggacggtccccgatttcatcaggccgatgtgttccttatagcgccccttccaattcatggaaacttcgatttctccgttcttcaggaaatcgaagatgtccttgaccgatccctcggcgatcagcttgcggatgccgatttcctggcaggaggaaaaaggaaccatgaccagggtgttgctggacaggagacggagatgataaacggggaacttttcgccgttgtaagcctgttcctggacgtcgacgaccagacccaggccttgattgggataaatcactttatcaccaatcttgaaacattccatgaggggttaattctagcattattaggaagtttcgtcaaacaaaaagaaaggccggccgacggacttgttttccggtcgacggccgacgaacgaacggggggccgaacgggaaaaagccgcttgaaaacagaaccgattgaaaaagaaaaaggtaggcttggagcggagccgcggcgcttcgttcaggaggattgccggcggaggcggttgtagagtgtcgtgcgggaaatgttcaagatccgggccgtctgggaaatattgtgatgggtcagggcgagcagcatcaggatgtattcgccgacgagctcgtccagcgtcggaagggttgagggcggaacggaacggatcgggcccgtggagaccagtgtttccaggatacggttcatattcaacggcttcgggcctcgcggaggaggcggaagttgttggaaacgacgtaggagagagccaggttggaggccagggaagcgatccagccgaggggtttgcttttcttgaaaagcgccttggttccgaagtaagtggccagggtcaagccgcccttgaccgcggcgaacgccagatcgttcttgacgaacggcttcatgatgggattgccttcggaaagatgggggaacttgaggcattcccgggtggacacgtaatcggcgatgttcagggcgaccatggagatgagggtggcgtcgaagacggaatcggcgaagcgggagcggcggagggacggttcgataagggattgagcggaggcgaggacgacgagccgtggattgagggtgatcgaggagaaatcgggttcaggggcaggttcggaagggagggcgagggctgaaagcgttccggagggaaggaggggcgtttcgttgagggtggggaaagccaaggagacgccggaaaggaggggaaaagtaattaggaaagcaaggacagtttttttcatcctgacgtctccttgtatcattgaacataaagaaagcaaaaaatagaccatatataaaaacattcataaaacattgaaaaaaaagaaaataagatgaaaatgaatgaaatgagctgtatttaaataagaacaataaataaacacaattattaaaagttagtaaaaacattgaaaacaaataaaataagaacctaagctaaagaaaaaaagtgttcaataagtggaattctttgctcgattgttaattgctatatctttcgcttcgaaaatcctttaatattgccgaataatcgccttgcccgatgccggaaaggacgcgtccggcttgacatcgtcgccggggtcgattaagataggcgccttattcttgcgtaaggtgtgatcatgaagccctcgtttaatcctaataaccggaagcgtaaaaaagcgcatggatttctcgtgcggatgagttcggccggcggccggaaggtcatcaagcgccgccgggcgaaagggcgcaagcgtctcgcggctgaatgagcgattcttacggacctcgagagaggatccgaaaaaaatcggatttttcggcgctttaccaaaggggccggagctttcggagccgatacttcacgatcgtttatctttccaacggcttggggtatccgcgaatggccgccgtctccagccggaaggtcggcaacgccgtccggaggaatcgggctcgccggcgcgcccgggagctttttcggaggaacaaagagtcgttgaaaatgtccctggacatgctgttgatcacccgagccgaatgcgccgacgctccgtggccgcagctttgcgagcaatacgcggcttttcttgcctccctggcccgggagaaatccctccgatgaaacgccttgccctggctctcctccgcctctacaaaagaacggtctcccctttgctggggacgcactgccgatattatccgacctgcgcggagtacgcctgccaggcgatcgaaaaatacggcctgatccggggaaccgggctcgggctcaaacgtcttctccggtgtcacccgttccacgccgggggactcgaccctgttccctgaaaaaggatcactgatatggaaaccagaaggatcattcttgcgatcgtcctttctctcggcgttcttctgctctggcaatatgtctttgtgaaaaaagcgccggaaacggcgccccctccccagccggtcgccgcccaagcggctgctcccgctccggagacggaaacggccggccggcccgaagccgaaacagccccggccgaggagcgcgcctcggacgccgcggaagccttgaatgcggagaccgaggaggaaatcatcgtttccacctctctttacaccgcccgctggaccaacaagggcggcgtcctcttgagctggaagcttcatcatcataagaacgagaaagacgaggctctcgagctcgtcccggcggctgcggaagcgtcgggcgtccagccgctggcccttctcgaggcgctcgatccgtcccgggcgacgatcgaggagcttcgctcgacccccctgaacacggccttgtacgaggcgacgggcgggaacttgagcttgaaggacggggaaaaaggcgttctccgttttcggtacgccgacggacggggccttgaggccgaaaaaacattcactttcaccggcggacgctatgacgtcggggcggccgtgacggtccgccgcggcggccggccggccgacgtccggatcgtctggggccccggctgcgggaatccgtcggaagccgaattgaaacagcggttcggcgcgggagccggggcgagtttcctggccggaaccaaggtctaccgggtcgaggagaagaagtacaagccggaatcgagcgtcttcaacttcctcacgtggtcggcttatgacgacaattatttcgccacgatcttccttccggagaccgcctccggctcggcgtccttcctccgcttcgaaaacggcaagacccccttctttttcctggcggcctcggccccccggacgatcttcatcggtcccaaggaaatgggagtcctgaccgccctgggatccgagaccaagcgcgtcgtccgctacggaatgttcggattcatcaccgaaatcctctttgtctccctccgggcgatccacaaagtggttcccaactggggattcgccatcatcgttttgacgatcctcatcaagatcttgtttttccccttgacgtacagcagctccaaatcgatggcccgcatggccgaccttcagccgaagatcaaggcgctgcgggccaagtacaagaaggccaagaccgacatcgagcagcgccggcagatgaacgaggagatgatgaagctctacaaggagcacggggtgaacccggccggcggctgcctgccgatgctcatccagctgcccatcttctggggattcttccgcatgctgacggtggccatcgagcttcgccacagtccctggatcctatggatcaaggatctctccgtccatgaccccacgtacgtcacgcccatcctcatgggtgtgacgcagttcatcagtcaaaagatgaccccgacgtcggccgaccccgcccaagcccggatgatgctgatcatgcccgtggtcatgaccctctttttcctgaacttccaaagcggtttggtcctctactggctgacgtccaacgtccttcaaatcggccaacaggccctgatgaaccggatgatgcagaaaaaaaaggttgtctcccatggaaaatcaagaaaaaaatgacgccgtgacggcggtcgaggaaatccccgagttcaaggggaagaacctcgaagacgccatcctccacgccgaacacaagctgaaggttccgcggaccgagttcgaatacgaggtcgtcaccgagaaaacgcgcctcttcggtctcggcaaggaagtcgtcatccgggcccgggtcaagcggttcgccaagaacggcgacctgaccgtgtttttggaccgcctgatgaacgtctttccgctggatctgacgtacgaaatcaaaaccaaggaagacatcagcttcgtcatcttcggcggcgcggaccggcaaattctcctctggaaagacggggccttgctcctggcgatccagcaccttctcaacaagatctccgaccggaaggtccaagtggattgcgaattcttccgaaagcgcaaggaaaagtcgctgcgggattacgccctcgacgtggcccgccgggtggccgattccggccgaaacgagatcctggacctgatgaatccgtacgagcggcggatcgtccacatcgccgccaaccaagtccccgggatcaccagcgaaagcctgggcgagggttttttgaagcgggtcaagatctatcccttgagcaagcgcgcccgctgacgcccgcggccgggcttttccggaacacgccgccgtgtatgacctctctctctccgaaacgatcgtcgccgtctccacgcctccgggctgcggcggaatcggcgttgtccgattgagcggcccggcggcccttaaaatcgcccgaacgcttttccggccgaaaaaggaccggcgcggcggggaaccgggacgggccgttttaggcgaggtcgtcgatccggccgaccgccggcccttcgacgaaggattccttctccattttcgggcgccccgctccttcacgggagaggacgtcgccgagcttcaccttcacggaagcccggtcatcctggaggaagtcgtccggctggccgtccggcggggagcccggccggccttgcccggggagttcaccctccgggcgttcttgaacggacggatcgatttccttcaagcggaagcggtcgatgacttggtccgttcggcttctctggcccgggccaaatcggctttccggacggtcaacggcgcgttgtcgagaaaagccgcggccgtgcgccgggaaatcatcggctgggtcgcccggctggaagccgacattgaatttccggaagagggacgtcccgcggctaaaaaacactatatcgataaaatcgataaaatatatttagaagtcgatcgtctcgtccgaagctacgaaatgggtcaggccctcggccggggcgtaacgatcgccttggtgggccgggtgaattccggaaaatcgactctgtttaacgggttgctcgaagagccgagggcgatcgtcactccgtttccggggaccacccgcgattttctccgggaaaccgtccgtatcaaggacgcgtccttccttctcgtcgacatggccggcttgggccgggcgggatcgccgatcgaacgcgagggcatccgccgcgggaaaaaaatcgcggccgaggccgacggccttcttcttctcctggatggatcccggcggctttccgcttccgacgccgcgctcatcgagtcctatcggtcgagaaaaatcatcctcgtcctgaacaaaacggatcttccggagaagacgactccggccgaggtgacccgccgttttcccgatcttcccgtagccgccgtgtccgccctgaggggcgatggattggacgtcctccgcaaaatgatgtacgacgttttcttcccgctgattcccgggcgagacatcatcgtcttgcgggaaagggataagcttcttctggaggaaatcgccgctcgccttctccgggccaaggagatgatcgcctcgaaccagccgatcgaattggccgccgaggaagcccgcgaaatcgtcaccctcaccggccggttgaccggggagatccggcccgacgatatcctggatgatgtcttttcccgattctgcatcgggaaataagtctcgcctttctcttcaccgggcgctgtcgggcggcggccggccgctcccaagagcgggtcgaaccgccgaattttcgggagtcagggtataataccggacaagatggccgacgaatccttcgagatcatcgtttgcggcgccggtcacgccggctgcgaggcggccgcggccgccgccgccatggggtgttccgtctgcctgatcacaacgcatttcgaaaccatcgcccaaatgtcctgcaatccggccgtcggcggattggccaagggacacctcgtccgggaaatcgacgccttgggcggattgatgggacttctggccgatgcaaccggcatccatttccggctgctcaaccggagccggggcgcggctgtccaagccccccgtgtccagtgcgacaaatcccgctaccgggaggcgatgaaggaacagttggaaaaaatccccggcttgagcctctatcaggggatcgtcgtcgggctggatatcgtcgggtcccggattcgaggcgtcgtctgcggcgacgaccggtcgatcgaggccgaggccgtcatcctcacgcccggcacgttcctcaacggactcatccatgtcgggcaggcctcctatcccgccggccgggccaacgagcctccatccgtcgagctggcggccgcggttcggaaggcgggattgagaacattccgcttgaagacggggacgccgatgcggctggacgggaagacgatcgattggtcggctttcgaggctcagcccggcgacgacgaaccggtcccgatgtcgttgaggacggagacgcggctcgaaaacaaagtcgtctgttatctcggttataccaacgagaagactcatgccgtgatccggcgcgatctcgacaagtcgccgctctacgccggacggatcaaggggctggggccgcggtattgcccgtcgatcgaggataaggtcgtcaagttcgggcatcatccccgccaccagttctttctcgagccggaagggctggcgacgtccgagatttacgtcaacggtctttcctccagcctcccttacgaaacgcagcgcgacattctccggacaatccccggattaacggaggcggtgattctccgtccggcttacgccgtcgaatacgacgccgtttccccgacccagctgaagccgacgctggagtctcttcccgtcgagggattgtatctggccggccagatcaacggaacttcggggtatgaagaggcggcggctcaaggcttggcggccggcgtcaacgcggtcttgaagctccgagataaaaaaccgttcgttctccgtcgtgaccaggcttacatcggggttttgatcgacgacctgatttccaagggagtggaggagccctaccggctgtttacgtcccgggcggagtaccggctcggcctccgcatcgacaacgcggattcgaggctttccccttatgggagggagctcggcctgctttccgaaagagatttcgtccgctttcaaaaaaaggaaaagcggctgtcgtcgactttagcctttttggaaaaaaccaagatcacaccggcggggaagccccggatttcgctcaaggagtatctccgccggcctgatatcgagtttgagaatgtgctagaatacgttccgatgccggaggccctttctcctgaggaaacccgccggatcgcggctgaagtcaaatacgagggctacctgaggaaacaagaggtcgagatcgtccgcttgacgaaaatggaggcgatgagaatcccggcgggattcaagccttccggcgtccccggcttgggccgggaagccgtggaaaaaatgaacaagcacaagccgaaaaccatcggggatatgaaacgaattccggggctgacgccgtcggatgtgatgaacgtctttattcacgtctcggcggggaatgttccacgtggaacatcgccgggaaagccgaccagggaagatgaataaaatcattgccgtcgcgaatcaaaagggtggggtggggaaaacaacgacgtcgatcaatctggccgccgctttggcgcttaagaaatcgagggttctcttgatcgatttggatccccagggcatggcttcggccggcctggggaaacccaaggccgactccgccgggatctaccaggccatgatgaacggccgggacatcatggaatgcatctcgggcaccgaaatggacaatttctatctctgcccctgttcaccggagctgatgggagtggaagcggagatgttcaaagccgaattccgggagaataaacttaaaaacgccttggaaaaagcccggccccggttcagccacatcctcattgattgtcctccttccctgggtttcctgacgattaatgccctcacggcggcggactccgtcttgattccggtccaaaccgaattcttctgcatggagggaatccccgatctccttcataccctgaacgaagtccggacatattttaatcccggccttaggatcgagggagtcgttttgaccatggccgacgaccggaccaatctatctcggcaggtcgccgacgaggtccggaaatcgctcaaagagctggtctttcggaccgtcatcccccgcagcatccggctggccgaagcgccgtcctttggaaagcccgtcattctatacgagccgagatcgcggggggcggaggcgtatctatccctggcccaggagattttggaaaaatgaaaaaagctctcggcaaaggcatcaaggccttcatcccggaggaatacggcattctcaaggaagaatccttgaccgagatggacatcgaccggctgagtccgagcccgttccagccgcggatgaaattcgacgaacaggcgatcgaggagctggcgcagtcgatccgcgagtcgggaatccttcagcctatcatcgccgttccggccggcggcggctataacatcatcatcggcgagcgccgctggcgggccgcccaaaaagtcggactccgcaaggttccggtcatcatccggaatatctccaaggaaagacagatggaggcctccatcatcgaaaacctccagcgggaagatctcaatcccatcgaggtcgcccgatattacaaggggatggtggaagtcctggggtattcgcaggaggaggtggccgagaaggtgggcaaggaccggacgtcggtctccaacactctccggcttctcaatcttccggaggccgttcagtcgatgctgcttcaagaaaaaatcgccatggggcacgcccgggccatcctggggatcgaggatcccaaggcccaggtcgaagccgcccggtgggccgccgactcgggccgcagcgtccgggaaaccgaggactatgtctcccggcgaagaaagaaaaaaactccggtccgggcgaagctcgatccggatcttcaaaatcttcaagaagacttgctccaacacctgggggccaaggtcgtcatttccggaacgcctaaaaaaggggtgattaaaatctcttatttttcgctcggcgagctgaatcgcatctatgaattaatcaaggggattcgctcatgaaggaaggaaaggaaaaacgggtctcgaaccgggccgagctgtccggattgtacgacaccggaaccgaattccagggagtcttaaaattcgagggatcgttccggatcgacggtcatttcaaggggaccatcgaatcggaagacaccctgatcatcggcgaggagggaaacgtggaggcggagattcacgtcggacacgccgtcgtcaacggtgaattccacggccggatccggtgcgagaaaaaaatcgaagtccacggccgagggcggattttcggaacgatcatcgctccgaagatcatgatcgacgagtcggcgtatctccaggccgagtgccggacggaggaggcccccgtctcggccgagcctgccgcggaggacaaggaaagcgaatgaaacggaaagtcctggccgtcatcccggtccggttcggctcgacgcgctttcccgggaagcctctcgccctcattgccggaaagccgatgatccagcgggtgatcgaaggcgtccgggtgtgccggtcgatcgaccgggtgatcacggccaccgatgacaatcggatttttgaaacggtccgggctctcggagcggaagccgtcatgacatcgcccgaccacgcctccggaacggagcgcgtcgccgaggtcgcggccgctctcgattatcccgtcgtcctcaacgtccaaggagacgagccgcttgtcgatcgggccgcgctcgacggcttggccgaagccctccaggatcaccgcctgccgatggccagcgtgatggcccgaatcgaggacatctcggcggcggccgatcccaaccgcgtcaaggtcgtggtcgacgcctcggggcacgccctttatttttcccgggcgctcatcccggccggcgcgtccgactttttcttccagcacgtcggtctttacggttatcagcgggatttcatcctccgtttcggccgccttcccctttcgcgcctcgaacagatcgagcgcctggaacagcttcgcgtcttggagaacggatttcggatccggatgattgaaatcccccgcccgaccttgagcgtcgatgtgcccgaagatataatgagggtcgagaaattcctcaaggaaagcggatcacggtgaccaaattcatttttgtgaccggtggagttctttccgccctggggaaggggatcgccgcggcctcgatcggccgtcttctcgaaagccgtggatttaagctcaccatcatcaagctcgatccgtatctcaacgtcgactcggggacgatgagcccctaccagcacggcgaagtctacgtcaccgacgacggggccgaaacagacctggatctcggtcattatgaacgatttacgtcaacgcagacgacaaaatatcataattggacggccggccggatctacgacatcattctaaaaaaagaacggcggggcgaattcctgggcaaaaccgtccaggtcatcccccatgtcaccgatgaaatcaagaacgccctcaaatcggtcgccgagtccaacgacatcgtcatcgccgaaatcggcgggaccgtgggcgacatcgaaagcctgccctttctcgaggccatccggcaaatgcggctgtcctgcggggccgaccacacgctttttgttcacttgacgtatgttccttacgtccagacgtcgggcgagctgaaaaccaagccgacccagcattcggtccgggagctgcgggcgatcgggattcaaccggacattctgctctgccggaccgatcggagtctcgggccggaaatgaaggcgaagatctccatgttcacaaacgtcccggagaacgcggtcatcaccgcccgggacgtcgagaacatttacgaaatccccctcgtgttcgccgaggaagggttggacgcgatcatcctccgccagttcggcttgacctcgcggacgcgccgtctttcccagtggaaaacgttcgtccggcggatgaatcaaccgagggatgaagtcgacatcgccatcgtcggaaaatacgccggccttgaggattcctacctcagcctcaagcaggccttgatccatggggccgtggccggggatctcaaggccgtcattgaatggattgaagcggaaaatgtggagaaagggaagcttgaaaagatcctcggaacgaaagacgggatcctgatccccggcggcttcggccagcggggcatcgaggggaaaatccgggcggtcaccttcgcccgggaacacaacgtcccgctgttcggcatctgcctcgggatgcagtgcgcgacgatcgagttcgcccggaacatcgccggactcaagggggcccattccgcggaattcgacgaagcgaccccggcgaagatcttttttaaatggcgcgagctgaaaggcgtgaccgatctgggcgggacgatgcgcctgggccggtacctctgccgcctggagaaatcctccttggcatataaaatttatcggaatgaggaaatatgggagcgccatcgtcaccgtttcgagttcaacccggccttcgaaaagcctttgcgcgaggccgggcttcggttttcggggaaaaatcccgattacggcctggccgagatcgtcgagcttccgggccatccctggtttctcggctgtcaattccatccggaattcaagtcccgtccgttaaggcctcatccgctctttaaatcgttcatcggagccagctatgcccatcgccaagaaaagcgcgcggcctgaggcggcgcggtccgccgttccgccggccggattgtttctcatcgccggtccctgcgtcatcgaaagccgggcgaaaacgatcgcccttgcccggaaactcgcggccgtcgccgcgcggctcgattttccccttcttttcaaggcctcctacgacaaggccaaccggacgtcgctccgatccttccgcggtcccggtcttcgggcggggctggagattctccgggcggtcaaggaaacggccgggattccggttctctccgatgtccacgagccggcccaagccgttccggccgcggaagtcctggacgttcttcaaatccccgccttcctctgccgccagaccgacctggtcctggccgtcgcccggaccggaaaaccggtcaatgtcaagaaagggcagttcctcgcccccggcgacatgatgcatgtcgtcgagaagatcctcagcacgggcaatgcccggatcatgctgaccgagcgcgggacgtgtttcggttaccacgacctggtcgtcgatatgcgctcgatcgcggacatgaagcggctcggctttcccgtcgtcatcgatgcctcccacggcgtccaaaagccgggcggcgcggggggagcctcgggaggcgaacggcggttcatcccggccctggcccgggcggccgtggccgccggcgccgacggagtgttcctcgaggttcacgacgatccggcccgggcccggtccgacaaggacaacgcctggccgatcgacgaagtggaagcgctgatgaacgtcctgctccgagtctacggagcgctgggagagccgagatgacgaaagaagacatcatccgcgcgggccgggacgtgctcgacgtcgaagcccgggcggtcgcccgtctccgggagaacatcggcgagccgttcgtccgggcggtgaatctcctgtaccggacgaaaacgagggtcatcatcttaggcatgggcaagtcgggccttgtcggccggaaaatcgcggccaccctggccagctgcggcacgccggcgattttcgtccacccggccgaagccggccacggcgatctgggcatgatcctggagggagacgtcgtcatcgccgtctcgtacagcggcgaaacgcgcgagatcatcgacctcctcggctatatcaagcgtctcggggtgaagctgattttgatcaccggggcgccccgatcccatatcgcccgttacagcgacatcgtcctggaagcccgggtcagcaaggaagccgatcccgacggattggtgccgacggccagctcaaccgcggccctggccctgggcgacgccctggccatcgctgtcatgaaacggaaaggattcaccgagcgcgatttcgcctccgtccatcccaagggggccctgggcaagcgcttgctccggatcgagacgctgatgcacaagggccgggccgttccccgggtcgggccgtccgccctgatgagcgaggccatcgaggagatgaccgccaagaagctgggcatgaccagcgtcgtcgacgaggccggccgcctggccggggtcatcaccgacggcgacttgaggcgcatgatccggaagtacggggccacgctgctgtctcggacggccggggaatgcatgacgaccggtccgctcaccgtgacccggaccgatctggcggccgaagccttgaatgtcatggagcagaaccggatcacgtcgctcgtggttctggccgcgggggggaaagtggaagggatcatccacctccacgacctctggcggacggagatgttctgatggggaaacgcgggcgggcccgccgcgtccgcatgatcctggcggacgtcgatgggacgttgaccgacggctccctgacgccgtatcccgacggcgaggaaatcaagtcgttcaacaccaaggacgggctcggcgttttgatttcccggctggccggcttgaaagtcgggttcatcaccgggaaaaattcgaaagccttggaaggccgggccgcgaggctccggatcgacgagctccgccagggagcgatcgacaaggagccggtctttcgggagatcctggccaagcacggccttcgtcccgaggagatcgcctatatcggcgacgatttgaacgacctagcggtgctggaagcggccggtttttcggccgctccggccgacgccgtggcggcggtccgcaagagggtcgacttcgtctgccgccggcgcggaggcgaaggcgctttccgggagctggtcgactacatcctgggagcgcagagaaaatggagcctggtcaaagaccggttccgcgagatatccgaccataaaatatgaccgccggagagcgggaagaggaggtccgcatgccgatcaacgccaagattttccgcgagtacgatatccgcggaatcgtcgacgtcgatctaaccccggaggtcgtccagacgctcggccgggcgatcgggacgtttttcaggtccaaggggaaaaaggagaccgtggtggggcgcgattgccgcctgagctcgccggccttcgccgaagcgatggccgccggcctgcgcgcggccggctgcgacgtcacggatctggggacgattccgacgccgctgctgtatttcgccggctactacaagaatatggaatcgggagtgatgatcaccgggtcccacaatccccccgagtacaacggattcaagatgaccgtcgggcaggacaccctctacggcgacgacatccagcagatccaccggatcattaaaaacggcgcttatgccccggccgggaagggatcttatcgcttgtacgacatcaagcccgaatacgaagcctatgttctcggtttgttcaagctggcccggccgctcaaggtcgtcctggacgccgggaacggaacggccggggtcgtggctgcccccttgttccgcaagctcggctgcaaagtggacgagctctactgcgacatggacgggcgttttccgaatcaccatcccgacccgaccctgccggaggccatgcaatcgctcgtgtcccgggtgaaggccacgaaagccgaactcggcctggcgtacgacggggacggagaccggatcggcgtcgttgacgacgaggggcacttgatctggggcgaccagctgttgatttttttcgcccgggacattctgaaggctttccccggggcggtgatcatttccgaggtcaaggcgaccaaggtcctgtatgacgaaatcacccggctcggcggcaaggcggtgatgtggaaagccggccattccctcatcaagaagaagatcaaggacgaggatgccaagctcgccggggagatgagcggccatatgtttttcgccgaccggtggttcggcttcgacgacgccatctatgcctccctccgggtggccgagctggtcgcccgttccccccagcggctttcggaaatgctggcggccctgccgaagacatacagcaccccggaaatccgcgtgtacgcctccgaggaagtcaagttcaagatcgtcgaggaggtccgccgcgagctctcgggcaaatacccggtgatcgacatcgacggcgtccgggcgatcatgcccaagggctggggcctggtccgggcctcgaacacccaggccgtgctggtcctgcggttcgaggcggaaaccgaggaggacctggaggccattcagcgggaaatcaaggcttccgtcgagcgggcgatccacaagctcgaacggccgtcatgaaatccgccgtcgatcttcacgccgtcatcatggccggggggagcggcacccgcttttggccgctcagccggaagcgccggcccaagcaattccttcccatcgtctccgaaaagacgatgatcgaggaaacgtaccggcggatccgccggatcgtccccggccggcgcgtctttacgatcgccgatgctcctcagtcgcggatcatccgccggctgctgccggccctgccggcggccaacgtcctgatcgagccgcgcgcccggaacacggccgcctcgctcatcctggccacggcccacgtgcaccggcggaatcccgaggcggtcgtcgccgtcctcgcctccgatcatttgatcctcgacgagcctttgtttctcaagaagctcgaggccgcggccgaggcggctttccgaaccgaggggctcgtgaccttcggcgttcagccgacctatccggccacgggatacggatatatccaattcgaccgggccggcgggcgggacttcgccggcgagccgttctaccccgttcgggccttccgggaaaaaccgacgcgcgaggcggccgccgccttcctggaatccggcgattacgcctggaactcgggcatgttcctctggcgggcatccgttttcgcccgggccttggagagggattccccggccttctttcccttttggcaaagaacgcgggaagccctcgacaagaaatcgtccaaaaccctgatccggatcttcgaggaaatcccggcgctctccatcgactacgccttgatggaaaaagccaagggaacgctcgtctgcgccggcgatttcggctggtcggacgtcggcgcctggtcggccctgggagagatctggccccgggacgatcaggggaacgcccggcgcggcgacgtggtcgccgtcgagtccaggggcaacatcatctgcaatccgggaaagctgacggccttgatcggggtggagaacacggtgatcgtccaggctggcgacgttctcctggtctgccgcaaggaccgggaccaggacgtgaagaaagtcctcgatcttttacgaggcggcgggaaaacgaaacatctttgatctccctgccccgaaagggggagccgaagctccccctttcacgcttccttggcgcctaatggcaggagagaattttcgaatcgatggagaagcgagcctctagcggttcgtccgccgcgatcgccgccaagccgaagagcagcgttttttccatgacttccgcggccagggccgcttcgccggacttgaggaatgaggatccggcgagaaaggaagcatattctgttttccactccgccaggctcgcggcggaaacggcggaccaagactgggggaacttcatattcaacggcttcgggcctcgcggaggaggcggaagttgttggaaacgacgtaggagagagccaggttggaggccagggaagcgatccagccgaggggtttgcttttcttgaaaagcgccttggttccgaagtaagtggccagggtcaagccgcccttgaccgcggcgaacgccagatcgttcttgacgaacggcttcatgatgggattgccttcggaaagatgggggaacttgaggcattcccgggtggacacgtaatcggcgatgttcagggcgaccatggagatgagggtggcgtcgaagacggaatcggcgaagcgggagcggcggagggacggttcgataagggattgagcggaggcgaggacgacgagccgtggattgagggtgatcgaggagaaatcgggttcaggggcaggttcggaagggagggcgagggctgaaagcgttccggaaggaaggaggggcgtttcgttgagggtggggaaagccaaggagacgccggaaaggaggggaaaagtaattaggaaagcaaggaccgtttttttcatcctgacgtctccttgtatccacatatctaattaatcagcaataaatagaccaacataatcaatgtatataaatgcatgggataattagaaataaattgctagaagataagtttgctgattattatatcgtttaaataatgaacaataatgaatgaaatgtgtgtatctcgttattatttatataattacaaaaatgtcgaccattcagggaataatgttcaaataatgttcatttttatcccggttttcgaacttttctcgatgggaatgatttggatccgcgttgttcgggttctgaatgacgggaagccggaggaggggagcgggcgaagccgttgaaaagaggcggcggaattttttttcggcatcgttttcttcccaggcttgagataatcatggggaaggcgaggaaaagagcccgatcaataaaaaagaagcgggcaggccggtcagcgccgattaaacggctgggaaaaaaggcgcggggagtttgatctggaaggaaaaccccggcgaaccttctcccggcccgggctttgtaagtttccccggaaagaggcgggcgttttttttcgtcgaatcgtcctatataattcaatccggaacgaaatcaggaaaatcatgaaatcagagtcgaaacggagccttcttccttttacccggagcgtgtgcggccttgtccgccggattccacggggaaaagtcatctcttacgggcggctggcggctctggccggggacggccggcaggcccgccaggtttcctggatccttcactcgacttcggaaaacgaaggactcccctggcaccgggtgatcaattccaaaggccgtgtttctcttcctcccgaacgcggcgggaacgaacaagcccgccggctccgtcgggaaggcgtcaagatcggccccggaggaagcatcgacctcgataagtacggctggcggatgcgttggatttccggacggaagccgccgatttccgagcgcgatctcgaacggttttagccgcctcggtttttacggattttgaaatcggacaaaggaaatcgttccctcgagaggagcgatgaacatctctttcccagagcgcaggttttgtcggaggcgttttcccggaagtcccgggcccgccgaggctttcggcccccccccggggccggctcgttcatccgtcgcccaggccgaagccggcttaaggcttggccgctttttccctccggagcttttccctcgtctcgacaaacatcggctcggcgtaggtcgaatcccaggtccgctcggcgaagcttctcttttcgataagcttgaggaatccctcgaagtcccggaaataggagccgtagatgtgaaagctgtcggccacatccacgtagcgtccaaggcggatttcctttccggaccgttcggcgatccggccggcgatcgatttttgaagctcggttaaggcgaacacgttcatataagcggccttgaagccgtcgcgcgatcgccaatgcgtgttcatgttgaggacgaagctcccgccgtcgccgggaagcagccggcaccagacccgctgaaggcagggaggatcgttcgtcggcggatccaggacgacgttccaggtgatcgcctgggcccggcgcgaatggccggaacggctgagcttttcgacgagggattcgatctggtcgatcaccgccccctcggtctcataggcgaaaagccgcttgtggtacgtgtaggtccacttgccttcttccggggcgatccaatgatcgtggatgccgtcgacgacctcctggcgatagatttccagatcctccaggccgccggggaacgcccgatggatgcggggctcggcgaacggctcctcgaccacccacatcatcgtgcagtcgcggctcggcggatcgccgggcttgtcgtattccgttcggacggcggcgccgccgcgccagcacgccaaaaccgcattttcccaagcctccggaagagtttttccggtgacgaacagggccggaatgtcgccgttcattaaggcctcctcgtttcggtcttgtatcacagccgttccggagaatcaatcgcccgaatcccgtcatcaaaaaagtcgccgaaggcggatatatcttgccgtttaaaaatcttaccgaagccgagaatcgttgagagatcataaattatgggagtaacgcgcggcccggcgaacgtccgccgcccggaagcggcgggcgattgcgacgattctccggccggagcgtctaccctgtggagaaagcgggtgtttgggagcggccctctctccgaaaaagaagcggagccatgaacgacgatttccgccatccccccggccgcccctccccccgggccaagaatccgcccggtccggcgtccgccgggcaccgaagccggctccgtgaaaaatttctgaagggagggttgtccggttttctggattacgaggtcatcgagctcctgctgacgctgggaacgccccgccgcgactgccgcgaatccgcccggctggccttgcgggaatttcggacgcttcggggcgtgctcgaggccgaaacgcacgagttgcggcggatcccgggcatcggctcggccaatgtcttcggcatccggctcattcaggaggtggcccgccgtttcctgaaggaccggatgctccgccgcccctactgccgttccgcccgggaggtgttcgaatacctttatcatacgatgcgcgacctgaaaaaggagaatttcaaagttctttttctggatgccaagaaccaaattctcgaggagaagacgctctttgagggtaccgtggactccagcgccgtctacccccgggaaatcatgaaggaggcccttcgcttcaacgcggccgccttgattttcgcccataatcatccctcgggcgatcccgagccgtctttttgcgaccgggaaatcaccaaggagctggttttcgccgcccgggtcatggggcttaaggtccttgaccacctcatcatcggcaacaatcgctatttcagcttcgccgaccacggcttgatctccgattatgatctcctcttccactcggtccaggcgaaaaccggcgccggaggctgaccccttcatttcgcccgcgaggtggattaaactggcaggcaggagggccttttcggcccgagcagagacgacgcggaggaattgcgatgaaaccaatcgttgaaattgcggccaagctgggccttgatccggggaatctggttcaattcggaacctacaaagccaaggtggatccggcggccgggccgcccggccggccggcggggaagcttatcctcgtcacggccatgacgcccacgccggccggagagggcaagacgacgacggccattggcttggtcgatgccctcacgcgggccgggaaaaaagccctcgcggccctgcgcgagccgtccttggggcctgtcttcgggatgaagggcggggccaccggcgggggaaaagcccgggtcgtccccggcgaagacatcaaccttcatttcaccggggaccttcatgccgtctcctccgctcacaacctgctggcggccctggtcgagaaccgattgcatttcgacgggccggcgggactcctggacggccgcaatgtttattggaagcgcgttgtggacatgaacgaccgggctctccggcaaatcattatcggcctggaggacacgtacggcggaatggcccgggaatccggcttcgatatcaccgccgcctcggaagtgatggccgttttctgcttgtcgcgggacttggccgatctcaaggcccggctggggcggatcgttgtcggctgcggcctcgatctgaaaccggtgacggccgcggctctgaaggctcccggggccatggccgctctgctgcgggatgccctgcggccgaatcttgtccagacgctcgaggaaacaccggtctttgtccacggcgggccgttcgccaacatcgcccatggggccaactcggtgatcgccaccgggctggccctccggctggcggattatgtcgtcactgaatgcggattcggctccgatctcggagcggagaagttcttcgacatcgtggtccgctccggagccgtccccccgccttcggccgtggtcatcgtcgccaccctgcgttcgctcaagtatcacggcggagtgaagcttgacgcccttattcaagaaaacatcgcggccatggataacgggtatgccaaccttcaagctcatgtcgatatcgttcgccaatacggcttgcccgtggtcgtggccctgaatcggttcccggcggacagccaggccgagatcgccgccttcaccgcccgggccgccgccgaccggctgccgtacgccctcagcgacgtgttcggcgccggcggtccgggcggcctggatctcgcggcaaaggtcgtggaggccgcgtcctccgacgccggcgagttcaggtttctctatcccttggaggccttgattccggagaagctggaggcgatcgcccggcggatttacggggccgaccgcgtcgttctggaatccccggcccggaaaaaactgaaacggttcgaggacaacggattctccgggctcccggtctgcgtggccaagacgcagtattcgctgtcggacaaccccaagctcctgggccggccgaacggcttccctctgaccgtgaccgatctctcgatcagcgccggggccggattcgtggtcgctctctgcggggacatcatgaccatgccggggatgccgaaaagccccgcggccgagcggatcgatgtttccgacgacggcgttgtctcgggcattctcggctgagcgggttttactcccggcggcgaatgtgataaaaggaaacgagaaaaaagaggcggttcgagcgtcctttaggatgtgcggcccggtccggaggatcccatgaaagaagaagagcagagcccgcgcgacgtgtcccggggcaaggccatcgaagcggctgtttcccaaatcgaaaagcaattcggcaagggttcggtcatgaagctcggccaacgcgacgcggcccagagaatcgaggccatcccgacgggatccatcgccttcgacctggccctcggcatcggcggatttccccgcggacgggtggtcgaggtgttcggcccggaagccacgggcaaaacgaccctggccctccatgtcatcgccgaggcccagcgccgcggcggccaggcggccttcatcgatgccgagcacgccctggatccgacctacgccggaaaagtcggcgtcgacatcgacaacctcctcatctcccagcccgattacggcgagcagggcttggaaatcgccgaggttctggtccgcagcggggccgtggacgtcgtcgtcgtcgattcggtcgcggccctcgttcccaaggccgagctggaaggcgagatgggcgacgcccatatggggcttcaagcccggctgatgagccaggctctccggaagctgacggccatcgtcgcccggtcgaagacctgcttcatcttcatcaaccagatccgggaaaagatcggctttttcctggggaatccggagaccacgaccggcgggcgggctctcaagttctatgcctccctccgggtcgacgtccggcggatgacggccatcaaggaaggggaccaggtcgtcggcaaccgggtcaaggtcaagatcgtcaagaacaagatggccccgcccttccgggacgccgaattcgacatcatctacggcgagggcatctcgcgggagggcgacctcgtcgacatgggggccaacgtcggcttggtcgagaagtcggggacctggtattcctacaagggcgagcggatcggccagggccgggagaacgtcaagaagctctttaaggaaaacaccgccctggcggccgaattggacgccgatatccgccggaaagtcggtctcggccagccggaggcggaggaaaaagcccccgtcgagcagaagccggcccgggctccggaaaagacgtccgaacggcgaagccgctgaaccggctcttccccggaaaaaggaggggaggcggaacggcgggaggagggagcggatggcccggaatgcgtcttcgcgttccaagaaaagcggtctcggtcccggaagcctcgtccatgtcggccggcggaaaatcgaccggccgcgcatcaccctgatcgattacgacaacgggcatttcctcgagaaggaagtcgcggccctcgaggagtgtttgcctttcaacctgacttccaccgtgacgtggatcaacgtcgacggcgtccacgatccggacgtcgtcgaaaaattgggacaggctttcggcctccaccccttgattttggaagacatcatgacgacgtcccagcgccccaagctggacgacctcgaaacctcgttctatttcgtcgcccggatgatcgagctcggcggccaaggccgggagctcgtcaccgaacagctgagcctggtgttcggccggaatttcgtcctgacgttccaggaggctccgggcgacatgttcgatccggttcgtgaacggatccgaaacggcaagggccgcatccggaagctcggcccggattacttggcctacgccctgctggatgccgtcgtcgatcattatttcgtcgttttggaaaccctcggcgaccggatcgatacgctcgaggaggaactcgttcgcgatccccgggaagagacgctccacgccatccacgctctcaagagagagatgttgatcttccgcaaggcggtctggccgctgcgggaggtcgtcgccgggatcgaacggacggaaacgccgctgatccagccctcgacgagcatcttcttccgcgatgtctatgatcacatcatccaggtgatcgacaacgtcgagacataccgggacatgctggccgggatgctggagacgtacttgtcgagcatgtcgaaccggatgaaccaggtcatgaagatcttgacgatcatctcgacgatcttcatccccctgacgttcctcgtcggcgtctacgggatgaatttcgagcatatgcccgagctcaagtggcgtttcggctatttcctcatctggggcgtcatgatcatcctgggccttggcctcgtccggatcttcaaaaggaaaaaatggttctaggccgccgccggccggagcgaaggagcgtccgatgaaagtaaaacagatcgtcattctcgtcctggtcggcctcgtgatcgtcctgatgatccaaaattccgtgctcgtcaagttccacctgctgttctggcccgtttacgcgccgctgttcttcctcgttttgggcatcctggccgtggggttgatcgtcggcttcctggcggcgaaggcggggcggaaaacgccgccgaaaccggtttcaggccgggaggagaagcccgcggccgcaacgaagaccggtccgccgaccgatccggaaaaatgaaggcgttcttcactcatctgaaaacccgtattttccggggttttctcgttcttttgccgctggccctgtcgtttcttgtcctgcagttcctctatatcgccgtggatcagaggatcgcccggctgttcgagcgctggatcggattcagcatcccgggtttcggcctgcttctcgtcctcttcgtcctttatcttctcggcttgatcgcctcgcactgggccggccgctgggcgatcggagtggtggacaaggcctcgacccgcatccccctgatcaagacgatttacctgctcggaaaacaactgggcgcggccttttccgcgccggaaaaacaggggctgaaacgggtcgttctggtcgagcatttccgtccgggcgtctggtccatcggcttcgtcatgggttcgatgagggagaaagagtccggccggacgctcctccgcctctttgtcccgaccgctcccaatcccacctcgggctttatgctgatcgttcccgagtcccaggttcgggatgtggattggagcgtgcccgaggcgatgaacgccgtcatttcgggtggattgatcgggccggaacaggtcgagacgcggccctaggatctcaaggcttttctcaggtagcgggccgtgatcgaggctcgggaacgggccacggcctcgggcgtcccctcggcgacgaccgttcctccgttctccccgccctcgggccccaggtcgatgacgtaatccgcgcttttgacgacgtccaggttatgctcgatgaccaggagcgagtgcccttcctcgaccagcctctggaaacagcggagaagcgtcgacacatcctcgggatggagcccgatcgtcggctcgtcgaacagatagaagatgttacgatcgcgctcgtggatgagatgaaacgccagtttgatccgctgaagctcgccccccgagagggtggtcgtcggctggccgaggcggagatagcccaggccgacgtcctggagcggccggagcttcttgacgatttccggccggtccccgaagaattccagggcgtcgtcgacggtcaggtgaagcacgtcgtcgatgttctttccccgatagcggatctcgaggacttcgcgcttgaaccgtttcccctggcagccctcgcagacgagaatgacgtcggacaggaactgcatctccacgatctgccggcccgccccctcgcaatcctcgcaccggccgcccttggtgttgaaggaaaacgtccctggcttgaggccggcgagcttggcctcccgggtttggctgaacaggtcgcggatcccgtccatggccttcaggtacgtggccggaatggagcggggcgaggcgctgatgggcgattggtcgacgcagatgatcttgtcgatgcgctccaagccccggatatcggcgaaggcgtcccgcgattccccgctccagccccggtaaaggacgtcatggagaagcgtgcttttccccgaaccggagactcccgtgaggcaggcgaacacgcccaagggaatgcggatgtcgatgcgtttgaggttgtgggcccgggcgtcccggaccagcaggaagccgcgcggctcgcgccgtcggcgcgggacggcgatctctttctcgccggtgagatagcgggcggtgatcgaggcgccgtcggagggcggccgaccgccgtcgggctttttcaggatcgtggacagcggtccggcgaaaaggatttcgccgccgttttccccggcccgggggcccatgtcgatcagatggtcggccgcccggatgatgtccggatcgtgctcgatcacgaggatggtgttgccgatccccttcagcgactggagaatccggacgagccgggcgttgtcccggggatggagtccgatggagggctcgtccaggacgaacagcgtcccgaccagcgaggagctgagggccgcggccaagttgatccgctgggcttctccgccgctgagagtgaaggtcatccggtccagggtgatgtaatccagcccgacttcgatcaggtacttgaggcggttctcgatttcggcgacgagtttttcggcgatctttgcttcctcgggggagaggcggaggtggtggaaaaagaccgcggcttccccgaccgtcagacggacgatttccccgatggacaagcctccgatcttgactccccgggcgtccgcgttcaagcgcgtttggacgcaggccgggcagggggcgtatttgcggtaacggctgagaaagacccggacctggactttatattttttcgcctggagccagtcgaagaagcccttgatcccgtaccacttctcgtctccctcgaaaaggaagcggcggtgctcggctttgagatcacggaaggggatccgggtcgggatcccccgtcgccgggcctcccgaagcatctcccgcatgactccccgggagaccggcttcgtccacggctcgatggctccctcctcgagggatttggccggatcggggatgattttttcctcgtccaggacggctaaatcgccgaatccatggcattccggacaggcgccctgaggattgttgaaggaaaagagattcggcgtcggatcctcgtaggcgatccgacactccttgcattccaagctgtcggaaaaggcgaacgaccggccgtcttccgtttgaacgcgggctcgtccccggccgtgcttcatcgccgtctcgagagaatcggccagacgctcccggtcgtccgggtcggccggaagccggtcgacgaagaccgacagggtccggcccttgagggatggaagctcgtcgaacggaacgatccggccgtcgaccagggcccggaaaaagccgagcttcttgagggcggccgggcttttttcgatcacggcctcaaatgagatcgaaagcggcgtgccggcggggagagccaggagcttgtccacgacggcgtcgatggtgtcccgggtcacgggccggttgcagcgtcggcagtggaccgtgcccacgcgggcgtaaagaacccggaggaaatcataagcttcggtgaccgtggccacggtcgagcggggatttttcgtcgccgctttctgttgaatggcgatggcggggggaagcccttcgatcgtgtcgacgtcgggcttgtccatccgctcgaggaattggcgggcgtacgaggagagagattcgatgtaccggcgctggccttcggcgtaaagggtgtccagggcaagcgaggatttccccgaaccgctcactcccgtaacgacggtgaaggcgttcaggggaatgtcgacgtccacattcttgatgttatggacgcggacaccccggaggatgatcttgtcttcgccgctcatggaggccccattctcgtgttgaaaaaagaatcattatagcacgggcgcggagaaatgtggataataggatcatgcggccggccatgaaaaaggcgttgttttgcggcgccgtgccctttgtcgccctggtcgccgcccttccgttcgtcaatcgcctccggccggtcgtcctcggcctgccgttcgtcctgttctggatcctgggctgggtggccttgactccggcattcctgtatctcgccgaccgattcctccggaaagataaaaacggcaaggacggcaagccgtgaccccggccctggcgatcatcctgggagtcatcctggcggccgcggccgccggctttctggccggccgccggatcccgatgaacctcgagaactggacggtcggcggccggaagttcggggtcgtgatcatctggcttctgatggccggagaggtgtacacgaccttcaccttcctgggagccagcggctgggcgtacgccaagggcgctccgacctactacatcctgatctacggcgcgttggcgtacgtcttgtcgtttttcattctccccgagatttggaaaatcgggaagaaagccgggctccacacccagccggacttcttcgtccatgtttttcaaagccgcggcctggggatcttggtggccgtcatcgggatcctctcgatcttgccctacctgcagcttcagctggccgggctcggcttgatcgtcgaggcggcatccgacggggcggtttcctcaacggccgcgattctcctctcttttgccctgaccacggccttcgtcctgaccagcggcctgagaggaagcgcctgggtttcggtcatcaaggacatcctcatgctggcggccgtcggtatcgtcggcttcggcctgccgaggatccatttcgggagcatcggcgggatgttccgggccctgatggacaaggcccccgggcatctcgttttcccgggggccgcgccggggatgggcgttccgtgggtgatgtcgaccgttcttttgaccgcgatgggattttacatgtggccccagctttttgggacggccttctcggccaagagcgaccggatcatccgccgcaacgcggtgatcatgcccctctaccagataccgatcgtcctggtttttttcgtcggcttcacggcattcctgatcctgccgggattgaaaaccggggatctttcgctgctgatgctcatccgacggacgtatccgccgtggttcgtcgggttcgtcggcgcggccggcgcggtgacggcgatggttccctcctccgttctcgtgctgtcggcggcggcgcttctttccaagaacgtctaccgggccggcttccgtcccggggcctccgacgcggcggtgatgcgggtctctcgctggatggtcctggcggtcgccacggcggccctggttttcgccctggtcctgcccaatgccctcgtcaatctcctgttgctcggatacgacggcgtggcccagctttttccgggagttgttttgggcctcttttggaaaaaagtcacccggaggggcgtcaccgccggcttggccgcgggaatcgccgccgccgcgttcctcgtcttcgggaaacacgatcctttttgcggcctcaacgccggcttcgtcgcgcttctggtcaatatcctgaccgtgacggtcgtgagcctcgccggccgacgccgtccggcgcctcgcgcaggctgatttacggcccgttttctgttagattaagagcttcccctgggagcgccgtcatgtatgaagacataaaaaacgaagcggaagccctttccggccggatgtcggaatggcggcgcgcgttccatcgccgtccggaaacggccaacaacgagcatgaaacctccgccgccttaaaggcttttttcgagcggctcggccttcccgtccgccggctcgccggaacggggcttcgggccgatttggacggccttcccggcgggcggacggtcgccctgcgggcggatatggatgccttgccgcttgaggaggaaggggagaagccttaccggtcggagattcccggcgcctgccacgcctgcggccacgacggccacttggccggcttgatgggcgcggtccatatcctggccgcccggcgggacaagatccgcggccgggtggtctttctctgccagccggccgaggagcttccgcccgggggggccggcccgatgatcgaggccggagccctcgagggcgtcgacggcattttcggaattcatctctggcaaactcttccgaccggcaagatcggcctggtgaaggggccggtcatggcccaggccgacaacttccgcatcaccgtaaagggacggggcggccatggatcgatgcctcaagccacggccgacccgatcgtcgcggccgggcatctgatcacagccctccagggcatcgtcagccgcaacgtcgatccgttgaagccggccgtcttgtcgttcgggacgatccggggcgggacggtttacaacatcatacccaacgaggtccatctcagcggaacggtccgggcgttcgagccggccgtccaggagttgatgaaaaagaggctgggcgaaatcaccgaggcggtcggccgggccggcggagtccaggcgttcctcgagtacgaggagggatacccgccgctggtgaatccgtccgcctccgttgatttcgccgcccaaacgatcgaagcgctttgggggcgggaggttttcgcgcccttcgccccggtgatgagcggcgaggatttttcacgttatcttcggaaggcgcccggagcgttccttttcttggggataggcgacggaatgccctatcctcatcatcatcccggtttcgacctggacgagcggtccctgccgcgggcggccgccttgctggcggccttggccgtttcgtttttggaacagccggaatgagcttcggcgtcctcctggccttagccctggcgatggccatggacacgttcgccgtggccatcggcgtgagcctggtcatgaagggctgcacgccccggcaaacgttccggctggccgggagcttcgggtcttttcagtttctcatgccccttctcggctggaccgtcggccggaccgtcgtcgatctcgttcgggggttcgatcattggctcgcggccgggctcctggccgtggtcgccggcaagatgatcgttgaggccttggaaaaaaagaaagacggaaaggcggccgggccgtgtcccgacaaaacgcggggagggcatcttctccttttgtccctggccacgagcatcgacgccttggccgtgggattgagccttgcggcgctgaacgtttcagtcgtctatccggcggccgtcatcggcctcgtcacgttcgtcgtctcggccgtgggaacgaaaatcgggccggttttgggtcgctgggcgggcaagagcgcggaattggccggcgctctcgtcctcctggccatcgcggccaagatcctcgtcgagcatctttcctgaggtcggcggcgaggggaacgcttgcccacccggggcggcccgcccgggatcttaaaaaatcgtgtagcggccgtctttcatgatcatttccgtccggccgcgggcgaaggaaaggaccacctcgacgacggcgacccggggctgcatttccgggaggtaaatgcgatcgagatggatgaccgcggccggcgtggaaaaatccttcaagccgatccgtccgccgaaatggtcgctccggccgaaggcgatgtgaaggccgagcttctcgtccaggagaatctcgccgcagggactgaggccgaatttccccaaaaccccgaatcccagctcggccatgttgccgtaggccggctcccgcttcaagtaatccgattcctcttgggctgtcggtccgccctcggcggaaaccgccgtgttcttctcaatcttgtagtaaacgacctcccccccgatttccacgggcaaaacgccggccgtggcgctgggggctttcccctccccttcgtagggaacgatgtaagcctcgccgctggggaggttcccggccgttccgatctcggggaagcggccggtgctcgagtgggcggtccggtggcggaggtcgaaatgcatccgggcttccacccggccgtcgacgaggaaaaggatgtcggcgccgacggccttgtcgagccgggccttgacggcctcgacgtatcgggccacctggacgtaatcgaccctcagggcggggatcatctccggtccgaagccgggcatcgtcgccgcccggaagccgtaatgcttggccgccagcttcaagggggcggtcgtcgagtactcggtgggagcgatgaggatctgagattcggagaagacgtcggcgaacggaacccggagagacgtttccttcaaggaggccgcctcgtcgggaggaatcgttccgcagagataggcgtcggccggcaggtcggcgttgttcgatccgacatcgggatagacataaagccggacatcgtccatggggatgtcccgccgggcgtcgtaaagcgttcccatccagcggaaggccgtctcccgacggcttttccaggccggatggtcggaggacgcggtccgggggacgtcggtgaggatcgagaggatgctgtctcccggatgatgagggaaaacggaccggaccagctccacgagttctttcgcgcttaaggattccatctccccctcccgggttcattatacacgagtcgagggaaaacgcccgcttccctcgatcttttaaaaacgaaccgtgcacccggccgaaatggacgagccccacgttccgtagccgaagacggtttcatagcgtgtgtttccgatgttatcccaacggccgaaaaattcaagccccggggcgggcgtatacgagaggagggcgtcgacgatcgcgtaggggggaaggatgacgggcacggcggcccagcccgtgtagtcgtaatcccggcgctcccccgtggccgcggccgtgagaacggctttccatcccgtcgccggcgtccactcgatcgctcccgagagcttgtccttgggccggcggagaagggagacgccggcgtcgaggtcttcggccgccaggcgcgtgtatccaagccggagcgtcagtctctcgaccgggcgggcatcggccgtgaattcccagccgctggtccgggcccggccgatgttgatgtagccttggaggaaatcgtaatcgatgaggttccggaaatccgattgaaagaaggacgcgccgaggaggatcgctcctcccgcgagcgtctgctccacgcccgcgtcccaccccaacgattcttcgggaagcagatgctcattgccgacgggaccccagagcgtctccggggcgtacaattggtagagcgaaggcgccttgaaggcggttccgatcgtggccttcagcttcgtccccgttttttcgatgaggtaggcgggggccaggcggaaggtcagcgaggtcccgctccggccgtgaaggtcgagccggaggccggccgtggcgaaaaacgcccggcccaggcggaacctgtcctggacgaacactccggcccggtccgcttgacggcgggagaagacgctggcgtacggcccccaaaggctttccgagaaataggccgagtcgcccgtctcccgctcgatctcggctccggccgtcagcgtgtggcccggccggaggaagaggttgttctgccagtccgccctgaaccgggcgctgcggtaacgggcggtctccgagtcgaagggatggctttcgtcgaccgggttgtcgttttcgcgggttgaacggatgtaggcgaagccggctttggattcccaacgccctccggcgctcagggtccggatttgggcccggacgaacccggaccggtaatcctggatgctgttgggatcgtccccgtaggcaccgccgaaggcgtcgagatcggtccgggccgaaacgccccggatgatcaggtcgatctcggtgccgccggccaagaccaggccggcccggccggacagcgtccagttgcgatagccgtcttgttcggtgtttccggcgtaggcgctggaggcggccgaaacgccttcggtcgattcgcgcgacgcgctgaggtcataccggaacgccccggccgacccccggatgtccagtcctccggagagggttccgtgcgaccccccgcgggcgcggaacgtcaccgccggtttccccatcccccggccggtcaggatgttgatgacgcctccgagggcgtccgaaccgtagagggtgctttggggaccgcggaggatttcgatccgttcgacgccgtcgagggtcatgtgggcgaggtcgaaggagcgggacgggttgatcggatcgttcaggggcacgccgtccaggaggacgagaacatgttccgaattcgccccccggacgaaaatggacgaagccgctcccggcccgccgttgcggacgaggcccaagccgggcgtgtcgcggagagcgtcgaggacggaggccgggcgggtccgttcgagatcctcccgggtgatgaccgtgacggcgctggcgatctcgatcaggggcgtttcaaggcgggcggccgtgacgacgatctcgtggctgagaaacgaaggcgtcgtctccggcgaggcgtctttggaagccgcggcttgtccgataagaaccgcgatcgccgggattaagagacagacacgacgggaatggtgataaagggtcatgagaaacctcctcttccgacccgaagattggtttcgctcaagccggtgaaggtttcctggctctcggatcatcctcctcccgggccttcccgccgccttgcggcgaccgtggcgtcttccgggattcgtacccgattacagtagcggggactgcgtccgcttttcacggacttcccttcgctccagctcgcgacgagagtccattctcttcttttcgatttttattgtcaagattatgtacggtgctaaatgcggcctcagaatcatttaggcgtatgagaattatctgcggaaatcgcgtcgtataggttggtgattgatacttgcaatatgtaaccaaaaaaggtacaatcgtacccgaaatgagtacaaatgtacccataatggatacataatgaaaacaccctgtctgatcgacgcgctcttcgggaaaacgaaacggtcaattctggtcttgctcttcggccacgacgatgaagcatttcacttaagaaaaattctgcggctggcgaacatttctcctggagcaggacagagagaactgaaaaagctggcggatgcggggctgatcacccgctccgtcaaggacaaccaggttctctttcagggcaatccgcactgcccgattttcccggaaataaaaatgctcgtgaccaagacggcgggcgcggccgatgttctgagggcggctcttgaccctctaattaaaaggatctccgttgtgctcatttacggctctctcgctcggggctcggccggcaacgaaagcgatcttgatctccttatcgtcggtgaagtaaggttcgaggaaatcgtcaacgctatccacccggttcaggaccgtctcaggcgcgaaatcaatcccctggttatgtcgtccagggaattccgcagaaggctctcccaaggcgatcatctgatccgcgaaattatgaaatcgccgtttattccgatactcggagatccgcatgactttggccgaatggaaaaagaacgaatggctcgtcgaacacttgagccgccgccaagagatcaatcatctcttcaggcttatcgagcgggatctgaaggactgtcgaaataagaagctcagtctcgattggcgtttcaatatcgcttataacgctgcccttcaatgcgcgaacgccgctctggcagccgagggcttccgagccgccaaggattcccatcatttccgagtcatccaatccttgaaattcacgctcgaaattaatgacaaaacgattcgtaaattcgatgtcttccggaagaaacggaatatcagcgagtatgaccgggccgggtcggtatccattgcggaatttgatgaaatgatcgcgttagcggaatttctctacaaatccgcatcctcttggatgaaaaagaatcatgcggaccttatttgacgactgttctgatatacaaacaaatcagctcgtttctccttcgacgattttgatctcctcgtcggtcaggccgtagagctcatagacaagctgatcgatttcccggtcggtggcctcgatttggcgctggaggattgatttttgagagaccgttcctacttcggacaattgcctagaaaaagcgatcatcctttcaaccgtttctaagaaaaacaattttctttctctttccataaaatcttgaatcgggaatgtcttcatatatatataactaggttcataaaatcctcctcttaaccttggaaaaatcattttgaaaaggaaatatgataatttgctattcaatattcctaaaagaaaaatgtcttctaaaggaataatgaaacacttctggttcgcaaaactaaagctataatcaatactaaactcgggcttcgtgcagatattaggataaatgattttaggcttttcaaattccttgtaataagctaccgtatcttgaatctcataccattgataagcgccgggtttcctgccttgccattcctttcctttccaatcttcaggcctaggtattaacttatttttatatggaagtaaatgttcataaattgttggatactcggaaatctttatcccgcgtctggaaaagattaaatatttattacttattggcggcgaatagcgcttgatatcgcgaccggccagaaaaggcttaataatttcggtgctcttccggtcttttcgaacaaggttctctctcgtttcttgatcgatgacaaaagcctcattcaatccagtcaatacacctctaaatattttaccttgcacgtaattctcaagcggaattcccacagataatattttatccaacaatcttcggcttgaatcggccacaagcgaccagcctttatcatcgagcccggatttcgtcataaaaaaagaatttgccccgacgtattcgctcaaatcccgaaaatccaaagaacggatgagggaaacatcaaccttggaacggctggcgccatcgctgccagggctcgttttgcgaatacgcaaaatgcaaggataagtcgtcgcgcctttaaaaaccggcaagtccccaaaatcggtgatttcttcaaggccttgggatttcagccaaaggcgaagcggctcgccgtaattcgcccgcatccatttgttggcgacgatataggagaacaacccatcaggagtcaataacgaaacgcctttttcaataaaatacgtatacaaatcggctgttccggcgtatgtggcgaacgatttccgggcatattccttgaaccgagggccgagaatttcctgccggacatacggcggattgccgatcacgcagtcgaaaccgccggctttcatggcttccgggaagcccgcgttccaatcgaacggattcaccctcttcaattcttccggatcagggatcagccttccgctgaaataatccgggccgatcagcgagttgccgcatttgatgttgttggacaggttcggcaaggcccgtgtttggaaaagcttcatttggtcgccgaaggtctggtcggtctccccttccaggactttgagcagaagcgagagcttcgtgacttcgacggcctggggatcgatgtccacgccgaagacgtgcgtcgtcaaaatccgcttcttttcctcgatggtcaaccgccaatcgcccttgcggctgtcctgataaaccgcctttttatgggattccggcttgtggccctggtaccacgtcaagcagtggtcgagcagccgctggtatgcccccaggagaaacgagccgcttccgcaggccatgtccaaaacccgaagcggcggcccgtttttcccgccggccaactgggccgggcttttgtcttcgatcttttttccgaccgtgtttttgacgatatagtccacgatgtaggccggcgtgtaataaacgccgccggctttccgcacttcgggcttctcctcgattttggcctggtggccttcggtcaggcggatgaccttgcccaggaaccgttcgtaaaccgtgcccaatatttcgacgggcatgacgccgaattggtagggcgatccgtattcaaaatagaggctctggaggatcggtttgatcgccttgtcgtcgattttcaggcacggcgtgagccggtcgggcgcctcggccactcccggctcccgctcgaagtggaacaggcccgagttgtacttgtcatccgccttccggcagaggacgcggacgaaatgagcgtagatttccgtccgctcgcagagcttcagcaattgctcgaagggctcgatgccccggtcctcggccatccgaagaaagacgatccggtcgatggtcaattgaaccgcgaggttcaagtcgtccagggacaggccgggattgcggagggcgatgttgcgggccaggacgtcgcgccagccttcgatttccttcaggaattcggagtccacctccgacgtgccacgcttccgcttggaggccgcgtactggtcgaacgctcccgaccagaccgcctcgcgggagaacacgtcccacagctcccggaagcggtcggggtattcttccgcccggaaatactggatgcgggagtaagacgccttctcgcccggtttcggccgcgggccgcaatcatagacgcccagctcctcaaaatccgtcaggatggagagggcgaccctcgcgctgaagccgtaccggcggagctggtaggccggcccgggatcgaggttgatattgatgccgcattttttggcctcggcgaagaatttcggctgggcgccgacccggaaggtgtaatcgggggctttctgccggccttcgatctccaaactgtcttcagggacgacttcgcggtactgcggagcgatcatcgcggcgttgcgcacgtcccagcccagcgaaatgaaaaacgggtcgatcagttgttggcggatatgggcttctttgacgccgggagcccggaattccagctcgttcgtctcgaagaaacggcacagcttggcgacttcgtccttcccctgatcgaacgatttgctcataaaacccttcctttttaattatcttatgattccgggcggaggaattcaaggcgttggaaaaccgcggcccgacagcggtaagagtcgggggaatggatctttgcgacggaaggacgcggagagacgccggatcgaatcggcatcgccggacttgcgagggcgagaaaatccggccttttacgatgtcgaggccggcggatttcatgaaaaagcgggccgcggaccggagggagggaagggagagataacgaaggcggcccgggcgctttcgcgaccgggccgcctggggaaaaaagaaaaaaactaaaaaaggagaggaggaggggaaaggaggtaacgtctgttcttcattccattgattagtacgatccgggccggcggatcgttgcaatgggcgataagaggttcgcgtgaagacggcggagacaaaaacagcccgcaggatttttcaggagagagatgagatataaaacaactaaccgtctgattttaaaggaattaccgcttcccctttttcctactttttttattatatcacatcatcgatcacaaggcaatatcttttttccaatatccgcattttcgatgaatatgactcgatggcgacgtgtgaaaccgcgcttcggcggctttaaatgcaaatattcggctcgaatgtcccgaaaacagcctggaaaacagtccttttgaccggagggaaggctttgtttagaatgttcttgtttctattcgggagaaaatccatggatcatgagagttttcgccgtcacgcccatgaattcgtcgactggatcgccgattatctcgaaaatatcgagcgctttccggtcatgtcccgggtcaaacccggcgagatccggtcgaagctgcccgcctcgccgcccgaggaaggcgagtcgatggaacgtattttcgccgacttcaaggagatccttcttccggggatgacccattggcagcatcccggctggcatgcctatttcccggccaacaacagcccggaatccattctcggggaaatgctcatggccggcctgggggctcaggggatgagctggctgacgtcgccggcggccacggagttggaggacttggtcatggagtggctccgggggatgctcggtttgccggccggcctccagggtgtaatccaggacaccgcctccacggccaccctggccgccctgatctcggcccgcgaacgggcgacggatttcgaatcgaacgaatccgggctgcggcgtcccctgatcgcgtatgcctcgaccgagacgcattcgagcatcgagaagggcgtcaagatcgccggctacggccgtcaaaacctccgcgtcatcccgacggacgccgccttcgccatgcggccggataagctcgaggaggcgatccgggccgacaaggcggccggcctccagccggcggtcgccgtagccacgttgggaacgacgtcctccggggccgtcgatcctctccggccgatcggggaaatctgcgcccgccacggcgtgtggcttcacgtggatgcggcctacgccggcacggcggccgtctgccccgagaaccgctggatcctggacggggcggaatatctcgattcgtttgtcttcaatccccacaagtggatgttgacgaactttgattgttcggcgtatttcatccgcgatccgggcgccctgatccggacgttcgaaatccatcccgagtatctcaagacaggcgcggatccctatgtcaagaattaccgggactggggaattcccttgggccgtcgcttccgggcgctgaagctttggttcgtcatccggtcgtacgggaccgccggcctccgggcttttgtccgcgaacatctccgcttggcccgcctgttccgggactgggtcgcagccgagccgggattcgaggttccagcgccggtgcatttcgggctggtttgcttccgctggaacggcgggcggaacgaggaggaatccgcgcggatcaacaaggctttgatggaccggctgaacgcctcgggggagatcggcttgactcatacggtcttggggggaaaattcaccctgcgcctggtgatcggctcgcggctgaccgaggaacggcacgtccgccgggcttgggagttgatccgcacgaccgccgccgggattatttcggcttaaacaggcccgagggatccgcgcccaacagcccggctttgaccaggaccggatcggcccggtggaggccccggatttgggcgggggtgagaacccggtaatggcgggcccggtcgagggcgtcgccgatccagctgatgtcgtcgggcgtggtcatccagcggcgggagtcgaaccggcggaggtcgaaggggacggaatactggcggagcgttttctgcccgatcgcgttgaagaagatgtcgaagaaggacatcatcagctcccggatcgtccggtagacgggctcccggaagcggagaacggtgtaattcgatttggcgacgcagccccaggctccgtcgcgctggaaaacggccaagacatggtcgtcgtcgttccaggagcgcatatcgactaaaagcggcggccggccgtgataccggaaggcggcggcggccaagagcgccccctcgaagcagttggctttccgctcccggagaacgcgccggggggacgccgtccccggcgccgggtcgtaggcgaggcggttgagaaaaaactggattttctccggcgggccgagggaagccaggagccttcgctcagccggcgtccagtcggcctcaccgccgcttgtcggcggagaagcccggcctcggcgcgtgtccgcgccttttcccgccgggcggcctcggctcatctgccggcggggattccaggccggcggaaaaattccccggcgggaacgatccggacgttttccggccggacgtccagggagtagatctggatgaccgtgtcctcgttgatcacgccggccggcatgttcgggttggcatagcggatcggcgacggcttgttggagacgagatcgtcccgcaattgtccggcgtccggagtgatcacggcgatgcagacgtcggacgcctggagatactttttcacggcggcgttcacgtcgttccgcgtcaaccgggggagaatccgggcggcttcggccagaaagtcctcgtacccgtagaaacgggaatccatccgccagccgagccgttcatccagggtctgggcgtaaagcttggtgtaattgagaaggtaggtccggacgagctcaaaccgctcctccgagagcccgtcctccacgagccgcttcagctcgcggagcgtctggcggatgacgaaatggcggttggagttgggcaaaggccggatccaaatcgaaaaatactgctgccggcgggcgtgaccgggggccgggaacttgtcgcggccctcgacgaagtgttcgatgtaggcgtaatccccgtagttctgcccgcgctcctcgcggattttctggaacaggagggagacgtgctggcgatgctcgccgaaatgggcgccggcgacccagagggcgaagaaatccttgtcggatttcgtgagcgaaacgggaaagcccatggagatggccgtcccgggcgtgtccttttcggccaggacgaattgaaggcccttgggcatggaggccggcggaagagccagccggggagtgaatccttccgggagcttctcgaagtcccgccggacctcctccgggaatccctccgggtatcccccggccaggccgatggtgatgttcccccggacgaagtgctcccggtagaaggccttcacgtcgtcgagagtcagcccgccgatggtctcgaccgtcccggcgtcggtccggccgaagggatgcccctcgtataacatcaggcccaggatctccttgccgaactgttcgtccatgttgccggtcaaggttttttcgacgaaggccagttgggccgccttcagccggttgaagtcctcttcccggaatcccggatcgaggagcatttccttgaagagagcgtaaaaagcggccaggttgtcccggtggacggtcgccgaaaatacggccgtttccttgtccaggctcagggagacggaggcggccatcgggaaaaaggcccggctgatatcctcagccgtgcgagagcggctgccgccctcggccagcaggttccaggtcaagcggcacaagccgtctttgccggtgggatcctcggctgttccgattttggtcagaatgcggaaggcgacaaggggattgccggggacgggaagcagctcggtcgtcaggcggtccggtccggaggaatcgccgcaggcggccagaaacaccgttcccgccaggacggccgatcccagccacgcggttttcgtcgaccgtgctttcatcgggcgcctcctcccgtcaaggtgacggtcgttgaattttccggccggaagaacttcgccgcggccgcccggatgtcggccggcgtgatccgatcgtacagggcgaacaaccggttgagcgtcccgggatccccggtcaaattgatatagaaggccagggttccggcgactccgtccgtggtgcccagggcgtcggctagggaatatttcatgttcgacttgatccgggccaggtcctcctccgagaccggctcttttttcaaccgttccagttcccggagaatctcggcttcgacatacgccagatcgtcgtcgtttttgacaacggcgctgaagaggagaaggcccggatcgcggttgtcgccgaagcgggcgttgaggctcaggcatttctgctcttcccggaccagccgctggaccagaggagaggaggagtcgaaggcgaccgcggccaaaagatccagggcggctttgtccgaaacagcgtcggaaaaagccggcccgtggaagccgacggccaagcgggcaagcgtcgggcccggccaaggcaggtgggcccgcttgggcgccttttgcggaggctcgacggaggtgacgagctcataattcgatttctcccaggcgccgtagttggctcggactagctccatcagccgggcgtggtcgaagtccccggcgacgagaaggagagtgttatccggggcgtaaaagcgcttcttatagagctggctgtaagcatattggttgggcatgtcctggatgtcccgcaggtagcccaaggtcgtatgcttgtaggaatgggcttcgaaggcggtgtcgcggagcagctcgttcagccgccggcccggattggacacgctggccaggtattcgccctcgatcaccggcgcttccgtcttgatcatctcctcatcgtagtaaaggttgaggaagcggtcggcctcggttcggacgacttcttccaagttgtcccggccggcgaagacgacgtagtagcacgtgtagtcgtccgtcgtgtagccgttcgttccggcgcccagccgggtgaggaaatcgtcataggcagggcgggggacttgcttggtccccttgaacatcatgtgctcgaaaaagtgggcgaacccggacttgccgggctcgacctcgttgcgcgaacccgagcggacgatggtgtaatacgcgatgatgtccggattttcgagcgggatggagacgatcttcaacccgttgtccagttgttcgatgcggaagggataggggaagatgtcggatgccggggccagggtgacggccagggcgagaatgaggcatccggccggaagcttggccgaaaatcggatcatgggcggacctcccgatgccgaagatgatgcgtccggaaatcgcgtcccgggggggacgggcggacgcgcgccattcccgtcgacggtcaggcggggaccgtcagtccaggggcgaaagccatttttcgtatttcggattttttccgcggacgatgtccaggtaggcctggcggagccgcaggctgaccggtcccggcttgccttgcccgatgacggtttcgcgccgcggggtgtttcggtccgagccgtcgatgagctggatgatcgggatgacttccacggccgtcccggtgaaaaaagcttcgtcggctccggtcaggtcgccggtcgaaatcggcccgatttccgtcttgatcccgagatcccgggcgatttcgagaatgctcgtccgggtgatcccctcgaggatggattcggaaagcgcgttggtccggatgacctcgtttttaacgacgaagagattttctccggggccctcggcgatccggccctcgatgttgaggaaaagagcctcgtcggcgccgatggcccgggcctcgagcccggagatggtcgattggacatacgctccgccgagcttggcccgcatgtcgacttggctgtgatgggtccgccgccaagggccgagataaacccggatgccgttgaccgccgtctcgcccatataggatccccattcccaggcggcgatgacgagctccaccggggaggctttggggatcaacccgaggtttccgtacgcgtagtagaaaagcggccggatatagcaggactccatttcgttttcccggacggtctgcttgatcgccgcggtcacttcctccggggtataggggactttcatcttgacgacatccgccgagacgaaaaaccgctcgacgtgttcgggaagacggaaaatctttggcccggaggacgtcccgtaagcccggatgccttcaaaaaccgaggtcccgtaatgaagggcgtggaccatcgggtgcaaggggcgttcggaccagggatagagctttcccatcagccaatatttttttgccttgggaaaatgagtcgtgtcgagcatctctttctccttccgggcggcgggcgttcgcttcagaatgagcggttgtcgaaaactaaaggtaacacaaacggccggaaaggaaaaggtccgcggaacgctctgtttaagccgagtcaatatgtccccctaactgccgagcgaaaatgtcccctttaagggcaaagcaaaaatgtccgcttcgggatgaaggcggacatggaggagacaatcatcttgagccggcccgaagtccagcggatggaagggtttgaacagatcctaaaggggagcccgaagcttaaggcgacggctccgatcatgagggtttgtcgtcgtcaagccaagcggatccttttcccctatcgggaggagggatttaaagggccgatccatcagcgacggaggcggccggccctattttttcccggcggcggctcccggctcgaaaaaaacgcggccgttgaggcggacgagccggaggcggccgtctttctcgagtcgccggccggcgcgctcgacggcttccggcgaagcgcccagggaggcggcgatcctttcggccgtctcgggccgtcgccggacgaaatcaagaatccgggaagggagatccttcgttcgggtccgccgccccggttttttgaaatcggcgatgatttccgccgtttctccgaggaaggcgcggattttttcgagatcccggcggccgaggggccgggcccaagactcggccggaggccggacgatcgtgttgagatggacgcggtcgggccggatccgggcgatggcttttttgagcgcccggagatcggacggacggtcgttgatccctttgacgaaaagaacctccagccagaggcggccgtggaaatgccgccggaacgcggccaggccttcgatgatcgcggccgccgacagacccggatgagggcggttgattttccggaaggcgtcttccgtcgccgcgtcgagcgaggggacgacgatgtcggcggcggccgcgtcctttcggaccgaagggcgggtgaacagggagccgttggtcaggaggaccaccggaaccgcggtcttccgcttgatggcccggatgaggcgtcccagccccggatggagggtcggctcgcccgatccggaaaacgtgatggcgtcgacccggtctccgcgctggagaacgttctcgatcccggccaggacggtttcgactggaatgaaagcccggcgccggacggtcgttcgggcccctccgccgagctgacaatagacgcagtccatcgagcacgttttaaacggcaaaagatccacgccgagggaatacccgagccggcgggacggaaccgggccgtagagaaaagacggtgaagccatgtcgattgtcatcccgggggatatcggatatcatatcctaacatgttctccgggacggttccagatgagcggatacggtaaaaaggaagcgacggccggcctcaaaacccggcttccgtccatcgacgtttttcccaatcaattccgggactatgaaatcacgatcacggttccggaattcacctcggtctgtcccaagacggggctgccggatttcgggacgatcacgatcacctatgtccctcgggactcgtgcctggagctcaaatcgttgaaagaatatttcctggcgtatcgcgatctcggcattttctacgagaacgccgtcaaccggatcctggaggacatcgtcgcggccgcccgtccggtccgggccgcggtaaagggctccttcaacccccggggcggcctcctctccgtcatcgaagcggcctatccgcgggctcaaaaagacgccgggagggcgaagaaacgtccctgacggcgggactcgcggccgtttgaacgcctcccgccgatttcccggatgcccatgagcgcccatcccccgaagaatccgtcgttcggctggagcgacgtgttcatgctcctggtcaccctgatctgggggctgaatttttccatcatcaagatctccctccgggagctttcgccggccggattcaacggcttgcgcctcctcctgacggccgccgtcctcgtcggcttgatggccgcctccggcgagagcttccgcgtcggccgaagcgagttttggaagctggccgcgctcgggatcatgagccacgccctttaccagatcctgttcatcggcgggctgagccggacgacggcctccaactcctcgttcattctgtcgttttcgccggcgatcgtggccttgatcggcggcctcctccgaatcgaaaaagtccgctggggggcggccttgggcatcgtcatctccgcggccggcctctatcttgtgatcgcggggggggaagggggaatccggctattgagcgcgggcttccagggcgacgtgatgattttcgccggaacgattctttggtccttgaacacggttttttcaaaggagttcctcgagcgcctgtcgcccttgaagttcacggcgatcaccgtcggcctcggcgccctggcctacttcccgttctgcgccggcgcgatttcgcggatttcttggcggagcgtttcgccggccgcctgggccggcctcgggttctcggccgtcttcagcttggtcgtcggctacttggtttggtacgtttcggtccggcgggtcggaaacatccggacggccgtttacagcaatctcacgccggtcttcacggccttgttcgccctgctcatcctgggggaagcgctccggccgcgccagatcggcggggcggcggtcattctcctcggtgtttttctcgcccggacggagtacggcttctttctcggggggcgaaacgggatccggcccgccccggtctcgaggggaagcgttgcggcggcggccgctcccgatccgcccgaaaacgccgggcggccggcggatggacccgcggctcagcgcagaccgaaaacgcggtggagctgaacgcccaaccggacgtccccgagccctcgggccgatgcccgccggaggaggcggatcgcccggtcgcggctttccggacggttcgactcgggctggagaaaaaccggaacggaggcgggaaaggcggcccggacgcggccgaccgcgcgaagcgtcagttcccgggagacgacaagtttgacttcgcgggcccgggcgtggaattcgggggcggcatcgtaatccggcggcttgggggagaccgtgaaccaatcgagagggatatctttgaagatcgtcccgtttgtctcgacctggatgcggaatccctcggcccgcaggcgttcggccaagggtccgaagtcctgggtgaacggctcccctccggtcaggcagatccactcgccggaccacggtcttcgcgcttttttcacggcggcggcgacggccgcggccgtcatgagccgcccgcctctccaagcgcttttcgtgtcgcaaaacgagcagcggaggttgcatccggccagccggacgaacaccgccggccttcccatccggagcccttcgccctggattccggcgaagatctcagcgatcttcagcgtaggtcgcccgggcatcctcggactcccagaccgtcaccgcccggaccggaaaacgaggcttgaggtcttcatagaaacgacgggccaggttttccgccgagggattgaagggatagacgtcgttgaggagggtgtggtcaggtaggatttcggccaatccggccttcaagacggcgaagtcgatccccaggccggcggcgtcgagatcggaaacgtcgacctcgacttccacttgaaaagtatgcccgtggattttttcgcatttgccctggtattcgcgcagaaagtgggcggccgagaaacggtcccggactttcaacgtccagctcatggaagttctcctttgcttgtccgcaggacgagaggatcggaacagcctgcttccttgaaagcccgagctctcaggaggcaggcggaacacgagccgcacggccgttccttccctgaatagcaggtgatcgacagggaataatccgcccccaaggccaagcccgtccggatgatctccgacttcttcatcccggcaaacggcgcccggatccggaccggccggccggcggcggccgccgctgtccccgctcggacggcccgttccatggcccggacgaaaacggggcgggtgtcggggtaggccggcgaatcgatgacgttgaagccgcaaacgatctcgttgattccttgcgcttcggcccaagccgcggccaaggccaggaagatcccgttgcgaaaggggacgtacgtgaccggcggtgcggtcgtccggaggcgcgggagccgcttgtggcgcggaacggcgatggatggctcggtcagggcggaaccgccgatctgctccaggtcgattttcaggatcttgtgggggacgcccagccgccgggcgatcgtccgggcggcccggacttccacccggtggcgctgcccgtagtcgaaggtcagggccgagaccttgccgccccggcggagggcccaatggagggcggtcgtggaatccagccctccggagaaaagaaccagggtttttttgcgcatccgcctgccccacgattactatataagaataaggaagcgggttcaaacgagcgacgggaactcatcgtcctcgaggggagggcggccgctgaaatcgaagggccggttccgagttttccggtcaagccaataaaagccttgcccaagagggtattctcttgccatatcaaaaccttaccgaaaccgaggatcgtctaaagattaaaaacggtaagggacgatgcgccggggcaagatttttgtgatttaaggcggcgcgattcgttttcttgacacggtccgggggcgaaggtacacttcgcatccggcggatcgatcatggacgagcgcgatttcccatcgaagaagcggacccttgtcctccgggatgaccaggcggatttttatgcaatcctggacgaagcccggggacggcgccggcggggcgggcgcctccatctgattgatgccgggcgcctcaccgtccttgaattggagcggatctgtctttcgggcgcggatcttttcacctccgataaggccggccgtgcgccggccgacctcgccgtcctgagtgccgccgccgggaaaggcggcggagagatcgctcattttcagcatggccctcttcttgcggaaggagagggcgtcgtcctctccctcagggctctccgcgacgcggcgggcgggagcgtttctctttatctttcgaataaaacggaaaaacggcggacggaggacttggccgttctggccgaggacgcgcggaggggaaaccggcggctgggatactaccaccatggggctccggccgaggctttggaagagctggcccggcgaggggcctggattcatgtgtcggccgccggagccggcgcggatcttccggctctgctcctgctgcgcgacattgcggcgaaggccgccgcggccggggcgggattggtgattcatctggaaagattgattccggagcccgacctcgaggatctccacaaggccggagcttttctcctttttcatgttccgccgagcgattaccggtccccctaccgggcgctccgggcgaaggcgtcccgccgcgtgctcgatccccgggcttactatctttacagcgagttcatgcgctgacatgtccggcttctagacagcactactaatggggggcggcgcggggtctaaacgaataatttgtattttccttgacaaaccctattgacatttcccttaaatgttctataactacttttgaagaacgatgaattgaaaagcggcagcagatgattacgaagcaggggatctatttcaacttgaggcgagggaccgaagagcgaagatgaaagtggctttgctcttcagttcaaaaaaaggaatggccgcctctctgcgtcaaagcgtcgccgaagcgacggcggttctcccggtcgtcgaggacgagggggaggagcctccaccgtcggatacgtttgcggagtgcgactcggacgaaaccatttccgccgtggccgccgccctaggccggcgatatgaagtgatcccgatcgagtccgacgaagacgcctacgcgcggcttcggaacacccggccggatcttgtcttcaacatcgccgagcggttgaccggccccaaccgggaaggccacattccgacgctgtgcgaaatgctggacctgccctacacgggatcggatccgctgacgctgagcctgtgcctggacaaatcgcgggccaaggaaatcctctcgtattacggcgtgccgaatcccgaattccgggtcgtcgagcccggcgaggccgttccggacgggatcaagctgccggcgatcgtcaagcctctctacgagggatcgagcaaggggatcaaaaacaattcttatgtcgccacggcggaggaactggcggcccgcgtccgggaagtgaccggcctttaccgccagcccgtcatcatcgagcggtttctcaccggccgggagttcaccgtgggcgtgttgggcaacatccccaacctcgagatcctgccgatcgtcgagatcgatcattccctccttccccccgaagcccatccgatctattcctacgaagcgaaatggatctgggacactcccgaaaagcccctggcgattttcaagtgtcccgcccggatttcttccggcttggagaaggagatccggacgatcgtcgccgacacctgccggatcctccggatccgcgattgggcccgggtcgatgtccgcctggacgagaaggggcgccctcatattctcgaagtcaatccccttccgggaatccttccgaatcccgaggataattcctgcctgcccaaagccgcccggacggccgggtattcgtacgacgagctcattctccgggtcgtggacgaagcccgctgccgctggggtttggtttcttcccggaaaggccggtcatgagcgccaagtccggcccgaaccttctcgtgggcatcgccttcaacgcctatgacccgctcacggcgaacaaggtcgaccggccgtcggaggaatccgtcgagcaaacggccaaggaagtcttgacggccgtcaccgagctgggctacgccgcgttcatcattcccctgcagaaaagtttcatgaacttctgccagcggctgaagaccctcaacgccgacgtcctcatcaatctctgcgaggcgttcctgggccggccgcagctggaagcgaacgtggccgcggccctcgagctcctgagcgttcccttcaccgggaacgattctcggactctggccctgtgtctcgataaatacaaaaccaaggcggttctgaaatcgttcgggctcccaacgccgccggccgtgctggccgaatccccggatcagaaaatcaaccttcctttccccctgatcgtcaagcccaacaacgaggacgccagcctcggcatccacccggaatccgtcgttcgggatgaggacggcctccgtcggcagcttgggcatatccaggacgtcttcggggaaccggccctcgtcgaggcgtatatcgaagggcgggagttcaacgtcgcggtgagggacgcggagaagaccgaggccctgccggtcagcgagatcgagtttgaaggcatgcccgagaatcagccgaatatctgcagttacgcggccaagtggcatccggacgacgtcctgtttcagtcgacgccgccgcgctgcccggcctcgatcgacgacgggctccggacgctcctccaggaaatcgcggtcaaggccttttccgcctgcgagtgccgggattatgcccgggtggattaccgggtggataaaaaaggacggccgttcatcctggaggtcaatcccaatcctgacatcagcttgaacgccgggtatgcccgggctttgggcgcggccggcgtcgaatataagaatttttggaagcagatgatcgataaggctctgcttcggggagagaagcgatgatccggcccatgacccccgccgaccgcccggccgtcctggccctgatcgaggcgacgggatttttccgaccggacgaaatcgcggtcgccgaggagctgatcgacatcactctcggccggccggagcaggaggactatgccatcgtcgtcgtgacggacgagacgggcgcggtcgccggatatatgacctacggccccaccccgctcacccgggggacgtacgacctgtactggatggccgtcgatcccaaggcccagggccgcggatacggccggattctcgtcgaatggctcgaggaccacgtccgccgggccggcgggcggctgatcgtaatcgaaacgtcctccagcgaaaaatacgagccgacgaggcgtttttacctggggttgaattacaccgaaaccgcccggatccctgatttttacggacccggggacgggcgcgtgatctatacgaagcgagtgagctagaggagaaaggaccatggacgattggtctcaaatcgcaagggggagcctccggacgccggaccaagtggcctgcgcctttgacttggacgtggccgaagtccgccggatttcccgacatttcaaaacgttgatcactccgtactatgccggcttgatcaaaacaaaaggcgatccgatctaccggcaggtcgttccggacccggccgagctggtcgagcacagcggggtttccgaccccctggccgaggaccacgattccccggtccccagcgtcgtccaccggtatcccgaccgcctgttgttcctggtttcccatcggtgcgcctcctactgccggttctgcacgcgcaagcgcaaggtcggcgatccgaagaagatccatccgaaggccatcgaggaaggtctcgagtatatccgaacccacgaggaaatccgggacgtgatcgtttccggcggcgacccgctgatgctcagcgacgcccgcctggaatacatcctgaccaggctgcgggccattcctcacgtggaaatcctccggatcggaacgcgcgttccctgcttcctcccccagcgggtgactccgaaactggcggcgatgctccgcaagtttcacccgctcttcgtcaatgtccacttcaaccacccggacgagctgacccccgaggccaaccaggccctcggcctcctggccgacgccgggatcccgctcggctgccagacggttctcttgaagggagtcaacgacgacccgctggtcatgcggcggctgatgcagaagctcctcatggcccgggtccggccttactacatctatcaggccgactatgtcagcgggacggatcatctccggacgacggtccagaaggggatcgaggtcatggaagccctccgcggctggacctcgggcctggccgttccgtattactgcatcgatgcgcccggaggcggcggaaagatcccgcttctcccgaaatacatccaatcgatctccgacgaacaggtggtcatgcggaatttcgagggggagacgttcgtttacccgcagccgaaatccgatcggcccgctcccgagaaaaaagccccccgcaaggagcggcggccgtcgatcagcccctgctatgatttgaccggcctcccgccgatcgggtgagccgcggcggtcgaagactccggtcattcccccggcgccggcggccggggggcttggtccaagtaatcctgcaggctcgttttccggacgatcgccagggcttcctcggccgttatcccgattttccgccggagcgattccaggatgcggacgatggagagggcgacttcgggagagatggccgcgccctggggccggtccttcaggaaggcgatggaatcgaaaagcacggcgttggcctcggcgtaggagaccgggggccgggcgccgaacgccttcacccattccggtttgcccaggatgtcgttggcgtgaagctgaacgagatacgtcgcccgcccgatcagcttgagattcgaggggctgacgttggtcatcgtgtttcccacgacctttccaagcttggccatgacggccgtagagtgggcgttgaggatcatcttcaaggcgatttgctgacggatccccatcggatcgttttcccgggacacggcgaattcgacgtcgatccggggacttggaaaaacgcctccggccgctttcttctccttatttagatcgcagatggaaaggacgcccagggccgcgcccttttccgccgcgagctcggcgaaccggaaaaacgtggatcgcgggttccggctttccccgatctcgtccccgacgagagccaggatcgccacgtcccctttttggggggctcgcttttggacgtttgttcctccgaaggaaaaatcgtagagggcggcctgatcgtctcccgcccgggcgaggctttgaagggccttgtccctgaggtagacgtcgtcgatttcgttttcgaacggtttgcggaagaacagcggatcgagcccgcgaaagggccgtccgagaaaagcctcccaggcttgagcgcgagcctcggccgccgtccagacctggatccagcttttcctccgcggttcgcggaccgtgtccagcggggccagccggaaggtcgggctgcgctcggtgctgtcgatgaagacggtgatcaaaccctcccgggcgaaatacgtcgacatgcgcccgccggcgtaagcccgggcttcgaggtccgtcaagcgggcgatctctccggccttgcgcttgatttccggaagaagcggggcgaaggccttgagccgatcctcgaggcttgtttcccgggagaagcccaaccggcccatttcctttttcgacagcatcgtccgtaacacccgctcgacggccgtctccagggcgcttccgacgacgaacgtctcgatcgtcgtcgcctgcatccgcgtcgacccggtgatcgcctgggggccggtcgtcagattgatcttggtgatgcccggatcctccaagacgatccggcttcgctcgaacggccggagaaggtcgtccgggttgttgtaaacgaagaacagagctttccgcgattcggcgggatcatatccgggacgggccttccggtcctccagggccgcccggatcgttccgatcaccgatgacgtttcccctccctctgtgacgcagacgacgacgtcccccggcttaatcccgcggtcgtgaagctggaggcggccgatgagctgaagatcctcgaatccctcgagcgagctgatcaaagcccggtcggccccggtcatctcgccgatcaattcgtcttcaacggccggatcgagacgggcggcacatttcgcccagaggcccggttcgttcttcttaaggcccccccagaacggccgccagaaggcgctctcgacttgcttggccagccgtccggtggccccgcagccgtacatgtagatcttccgccggccgagcatcgccgcggcgaacgcctccgtaaggcgctcgacccggccgagctgctccggatcgcggacgaggccgtcgagcttgagggcgatgtcctcgtccactccgaacagcatccgcagcccctcggccgtatcggcggcgatgcggcggccgagcatccaggttttgggatggcgctgctcggtcaggagggtgtgaagctggaagggcgttttttgaacgacatagtcgatggattcggcggagacggcaatgcccaggagctttaaaagattctcttcgccggggccggccgccggggccagaagggcggccgccaggagaaaggcggctgtccgcggccaaggggatttccgctcagccgtattgatgcgtgtcatcgaggatgtctccctcccgccaggctcgggcccaatcgtcgacgagaaaggccgtggagccgccggcggccgtggaacaaacgattcggaccaggccggcgttgatgatcatttttttgcagatgaaacaaggaaaagcgtcgaccggccggccgtccgggacgctcccgaaaatatacatgtcgccgcgaagcaggctgacgcccgcccgggcggcgttgatgatcgcgttctgctcggcgtgaacgctccggcagagctcgtagcgctggccgtgggggatttggagcttgtcccgaaggcagaacccgtgctcgatgctgtcccgcgtttttcggggcgcgccggcgtatcccgtcgagacgatctgatcgtcgcggacgatcagggcgccgatggatcggcgccagcaggtgctccgccgggcgacttcgcgggcgatcccgaggtaatactcatccttggagatgcggggcgtattcataggaaagcctccagccggctgtgcaattcctcgagcgtcccgtcgttgcttacgacggcgtcggccatttcaaaacaacggtggatctgctgggcggccgggttcgagctccgctcctccgcttccttgcggaggaactcctccagggtggcggccgattcgtcccggccgcgccggcgggcgcgctcgaaccggaggggggcgggggcgtcgacggccaggaggatgaatccgtcttccttccggaggcgctcgacctcggccgggttgcggatgctgtcgatgaccgtcggcccggtcacgagcttaagcaggcggcgggccaggatgtcggggccgcctttccggcggagctcgtttcccttggcgatcagatggtcccggtcggccggaaggccggccgcggccagctcttcccggataatgtcggagaggctccggtgggcatagccgcgggcggcgaaaaaagccgcggcctcgcctttgcccgccccgttgggtccggtcaggccgatgagccggggccggagggagctcatgaggcttcctcggcggctgctttttccttcgcccgccgctccctccggtccttccgctccttcccgaagaaaaaggcgacggcgatgcccaggctgtaaagcgccagcatcgggacggccaggatgctctggctgatcatgtcgggcgtcggggtgatgatcgcggcgatgacgaagatgaccaggaccgcgtacttgaacttgcggaccatccatcgcgaggtgatcaatcccattttcgataagaacaggatgaggatcggcagctcgaagacgaggccgatgccgacgagcatcttgatggtcaggttgaagaagtcgttgaccgtgatcaccgcttggaaatccgagccgagctggaggaagaaccggcaggcgaacgggtacgcgatgtaataagcgaacgccgccccgccgatgaagaagacggaagtgaagaggacgaagggaaagacgtatttcttctccttttggtagaggccgggagcgacgaatttccagagctggtagaagatgtacggcgagacggcgaacaaggccgccaggaacgagaccttgatgtagagcatgaagggctcggtcagcgtccggaaggcgagctgttcgccctcgggcagaaaccgggtcagggggcgggagagaaaatggaaaatgtccttgctgaagatgtaagccgggaagacggcgatgaagagggaaagcaccgagcggaagagacgggtccggaggtcttcgagatgctcgaggaaggtcatctcgtcaggagcttttcgagtcttccccattccccgaaagatccttcctgagatcggcttcgcgcaggtcctttttgaggtcggcttggagggatttgaattcctcgacgcggatctgctcttcgaatttttccttgatgtcttcagtggattttttgaattcccggacggccttgccgatggtccggccgatttccgggagcttgcgggggccgaaaatgagcaaggcgagccccatgatgacgatcagttccggcaagccgatatttccgaacatgggcgtttctgattttcgggaaagccttcaaaatatagaccgggaatcaggggaagtcaagaaccgcgcctttacttaggctcgcccggcgtgataagatttgccgtcggaaattcatgaaaaacaagacgttattccttctcctgggggccggcattctgttaggcgccgccgttcgtccgggggatccctgggtggaagggcgggagaaggtcggggccatggccggcctgattcaagccgaatatttccgaacggcggaggcggacaagatggcccgggcggccgtccgggggatgctcgagacgctcgatccccattcgtatctgcttgatccggacaacctggcccggatgtccgaggagcagcggggggcctatttcggcctgggaatccagattcagaagcacatggacaagctcgtcgtgatcgctccgatcgagggcacgcccgcctggaggatgggcctccaagccggcgacaccatcacccatatcgagggcgaaagcacggtcttgatctcggccaacgacgcggtctccaagctccgcggccccaaggggaccaaggtcgcgatcacggtggcccgcgaggggctggaaaagccgttcgatctgacgatcacccgggaggagatccccctgtattcggtcccctacgcctttatgctcgacgaggccacggggtacgtttttatccgctatttcgccgagaacacgaccgccgagctggaggcgaagcttgagacgttgagaaacgcggggatgaaaaacctggtcctcgacctgcggggcaacgtcggcggacccttgttccaggcgatcggcgtcgccgacgaatttctcgcccggggcgagtcgattgtctcgatccggggacggaatcccgatttcgaccgtcaatatccggcgacccgcaacggccagtatgaagccgttcccctggtcgttctcatcagccaagggagcgccagcgcctcggagatcgtcgccggggcggtgatggatcacgaccggggtcttatcctgggcgaggattcctggggcaagagcctggtccaaaagatgttccccctctccgaggatacggccatggccttgaccatcgcccgctattacacgccgagcggccgctccctccagcgagactactctcacctggacgattatttcctcgacaccaaggtcctcgccgaatcggaccgggaagtgaaatacacggacaagggccgcaaggtcctggggcaggggggcatcaccccggacctcacggtcgtcttcaaccttctgccgtataccgccgagctccgcatccgcggcgcgtttttcgcttatgcccgaaaattcacgtcccgccagacgctcctgtccaagaaatttgtctttccagcggatggaaacgccgcccggccggccccggggatgattcagctcagtcgagtctttcttgccgatgcggccgttctggaggatttccgggcttttttgattgagaacaagatgccggccgacgaaacaaaattcaaggaagccgcggtcgaggtcaagcgcgagctcgagcgggaaatcgcttccctgctttgggggggcgaggagggttggcgggcgttcgagaagaacgacccggtgattctgaaagcgctcgaggtcatgcccgaggcggcgaggatgatccaatgaacatcgccctggcttccgaccatgccggtttcgaaatgaaggaaatgatcgcccggtttttaaccgggcggggcgtggatttcgcggatctcgggtcgcgggcgggagaatcggtggactacgtcgattacgccgccgcggccgccgaggccgtcctggccggaacctgcgaccgggcgatcctggtttgcggaacggggatcggcatggccatggcggccaacaagtttccgggcatccgggcgaccgtctgctggacgccggcgacggccgaaatggcccgccggcacaacaactccaactgcctgaccctgggtggacggattttggacaaccagaccgccttggaaatcgtccgggtttggctcgagacgccttttgacggaggccggcacgaacgccggctggccaagatcgccgaaattgaaaagaaatcctgcggttgctgaaaggccgccgttgagtaatgtgattgaggaggacgtgatgactatgccgctgtcggaaaaaaccgcaaagctcgtggaccgcatcgaacgcaacagcctctggcgccaacgggaatgcctcaacctcattccctcggaatcgacgccctcgctgctcgtgaaaatatgcgagatggccgatccgtcgggccgatacgccgagcaccggacgatgaagggcgaggaagtctatttttaccaggggatcgatttcatcaaggacgttgaaattgaagcccgccgggagctagccgcctttttcggctgcgtcgacgtcgagctccggcccgtcagcgggcagatggccaacgagatcgtcttcaagggcgtcacgaagttcctgaaccggggccgggccgagggccaagtctcccgccggatgcgcttggtgatgaacaacgacctgggcaagggaggccatctcagctcccagccgatgggcgcgctttataattggatcgaggaagatccggctacgggcaaggagaacgtggtcaactttcccgtccggaaagacaacccctacaagatcgaccttgaggcgctggccgcgcttctcgaggtcaagaagcccgagctgatcgtcttcggcaagagcatgttccttcatcccgagccggtcgccttcgccgccgggatcgtcaaggactggccgaagcgcccggtgatcatgtacgacatggcccacgtcctgggcctttacggggcctttcaggagccgtttcaggacggcgccgacatcgtgaccgggagcacccacaagaccttcttcggtccccagcgcgggctcgtggccggaaacatcgctccgtcctcgccgctgaaaaatctctggaccgacatccgtggccgggctttccccggctcgacttcgaatcaccacctggccaccctgctgggtctcctgatggcttcttatgagatgaacgccttcaaaaaggagcttcagaccgcggtccgggccaatgccaaatcattcgccgcctcgctcaaggcccagggcattccggtcgagggcgacccggccgacggatacacggacacccaccaagtgatcatccgggtcagctccttcggtcccggcatggagatcgcccgccggctggaggacaacaacatcgtgacgaactaccaggccctccccgacgacgagacgttcctcgtttcgagcggcatccggatgggggtccaggaaatgacccggttcggaatgacggggaaggatttcgacgtcgtcgccggcttgatcgccgactgcgtcatccgcaaccgccgggtcaaggacgacgtcgcggcgttccgccggaagttctccgagatgaagtactgtctgccggccgcggaagccgtgcccttggccgcccgcgtcttcgccgcggcgatgccggcctcaaacatcggccgggcgttcgccgaggccgtcgggcgcgtctcttaagccgtcccttcgggaaggagcggaacgatgaaagccttggtggtcgggtcgggcggccgggaacacgcgctggcttggaaaatcgccaagagcccgaagatctcgaaagtcttctgcgctccgggcaacggcggaacccggctggtggccgaaaatgttcccatctcggaaaccgatatcccggcgctggccgatttcgcggtcaaggaggagatcgacctgacggtcgtcggcccggaaatccccctctcgctggggatcgtcgatgaattcgagaagcgcggcctccgcattttcggcccgtccaagaaggcggtcgagctggaggccagcaaggtcttcgccaagcagttcatggaccggcaccgcatcccgacggggaagttccggatcgccgattccccggagtcggcccgggccgtgctggccgggggggaattcggctttccggtcgttctcaaagccgacggcctggccgccggcaagggtgtcctggtctgccgcaatgaggaagaagccgaggccggggtgaaggagatcatggtcgagaagcggttcggcggcgccggagggcggatcctgatcgaggagtttctccggggccgcgaggtttctttcatcgtgatcgccgacggggccaaagctattcccctggtgacgacgatggaccacaaaaccgtctttgacggcggaaaggggccgaacacgggagggatggggtcgatttccccctcgcccttcttggaccgaaagatgtacgcccgaatcatgtcgacgatcatcctcccgacggtcacccggatgctcgaggaagggcggaaatacaagggcgctctctacgccggcctgatgctgacggccgacggacccaaggtcttggaatacaattgccggttcggcgacccggaaacgcagccccagatgctccgtctcgaaagcgatttcgtcgatctccttatggcttccatcgccgaggatatcctggccgacgaagtgacctggaaccgccgggccgcgggctgcgtcgtcctggcttcgggagggtatcccggatcctatgagaaaggcaagaccatccaggggctggaggacgccgatcgcctgggagcggtcgttttccatgccggcacgaagttcgaaaaaggccggtatcggaccgaaggcggccgggtgctgggcgtctgcgccgccgaaccgcgtctgtcggaaacgatgaaccggatttaccgggccgtcgaaaagatttcgttcgaggggatgcaataccggcgcgacatcggggcgttcgaatccgccccgtaatccggccggggcttgagaggaggagaatcatggatgtcgtgatcttgatcggctccgcgtcggacctggacgtcgccggggaagcgctcgagatcctgaagcaattcggcgtgacgcatgttctggaggtcacgtccgcccaccgttcgccggagaggacgatcgagctcatccgccgcttcgaggacggcggggccgaggtttttatcgccgtcgccggaaaggccgcccacttggccgggatcgtcgccgcccatacgatccgtccggtcatcggcgttccggtcgaaagcggggggcttggcgggctcgacgcgcttctctccacggtccaaatgcccaagggcattcccgtggcgacgatgggaacgggaaaatcgggcgcggccaacgcggccctgctggccgtccagattctcgccctgaagagcccggacctccgaacccggctcgccgcccacaaagccggaatggccgcccaggtcgaagccgattcgaaaaaagcccgccagagtctatgacctcgtttttcatccatccgttcggctgccgcgtcaatcaggccgaggcgttcgactgggcggcggcgctccagaagaaaggctggcggctggccgaagaggattcgcagggcgagatcgttatcatcaacacctgcaccctgaccgcccgggccgaccgggacgggcgccggtacatccgcaaaatcgctcaggagaatccccgggcgcgtctcgtcgtcaccggctgcctggccgagcgcgatccggagggcgtgaaagctctgcccggcgtttggcgagtcgtcgccaacgcggacaaggatgcgcttgccggacagtgcgccgccggggagtcgccggagacggcggtccgggccgaagagccggtttcttatcgcgtccgggcgctggtcaaagcccaggacggctgcgatatggcttgcgcgttctgcgtcattccctccgtgcgggggcggagccgcagcgtcccggtcctggacctttggacgcgcgtcgaggagttagtctccgccgggtatgcggaaatcgtcctggccggaattcacctttgttcttatgggcgggacctccggccgccgtcctctctccttgagcttctttccggaatcgaggagcttccgggggatttccgccttcgcctgagctcgcttgatccccggctcctttcccgccccctcctggatttcctgaccggatcgcggcggatcgcgccgcacttccacctgtccctccagcacggggcggaccggattctgcggttgatgggacgcgagagcacgaacgcgtcctatcgcgaactttgcgccgagctcgagcggcgatccccggaagcgaacctcggggcggatatcatcgtcggttttccgggcgagaccgaacgcaactacgaggagacggtccggctgctcgaggaatcccctttggcttatgcccacgttttctcctattccgcccgccccgggaccaaagccgcggaacggccggccgtggatcgggcgacggtcaaatcccgggccgaccggctgcgccgcctgtccggaagaaaaaacctcgcctatcggcgccggctgatcggacggacgcttcccggcgtcgtcatccagtcgaaaccgggcggattggaggtcctgacgtccaactacgtggacgtgcttgtctccggggcggccgcgcccttgggatcgccggtccacgtccgcatcgccgccgctggcgagcgggacacgaccggagaactccgaggccgggacggcttccgctcatgacccgcatcgccgtcctgccggatgccctggcccggaaaatcgccgccggcgaggtgatcgaacggccggtgtcggtggtcaaggagcttgtcgaaaacgccctggacgcgggggcttcggccgtggccgtcgacctcgcggccggggggaaatcgcttctccgcgtccgagacgacggctgcgggatgagccgggaggacgcggccttggctctcgtccgccacgccacgagcaagatttccaaggaagacgatctgttcgccatcgctaccctcgggttccggggagaagctctggcttccatcgccgccgtctcccggctgactctccgcacctccgagggaggcgacgagcccggcacccttgtcgagagcgagcccggcggcgccttccaggtccgggattcggctttcccgcgggggacggaagtcgaggtcagggatctctttgccaaccttcccgcccggaaaaaattcctgaggagcgattcctccgagcttgggttgatcgtcaagatgcttacgaacatcgctttggcccgtccggggctgcgcctgattgtccgtcatggcgcccggaccgtcctggattgcccgccggcggccggcctccgggagcggctttttcagctcttcggcaaggacgctctcgataagatgatggaggcggacctggccgacggtccggttcgagtttcaggttacgtctctcgtccgccgtacggacgcccgaaccgcggccgccaggcttttttcgtcaaccgccggccggtgcgggacaagatcctttcggccgctctccaacaggccttctccggacttctggaaaaagggctattcccggaggcgtttctcttcgtcgacattcctccgggcgaagtcgacgtcaatgtccatccggccaaaaccgaggtccggttcagggacgcccagctctttttccccctgcttcggagggtggtcgagagggcccggacccgggttctgggggtgagggatctttccgagatcctggcggacggggccggagtcccgccgggcggaaggccggcccccgccggaacggagaatggagagggcgccgggccggaaagggaggagcccgaatgttccggcgtcggcgaggggggccggacatacatccggggaacggatttcgcggattttcccgccgccggagtccttccgcgggcggcggaatccccccaagtcctgggacagcttggatcggcctacattttggccgaggaggccggcgatcttctcatcatcgaccagcacaacgcccacgaaagggtgatctatgaccgttacgttgaaatcgaccgggaaaggaaatggccggttaaaatgagcctccttcccctcgttttcgagctttccccggttcaggaaatcggcctggaggaagccgggccgatgcttcgctcctcgggcttccgggtcgaaccgatgggcgggcggagctacgccctccgcgagtatcccgatgttttccggccggaggaagccttgtccgttgtgctggccgccgccgacgaatccaagaaaggggcgcccgcgccggccaaggaccggctcctggcggcgatggcctgcaagtcggcggtcaaagcgggggaatacctgccgcgcgaaaaaatggaattcctcgttcgagagcttttccggtcggccaatcccggcgtctgcccccacggccgacccatcgtcgtccgcatcccccgctcccagatcgagcgcggccttcgacggccggtctcggatcccgcctcctaacccgcacgatttataaatcttttaagattcttctttcttgcttttattttattaaaaggaaaataggatgatttacctttcgggcaagccgatggaaccgcctctgcttcgttgcgaagggcttgagggagacgcaggcatcccggcttgtgaagaaagcaggcgaaacgccgggcggagactcccgatccgaacccgttttctttccccggaagcgcgtcttttcatcaagggccccggtttgacgatgcccgggctatctgctataaaaatcggggacacgcgccccgtcccggaaaaagggccgcgtcttccttcgcgcggggagtggcgcagcctggttagcgcgcttgccttgggagcaagaggtcgacggttcgaatccgtcctccccgattttttttcggaatggcctcaagcgccggtccggcgcgcctgtagctcaggtggatagagcagctgccttctaagcagcgggtcgggagttcgagtctctccaggcgcgctttttattccgcggaaattccgccggttttttggattcgcggagcgccgcaacggccgcgataagagaccgtttcgcgcccgctccgcgccaaggatcgatcgagtaggcctcccgtttcgacgtcccgcgccgcggaccggcgttaaaactctctgaggcacggacgccggacgaaccttggttacggtggattcagaaccccgggaattcccccgtctcgggcggcccggccgggaaaggtcggggcgttaaggcggagaacaatccttccttttcgaagtaagcggccatttcctcgacggcctgccggaaggtgcgtttgggacgatatccaagatcgcgttcggcgttttcatgcgtgtagaaaagaggctgggagccggccttaaccatggcccggctgaggaggcagggccttctccggaccgcggcgacgagctcggaagcgcgggccgccgcccaggccggccccgagggaacgatcatcgagggccgcttgatttttttctcgggataccgccggccgagaacctcggcgatggtccgggcgatgtccgtaaaatggagatcgtccttcctcgggccgttgatgatgtaagcgctgccggcggccgccgagaccaggcacaggagatggccttcgacgacatccatcacgtgagtcgcggaaaagccgcccttgaggatccccggcaaggcgccgtggtagatccggaggaggtaaatcccgttgccgccgagaacgtcgtaagggccgaagcacgtccccggaagaaccgagacgacgttgaggccgtggtcacggacgtagcggttcacgagctcctgggcggccagcttggaatcgaagtagccgattccgatcctcttttcccaaggtgatgaccggcgctcgcggaccatgtcgataaacgacagagtctcctcccgggaacgaaaagcgtgcagcctcggccggttggtgtagggatcggaattctcgaagttgccggcggatccggccgggttcggaacgccgaggacgttgacggtgctcgtaaaggacgttttcttgatggtcggcgatcgccggacggactccaaaaggttgcgtgtcccctccacgttgatcatccattgaagcctcttgctccgcggatcaaacgaggtcgaggcggccgcatgaaagacataatcgatccccgcgcaggcccgctcgacgtcgtccgggttgaggatgttccccggcgcgtaatccaagccggggatgtcgcggagcgaccgggtggtcgaaccttggagatagaatacgcggatggcggccgggtccatggccaggttttggacaaggtgatggatcaaggcgcttccgagatgacccgtcccccccgtgacgagaacgcgtttttttttgaagaatgccttcatcgcggagcttgcttcgtcagggaaagatgtcctggatcgtaaaatcaacccagaaaagaccgaaagcgttgggcacgaccgcccggatggcatccccgatattccggggcgggtcggccagcaagctccaccaaggcttatcggcctcgtatccgaactggaatccaaccgagctcggccagaaatgctcgccccaggccttgaattcactcgccatctggcccaatgagccgaattgctggctgtcattgatgaaccagagcccgagccgaaagcggggcggcattttgtcgataagccagtgcttcaggaaaagggtataggccgggttataggatcggacccggagactccagagcaaggcgctcaggtcgttcacgcgcctgccctcggggtgggccgaatccgttttgtaccattcgacgtccacgccgacgcccttgacgcagggatgatggccgtagcggcggagaacgaggtcgatgagcttcgggaccgaggcccggccgggctcgacctggagccaaaccgagagatccagggcatcaaagaagctcaaggcggcttcgttctggtcttcgtcgaggaaatgaatagagggataatcgccgcccggagaaggaaagttcaacccgcaatcgccgttgtcgaggaagacgccgacgatccagacgcatcccatgccggcgccgggaaagcgggaagccattcccgcgccgacggacgcccaatacgcggggtccgggaagggatcgaccccgtagcgcgaggcccggaatccggccaggagacggtcggtcgcgacgtcgaggatcactttgatcttcagaggcgagttgaccgcgaacttggccttgatcatgaacgagctttcgtatctccccggctcaaggccggcgggatcgacggtgacggtcacggtgccgtcattcacgcctgaaaggggactgatcttgagccagggcgcgccgccggagatccgccagctcagcgtcgcgccgccgttgttgaagatgcggataatcgtggcctggggcccggccgagggattcgtgtggcaatgaatcgagctcgcatcgcatccgatcttcggacgaagataagcgccggcggccgccgccaacagcaacacaccggcgatcacacgcccgaaagccccgatgttcatggttcccttctcccggaggcggtttcatgatagccaatgtcgcgggggaggtcaatcgaatgagacgccgttctgatcggttgcgcggcaaggccgaagctcggcgtctctcgcgagagaaaggccgcggccggcccgccggcctgacggatcaaatcaacgtcccggcgatttccaggaaggcctggacgatctccggatcaaactgcgtcccggcgtattttgtaatttccgcgacggcggtctcgtggctcaaggcgctgcgataaggccggtggctggtcatggcatcgtaggcgtcggccacggtgatgatccgggaaaggaagggaatgtctttcccccggaggccgtccggatatccgcttccgtcgaatcgctcgtgatgatggcggatgaccggccggatcttgtccaggaaagccaccggcttgatgatttcctcgcccacgaccgggtggtttttgatcagggcgaattcgagatcgctcagcttcgtgggcttgtgcaggacttccttgatgacgccgattttcccgatgtcgtgaaggatcccggcgaacttcaaggtgtcgatccgttcccgggtcagccggatgcgcttggcgattttgacggcgattttcgtgacccggtcggaatggccccgggtgtattcatcgttggcctcgatcgccagggacagggcctggacggtttcgaagtatgtccgtttcacgctgccgtaaagcttcgcgttctccatggcgatgccggcttcgtcggccaaggtggccagcacgctgaaatcgtttcggtcgtaccgctcctcggaccgtttttcccccaggaacaggatgccgtccaattcccctttgacgaagatcggaaggatgacctcggcccggagggcggacacttcgcccgggaggttcttgtagacgttttccgaccgtagccgcttgatgtcgtcggtcgtgatgattttattggttgtgttcagcacccggacgatgtcgttgaaatcatcgaatccgatcttatgaaggggagagtccaagccggtggaggcgacgatcttgaaccgtccgcgctgttcgtcccggagcatgacggccaggttcttggccctcaggatgcccgagatggagacgagcagatcgaccagctcccggagatcgaggacggaaccgagggagcgggtgaatttggccagggcgtcctggtaatcgacctttccccgggcaaaaatccggtcgattgttttttcgatgagcgtccgcacgggttgaaaagtgagagcgatgatgaaggcggcgatgattttttccgccagggaggagtatccggtaagcgaccggaacacgacctcgaaaatcaggatgatggcgatgtagacgccgatgacgaacgtgctgagaatcgtatacagggcggtccgcttgacaatgacgtcgatgttcatcaagtggtgccggaggatcgcataggcggtcaacagaacgtaggtgacttcaaacacgtagatgaatttcgtggacaagccggggacgaacgtgatgatgacaaaccaagcgaccgcggagagaatccccatgaagatcgcgaagccgaaatacgtcagacggactcgttgggccaggttgacggttttccgggcgatgaacaagtgcctcaagccgaaaaagatgctcgccaacacggccgtgatttccacgtaaaggagtttgcccggaaattctttgaacggctccacctggattctttcgatcaagagcggcgtcggcgccagaaaaagaaggaggacggcgacggcgacgaaaacgcggaagatcttcgtccggacgatttccctgaagctcaggcccgtcaacgtcaaatagaaaagaatgaaccagggggcgatcaggatccccccgatctgggagaggcggtcgtagatcaatccggcggatatccgcgggcccatcaggggaatgacgaagtcgccgctgttccagaaaaaaatcagaatgttgaaaacaaggaaataccggttgaccggattgtttttccccttgatatagacgaaaacgccggtcaagagacatagcaacgcggagagaaaagcggtgagcggcatggagttcaggagttcgcgagccagagagaggcatcggcgaaggcgcggatcgcgtgatccagctccgaccgggtgtggccggccgtgcaggtgacccgaacggtggcctggcccttggggaccgccggataataaaacggctgaacccaaacgccttgatggaacagccgctgggcgaaggcgcagactttcacgtcgtctccgatcaaaatcgggatgatgtgtccgttcggattgaggatcttgtacccgatctccgtcaaagcccggcggaggtaagcgacattttcccagagctttttctgatactcccggccttcgcggccgaggatctcgagcgccttcagcaggctggccgcgctgaccggcgggatgttgtacgtgaacatgtagggccacgcgtcggtgtgggcggcctggagcagatagcgcttgccgacgacgaacgccccgatgttcccgaaggccatctggaacgggcacatgatcaagtccatctcgtccagcacgccgaaatgatcggccgcgccgcgcagccggtcgccatacacgccgatcccgtgggcgtcgtcgatgaaaatgcgggctttgtacttccgggccaggacggcgatttcgtcgagcttcgccaaaagaccgttggagctgaaaacgcccagagtgacgatccacttttccggctcgtcccggtgtttctgaagcagccgctccagatcgctcatgtcgttgttggaaaaccggaaatattttttctgcgacatgaggcaggcgtggtggatgctcaaatggcatttctggtcgaggaaaatcgtcgcgttccgggggagaagcgaggtgatgagggccaagttggccagatagccggagttgaagatcaggacgctttccttgcccatgaattcggccagcgccccttccagttccatgtggatgctcaagtttcccatggagaggcgggaggaaaatccaccggcgccgtatttgcggatcgcctcgcaggcggtctttttgatttccgggttctgggcgaaattgaaataatcgaccgaggccaggctgaggatgcttttcccccgaaaaacgacctcggccccgtccggctggtcgtaggctttttcgtggggatataatcccttttccttcaagaaccggaccaagttgtgatagggagacgttttttccacgcgccggtcgtgcttccgccggtcgccgatccggcgctccgattcaacggcctggtgttgagatcggcggcggtcgcttccgcgccggtcgtttcctgttcgattgtctttcgggagagggcttcgggggcgtatcggatcggggggcggtgttttttcagacattcaaggcgctcctgtgagaaagaataaacagcccgaggacggccggtttggtgttcttgtttgagcgagggaacggaaagcggggatcgatgggcgggcggagagcaatcgttttcttcagggtcctcaaattgaccttttccgtcgaaaagccgtctttaaatctcgacccaaaaacgcctaattcgtccggattgtaaaggaaataattagataagtaaaggaaaaataaagaggcgcggttttccccggccgctttgacaacggcccggcgctttggtatacgttttccccattgggattatgatgtccgccgaaacgccgttggaccggagggcgacatgaatcaaggcctctctctcccgggctggatctccttcatttgcggctggggcgtcatcctcggcttaagcgtttattgcatgtcccgtgttcttttcaccaagaagaaagcggtcgtggaaacggggccgggcgggcggcccgaccgctgggccacccgcatcggactggttctggccatggctggaaacgccatcggcttgggcaattttctccgctttccggccaaggccgcctccaacggcggcggggctttcctgattccgtacttctgcgccctcatcctgatgggcgttccgatgatgtgggtcgagtggacgatcggccggcacggcggagcccacggccacggctcgggcccggggatgttccaggtgatgtggaagcatccgttctccaagtacatcggggcgttcggcattttcatcccgttcgcggtggccgtttattacttgttcatcatggcttggtgtttgggctatgcttggttttcggcgacgggacgatatttcgggctggtcaatcaagaggcgatgtcctcctttctaaaaggatttcagggcgttgagtcgaaccggtatttttcctcgctcatccccgccttactctttctggccgtctgcttggcgatgaattacttctttctcagccggggcatctccaagggaatcgaggtcctggcccgccacggcatgcccctgcttttcctcttcggcgtcattctcgtcatccgcgtcctgacgctcggcactcccgatccggcccatcccgattggaacatcgccaacggcatgggttttatgtggaatccggatttcagccgcttgacccagggctcggtctggctggtcgcggccggccagatttttttcaccctgagcctgggccaggggatgatcctgacgtatgcctcctatgtccgggaaaaccaggacatcaccctcaacggcttggccacgtcgacggtcaacgagttcgccgaggtcgtcctgggggggacgatcgccatccccgtggccgtcgcctttttcggcctggcccaaaccgaggttatcgcccggggcggggccttcgacctgggattcgtctctcttcccctcatcttccagaagatcccgttcggccagttgttcggggcgatgtggttcctccttcttttcatcgccggcatcacgacatcggtggcttttctccaaccgctggtggccttcttgaccgaggaattccatatttcccggaagaaggcggtcaaccgcagctttctgttcctgatcggggccgtccttttcgtcgtctttttcttccggttcggcgtcctggatgagttcgacttttggatcagcacgttcggcatcgtcgtgttcggagcgctcgagatcatcgtgttctcctggatcttcggcctcaagaacggctgggaggagatgcacaagggcgcggatttcaaaatcccgggcgtcttcaaattcatcctgaagtacatcacccccgcttacatgctggttatcctcggcgtttggacctggcaggacgccgtcggcaaattcctgatgaagggagaaccggccgagcggcgcccctatctttgggccgcccgtcttctcatggccttgatcattctttcgatctgcctgttggtccgcaaggcctggaggaaaaaaagccccgtcgcgccctccttcccccggggggattgacgaaccggccggagagggtcggccggattgggcaaagcggggcggggatccggctttttctcccgccggctgaacgattgacctggaacgggtaaacagacgataatcttggggggtgaaaagcgtctttctataaaagggagggccgcgcccccggcgattgacattatttgtcaatacggataaacatgatacactgaggttgccaatggcctcgacaatcggcgacgttcttctgaaggaaaagatcctgacggctgaacagctgaaaaccgcccaggatttccagaaaaaacacgacattctcctgagctcggccatcgtctctctcaattacgtcagcggcgaggaaatggcccagggattgagccggcagctcggatatccctacatcgacctggaccagttcgaggtctatcccgatgtcatcagcttgatcacggccgatacggccaagaaatcgctgatcatgccgatccaccggattcgatcattcctgaccctggccatggtcgatccgaccgacatggacgtcatcgaggacatccgtttccggacggggctgagcatccagccggtcatcgcttccgaaagcagcatcctcaacgccataaacaagtactacggcgcgggcacggccctccgggtgaagaagaacatcgaggaaatcgagctggcggacgattcgaaaatcagcgccatcgatcagctcgaggagatcaaggacgagcccgacgaggaggagatcgaggaggttccggacgaggcgccgatcatcaccctggtcaacaacatcttcgtcgaagccatcaagaaaggcgccagcgacgttcacttcgagccttatgagaagtctttccgcgtccggtaccggatcgacggcattctctatgaaaccatgaacctgcccttgaagttcaagaacccgctcacctcccgggtcaagatcatgtccaacatggacatcgccgaaaagcgcctgccccaggacggccggatcaagatgcgggccaagctggacaaggcggtgaagaaagaagtcgacatgcggatttcctgcctgccgacgattttcggggaaaaaatcgtcgcccgaatcctcgaccgggacaacttgaacatcgacctgaacaagctcggcttcgagtccgagtcgctggccgtcttccagcgggccatcgcccggccgtggggcatcatcctggtctcgggccccaccggaagcgggaaaaccaacaccctctattcggccatctcgacgctcaacgggatggaaaagaacatcatgacggccgaggatccggtcgagttttacatccccggcatcaaccaggtcaacatccgggacgagatcaacctgaatttcgccgccgccctccgggccttcctccgccaggatccggacatcatgctgatcggcgagatgcgcgaccaggaaaccgtcgacgtggccatcaaggccgccctgaccggccacctcgtcttttccaccattcatacgaacgactcggcggccacgattcaccggctgatgaacatgaatatcgagccgttcctcatcgccgactcgctcgctctcgtcgtcgcccagcgcttggtccgccgcgtctgcaagaaatgcgccgctccgacgaagctgccggtcaaatcgctggtcgagatgggcttcacctccgaggaagccgaaaaggcggcggtcatgcagggccgcgggtgcgatatctgccataattcgggctacaagggccggaccgctctgttcgaggtcatggaactcaatccgaccctccgggaaatgatccttcttcgagcccaatccaaggagatcaagcaaaaagctgtggaggccggcatgatcacgatgcggaggagcggattgataaagatcatggccggcatcaccacgccggaagaagtccttcgcgaaaccgtgcgagattaggagccattcgatgccgctttcgatgcatgagcttctcaagatggcggtcgatgccgacgccagcgacctgcacctgacgacttcggtccctccccgtctccgggtccacggcgaattgaagtccatctcccatccgcccctcaccgccacggagacgaagcagctcgtctacagcatcctgacggacaagcaaaaaaagctgttcgaggagaaaatggaactcgatttctccttcggcgtcaaggatctgggccggtttcgggcgaatgtgttcatgcagaagggcagcgtggccgcggccatccggcgcttcctcccgtcgatgtggagttttcagcggctcggcatcccttcccgcatcgcccagctctgctttctgccccgcggactgattttgatcaccggcccgaccgggagcggcaagtcgacgaccctggcttgcatgatcgaccacatcaacaccgagcgggcggtccacatcatcaccatcgaggacccgatcgaatacttcttcaccccgaaaaaggcgctcatcaatcagcgcgagcttttgtccgacaccctctcctactccaacgcccttcgctcggtccttcgggaggatcccgacgtggttctggtcggcgagatgcgcgatcaggaaaccgtcgaggccactctccgggtcgccgagacgggccacttgactttttccactctgcacacgaactcggccccggagacgatctcccggatcatcgacatcttccccccccagtaccaagcccaggcgcgggtcatgctctcgatgtccctggaaggcgtcatgtgccagtcgctcctgccccgggcggatggaacagggcgggtcctggcgatggagatcctcattccgaatccggccgttcgcaacctgatccgggaaaacaagatccatcagatctattcccagatgcagcttggccaggaaaagttcggcatgctgacgttcaaccagaacctctgcgatctccattgccggaaagtcatcacgctcgagacggccatgtccgccacgtcgaatcccgaggagctgaccgacctgatccagcggcgggcggcgggcgtgggagtggcggtcaaacgctgaccgcggagggaaacgatgccggtttatatttggaaaggcaccaacaagttcggggacggagtggagggggagcgggtggccgccaacgccgaggagttggcccgccttctccaacgggaacagatcaaggtcgagaagatctccccggtccgggggaaattcaacctgccgttcttgaaaggggagaaagtcaagcagaaggacctggcgattttcgcccgccaaatggccgtcctgatcgacgccgagcttcccctgatccagggcttgaacatcatggccgaacagacccgcaatgcctatttcaagcgggtcatcacccaggtccgggcggaagtcgaggcagggtcgagcctggaccaggctcttcgcaagtttccgaaagtcttcgacgatctcttctgcaacctgatcgcctcgggcgagcagagcggaaccttggacacgatgcttcagcggctggccgattacatcgaaaactcggtcaagctgaaggctaaggtcaagcaggcgatgacctatcccgtggcgattttcgcctttgccattatcgtcgcggttttcatgttgtggaaggtcatcccgacgttcgcccaaatattcgtcgacctgggcgcccagctgccggggctgacggcgttcatcatgaacctctccgaattcgtccagaagtacatcctcttcctggtcctggggacggtcggagccctctttctcttccgctactaccggaaaacccagggggggcggtggacgaccgacggccttctccttcgcttgcccctgttcggatcgctgttgacgaaagtcgcgatctcccggatcacccggacgctgagcactctcctgggcggcggcgtgtcgatgctcgagagcatcaagatcacggcgaccacggccggcaacgtcatcctggaaaagagcgtcatggacatccgaaaacaggtgaccgagggccgaagtctgaccgattcgatcaaaagcaccggccggttcccgttcatgatgacccagatggtgagcgtcggcgaagcgacgggcaccctggacaagatgctcaccaagctggccgacttctacgacagcgaagtcgacaacacggtcggaacgcttctctccgtcctcgagccgttcatgatggtcttcatcggcggcctcgtcgggacgttgatcatctcgatgtatctgccgatcttcagcctgatgggccagattcaataatccggcgatgaggaccctcaagtccaacgtccgctggcttctcatctggcggctcgtcgtgatcacgtcgctgttcgtcgcggcggtcgtgattcagctggccacggcctcttttttgccgctgtccccgttctatttcctgatcgtgaccgagtacgccacgggtctcgtgtttttcctgctgcttctgttcaacacgcgctaccgggcccaagcctacgcccagatcctgatcgacctcgcggtcatcaccggactggtctatatctcggggggcgtcggcggccagctttattttctctatgtcttcgcgatcatcgccgccggcttggtcctgggaggccgggcggccttgatgaccgcggccttttcagcgatcgttttcggggccgttgccgacagcctggcgtacggctggattctctatttccggcccgaccagggagcggaaatcgagatcggccaggtgctctacacggtgttcatggcctgggggctgttcggcgtcatcgccgtcttgatcgccaaactgtcctcgagcctccaaaaaacgcgggccgagctggacgcggcccagcaggaaatcaacatccgggagcgggacgcggcggccgggcgggcttcggcgttcatcgcccacgagatccggaatccgctggcggcgatttccggggcggtccaggttttgcagaacgacttggatctcggcggggaacaagcctgcttgatggatatcgtggtcaaggaatcgcaccgcgtctcccagtccatcgagcagtttctctgcctggccagcccgggaaagcagacgtactcggtgttccggctggccgatccgttggtcgagaccctgacgatgctccggatgagcggagaaatgtccgaccggatcgccgtcggggggaattacgaagcctcgccgttcttgtatttcggcagtcccgggcagttcaagcaggttttctggaatctcctcggaaacgccctcaaggcgatgcccgacgggggggggctgtcgatcgattttttccgtccggacaaaaacgccctggccatccggatcgtcgatacggggcggggcatgacggccgcggaaaaagcccgcatgttcgagccgttttacacgcggttcgagggcggccgcggcctgggcatgtccgtcgtccggcagatcatcgagagctacgccggcaagatccaggtccaatccgagcccaacgtcggaacggacatcaagatcattctgccctaccgtgaattcggcgcgaagggcaactccggggccgcggattgccgatgaacacgatcctgatcgtcgacgacgaacgctcgatcctggagctgctgagcgtcatcctcaagaaggaaggatacgccgtcctcgtcaatcccggaacgcccagcatttacgaggacatcgagcagaaggaattcgacttggtgatcagcgacatcaagatgccgcaggtcgatggaatggaggttctccggcgggtcaaggcggaaaagcccaccgttccggtcatcatgatcacggcctacgccagcgtcaagcaagccgtcgaagccctgcggctgggcgccatggattacatcatgaagcccttcgacatcgaggagatcaaggtcctcgtggccaacggcctcgagcaccgccggctcctcgaggagaacaagattctcaagcaggcgctccgggaggagacgagcttcgagaacatgatcggcaagagccggccgatgcaggaggtcttcaccctgatcgaaaaagtggcggccacggattccacggtcttgatcaccggggagagcgggacagggaaggagctggccgcccgggcgatccacgccaacagccggcggcgcgatcgggcctttgtttcgatcaactgcgcggcgctgccggaaaatctcctggaaagcgagcttttcgggcacgtgaaaggatccttcaccggggcgatctcggacaagaaggggatgtttgaaacggcccatgccgggacgattttcctcgacgaagtcggggagacgtcgccctggacccaggtcaagcttttccgcgtcctccaggagcggatgatccgccgggtcgggggaaacgaggaaatcccggtgaacgtccggatcatcgccgcgacgaaccagaatctccgcaagcggatcgaagaggggaaattccgcgaggagctcttctaccgcctgaacgtcatctccgtcgacatgccgcccctccgtcgaaggcccgatgacatccccctgctgatccagcatttccttcggaagcattgcgagcggatgggccggaaaatcaagcgcttgactcccgaagtcaccaccgccttgacgaagtactcctggccgggaaacgtccgcgagctggaaaacatcatcgagaggctttgcgcggtcgaggagcgggaaacgatcacggcggagagtctcccggacgatgtcgtcgaagccggacgggcgccggtgggaggggcgccggttcttttgcccggtttcgatctcgaagcccacctggatcaagtggcccaagcttatctcaaggaagcgagcgaaaaagccgccggcaacatgcgccggatggcggagcttttaggcgtcagctaccggtctcttcgctacttgatgaaaaaatatcaaatcagaaggccgggcgccgcggaatagaggaaaacgcaagcaaagcctgtgggcttcttgacagggaacggggggaggagcggggcaataaacgacacttcgttgacaaataatgtcaatattccgtcttttttcatttcctttgtgacatatattatttatattcatatatttagaatctacgcattattggcatgcattttgctgataatattatgcaaagaaaaatttttcgaattccggcggcttcgaaaaaccgccaggaagcaggaggtttcaatgttcaagaatcggaaagggttcaccctgatcgagctgttgatcgtcgtggcgatcatcggcatcctggcggccctcctcatccccaacgcgatgacggcccttcagaaggccaaagtccgcgggacacagaaggacatcaactcgatcgccaccggcatcgccgactacatcacggacaaggctgtccccttcaccgccaacggggcgatggactccaccgtgaaaacgtcgctgtctcccctgtatttgaaggttctgccggagacggaccagtggggtcaggcgttcatgatttacaccgggaccaacgtcagcggccagtacggcatctcttccgccgccgtggacgatttcctggtcgcctcttacggccgggacaaaaccatcgagggctggacgtataacgataccacgcccgatgccggcttgtattcgatcggagccacggctgacttcgacaaggacctgatcaactacaacggcgcgttcatccgcggaccgcgggcgggcgcgaccggctcttaattctcattcgttcggaatcgttgaggcggcgcggggagttccccgcgccgctttccttctctctctcttttttcccttccttcgcccgggcggccgctggcacggattttgctaagaatcaaatgaaacgaaaaatccgggtcgaatcccgttttaaggacgaacgaggagattatcatggccgaggcaagaaaaggtttcaccctgatcgaacttctgatcgttgtcgcgatcatcggcatcctggccgcccttctcatacccaatgccatgaccgcccttcagaaagccaaggtccggggaacgcagaaagacatcagcgcgatcgccacggccatcgccggcttcatctcggacaagacgtttccgcccccggccaacggctcgatcgacatcgcggtcaacacggcgctatcaccgttttatctcaaggtcctcccgaacatggatcagtggggccagccgttcatgattttcacgggggataactgcacccaatacggaatctccgcccccggggcggatgatttcttggtcatttcctacggccgcgacaagaccctcgaatcctggacctataatccggccacgcccgacagcggcttgtactccatcggcgcggcggccgacttcgacaaggacctgatcaacttcaacggcgcgttcatccgcggccctcgggccggggccgtcggcacctgattttccgccgctctctttttttctcgcccagcggattggggtataatcggcccgatgattatccggacggccgttcttcttcttttttatgccgggatcatcctttgtctcattcccgggcttcttttcgccgccgggctcggtcttcgagaaaccttggtccgcatcggaaagtgggccatgggagcgagccgggccgtcctcggcctccgggtcgacgttttcggccgggttcctgaatcggaagacggaccgttcgtctacatgtccaatcacgtcagccttttagacggaccgctccttttccggttgattcggggacccgtcagggtcatcatgaagacgtctcttttccgcatccccgtcgtcggattggcgatgaaaatcatcggattcatcccggtcgaccggagcggaacccaaggcggccgggcggccgtcggccgggccgcggccgccataaaggagaaaggatgttcctttctgatctttcccgagggaacccggagcctggacggccgtcttcagacgctccgccggggcggatttttcttggcccgagaagcgggcgttccaatcgcgccggtttcgatcgagggaacgtttgaaatcatgccgaaagggagattggtgccgggaaagggctcgatccgggtctttttccatccgccggtcgccgatcccgagccgggatcgagcgaattcgaagcctggatgagcgccgtccgggaaaggctgtcgtcttttccggcctgagaaggaggagagtcatggaccatcaacgcatcgctcaagattggagccggatgctcgacgaatttttcgtcgcccggggggagacgttcgccggagcgatcgaggcctgcgtcagtgctttgaaaaaaggccggaaaatcctcgccttcggcaacggcggaagcgcggccgaggcccagcatttcgtcgccgagctcgtcaacaaattcctcaagccccggccggccctgcgggccgtgacgctctcgacggacacctcggtcctgacctgcatcgggaacgacgtctcctacgaggccgtgttcagccgccagatcgaggccctcggcgatccgggcgacatcgtcctggccttgacgacgagcggcaactcccccaatgttttaaccgccttgaaaacggccaaggagcagggcttgctgacgatcgtcctgacgggccggggcggcggcaagagcgcccccctggccgaccttctcctggacgttccctcgaccgaaaccccgcggatccaggagatccacctcttccttttgcatgtcctggccggagaaatcgaagagaggatgtatccgtcttcttgaggcccggtccgtccggccggaatccgtcttacccgccgatcgtctccttgatcttgtccacgccggccgccccggagttgaagagaaatgttcggagattcggaaggagacggcggaagagatccttttcgatctcgatccgctcctccgtcgaggcaagaaaagacgcgttgaaaaacggcttggggacggccgcagccgatttcttgatccccggcgtttctcccctttcaagaatccggagggcatcctcgggattcaactcctcgagcgccggcgagaccgagtcgtttcggaggacaaacagccagcggagctgcgtccggcggacggccgcccccggaccgagccaggaaggatccagcagggcgcgggcgtccttggccgccttgtagcagaacggcccgccccggtcgagccggcaatcctcggcccggaggcattcggcattggggcagtcttccttccggatgacgacgttttcgcatttgctccggtcgaagagtcgggccaggcgcccgaacagctcgaccgtgttcgtcggcagccaggccttgcgctcgatcgcctcggcctgaaccgccttgccggccggcctggccgaaatcatgtcggcggatacgaagcggaagcggggatcccggagaaggctgaagaaaagatccgttttctttgttccggccgggccgacgagaatcactccgccgccctcccggtcgaccgccattccccggatcaggcaggagccgaagtggcgtccggccacgtcgccggccaggcccagggccaggcttcggacgggagcataggaatcgcagttgacgacgaccccggtcttcgtttcggtgttgaagaaggcccggggatctcggccggccaagccgtcgactgcgtacaagacgccgtgcggctcgatgccggcctccgcgggggccggcgtccagttttccacccacatctcgtaaacgtggcggaggttggtcttcaggcggagaatgactccggcgacggccgcgttccattcgaagagaacatcggcggccagccgggcttccgtctcggccgtcaggccgtcccgttgattcagcggcaggcggggatcgaccggaaccggcccgcgcacccgggtgacgacgttgttcaaggcgacgcgcttggctttgcgggccggcttgagccgggccaaggcctcggcgatccggttgagtcccttttccaggttctccagggacgtggcgtaggaaatccggatatgatcgtcggctccgaacgcgtcgccgggaacgatcgccacttgggcttcccgcaggagataatacgccatcccgtaggagttgcggatgggcgtcccgttgaattccagatcgtaaaacgaccggacgttcggaaaaagataaaaagcgccctgaggctcgaaacaggagacgccggggatggttcggagcttcatcagggagtagttgcgccggcgctcgaactcggcccgcatccgggcgacgtcggcttgggatccggctaaggcctcgacgctggcccgctgggagatggacgcgggatgtgaagtggcgtggctttgaatgcggctcatggccgcgatcaagggagccggcccggcggcgtatccgatccgccagccggtcatggcataggctttggaaacaccgttgatcacgaccgttttattcttgaggtcgtccccaagggaggcgatgcttcggtatttaaatccgtcatagacgaggcaggagtagatttcgtcggaaacgacacagagatcctccccgcggatgacctcggccagggcttcaagctgggcgagagtataagccgcccccgtgggattcgacggggaattgagaagcagcgccttggtcgccggcgtaatgcgggccttgagctcctcggccgtcaggataaagccgttttcctcctttgtgggaacgaaaacaggcttccccttggccaaattcacgagatggggataggaaacccagtacggggcggggatgatgacttcctcgtcgtcgttgatcagggcttggaaggcgaggaacagcgagcttttcgctccgcagttggcgatgacctcgttgggagcgtaggtcaggccgtaatcttctttcagccggccgatgatggcttgcttgagggccggagagccctcgttttccgtgtacttggtgtagttatcctgaatcgccttgattcccgcggccttgacggattcggaggtcggaaaatcgggctcgccgatgctcaggtcaacgacgtcgaggccttcggctttcatcgccttggctttggcgctgaccttgaacgtcggcgaggagccgatgcggttggctttgtcggaaatcatgatttcccctttcccaagcggccgcgggggctatttttcgctcttcttttcggcggtcagcttatccttgaggaatttctttaaatcggctccggtcagcgattgaaggatttcaggcacctgggccaggatttgggccgtttgggccgagatcttggagacgccgagatccttgtcgctgttgaccaggacgatcttatcgattttcgaaagcggctcggccacgctttttaccacatccggcaggacgttcatgtacatttcgaggaccgaggcctcttgataatggttcatcgcctgagcccgcttcgtcaaggcctccgcctcggccgcgcccttctccttgatccgggcggcttcggcttggctttcaagcttgaccgcctcagccttgccccgggcttcggcctggatgcggtattcctcggcttcggcctccgcccgaatttggtacttccgggcgtcggccggcttgagaacgttggaatccagttctttctcccggcgctggatttccagctcctcgatcttgatggcctgttctttctcgaccaagcggaccttgctttcctcccgcttcaattcctgcgagaggcggtggcgctcgagctcataggaaaagtcggcctgggcttttttctggttcacccaggtcagcgactcggattttttggcttcgttttcccattgggccttggcgatctgggcttcagcctgaagccgggccacctcgccttccttccgggcttgggacgagcggatgatggcctctttctcggtctcggcctcggccacggccgcgtcccgcttggccgccgaaatcaagggcttggacagggcgtcgatgtatccctgggtatcaccgaattccttgagggcgaaggacaggaggacgagtcccattttgccgaagtcgtaccggacggcttcgccgacgcggcggttgaactcggatcggccgcggtaaatctcctcgaccgtcatcgtcccgatgacttcccgcatcttcccctcgaggacgttgacggccacgtcccggactccttctttccccatccccaggaattgctcggcggccgtgtgaatcgacgcctcggaggagtcgattttcacctgggccgcggcgtcggccacgatgggaacgccgccgtgggtcagaacctccggcgtgcggatggagatcggaatgacgtccatcgggaggatgtcgactttttccgtgaacgggcggacgaatgtccccccgccgatccggacgcggaaaccgaccttcttcgccgtcccgtcgggcagggcgacggttcttttccgcccggaaatgatcaaggcttcgttcggaccgaccttccggtattgacgggcgaacaaaaagccgaaaagaacgatcagggcgaggacggctccggccaggatgagaatggcgacgagactcatggcaacctccctaaaggacgtttgcagcgagtatggcggtctccataactgattaaaaacgcatgatataaagcgcgtttgcggttgtcaagacggaagaaaaagccgcggattcagcgcccataggccatgaacataaggcttttctttttcagaacgtctttttgagcctggatgacttcgacgatcccggcgtcggccatcttcagaagagagtctagctgatgacgcgagaacggaaccctttcggccgttgcttggacttcaagcagctgcccgcgatcggtttcgacgacgttcatatccgtctccgcggccgcgtcctcgctgtagtccaagtcgcaaaggacgtcgccgccgacgattccgacggagatcgccccgaccaggtggcggagcggcagaaccggaaggatcttcgtgtccagcagcttcttcagggccagggccagggcgacggaggccgcgttgatggaagcgacgcgcgttcctccgtcggcttggaggacgtcgcagtcgatgatgatctgccggtcgcccaaggcccggaggtcggtgaccgcccgcagcgtccggccgatcaaacgctggatttcctggctccgccccgacgggtatcccatctggcgctcgcggggggttcgtttctcggtggcccgggggagcatcgcgtattcggccgtcacccagccctggcccgtccctttcaaaaacggagggactttttcctcgatcgtggccgcggccaccacccgggtgcgtcccatttcgatgagggccgagccgtcggcgacttcgataaaatcgggggtgattttaaccgggcggatctgatcggccgcccggcttccggaccgcccggggcggagattaggatttttcatcatggggcctcgactgccagcgtttatgaatccacaaccaggaatccggatcgcggcggacggcgtcttcgatcatcttagtgcagaccgccgtgattttcaacacgtccaccgcctcgtctcccgtgagagggagatcgacgggcgggccgaagatcagccggtagcggtctcccggggcgggaacgcaaaacatcgggacgatcggagctcccgtccggagatgaaaaacggccaacgccggggtcgtggccgccgggatcccgaagaaatccacgaaaaccgcctcccggcggaggacgttctggtcgatgacaatgcccacggcgcccttccgcccgagggctctcagcaccggacgccccgccccgaatttgttcaagacggttgctccccgccgggcccggacgctttccaactcccggtcgatgagcggattgtccagcgctcggacaatgacatggaagggaacgcggcgggcgatgggcgtgatgaccatctcccaattgccgaagtgggccgtgaaaaagagaacgccccgtccgcgggcgagggcggtctcgaggttttccttcccctggacgtcgatcagcgcttcgacccggcccgggggccagggggcggtcttcaggatgtcgaaaagggaacggacgaaattcatcatcgaccggcgggccgtccgccggcggtcttcatgggaaagggatcggccgaaagcccggctcaggttgtcgagggcgatgcgccggcgcctggaatccaagtgatagacgagggctcccaaggcttcgctgaaaagaagaacgatccgccgcgggagccgggcgacgaatgaggcgaaaaggcgatacagaacataagaaaggtggattccgacggacgaggaatccgggcggcgcttaggcatgaccggcctttcccggaaaaacggcggcctcgagacattcgaaaaactcgtccggcaggtcgagcccgatgcggagaacggtcagccccggcccctcccaggggagctcccctgcttcgaatttgaccgcgtctttttccgtggtcaggaccatctcgggatccgtccgggacaccgcggccgcgatccgggcgcgggacgccgccggatacaaatgatgatcggggaaggtcatccggccgacgacagccgctccgagcgattccagctgggagaagaagcggcggggacgggcgatgccggcgaatgccaggacgcgttttccggaaagggcttcgagcggaacgcccgtttgtccgtccgctgaaaaaagcccgcgggggacggcggcgtattcgaaaaccttcaagcgcgggaagcgccgccgataggcctcaaaccgttccggcgaggtcccccgggggaggagaagaacatcggctcgggccaaagcccggtcgccttcccttcgaggcgacgaagagcgcggatcatgaagaacgatgtcgagatctcgggcgaggtcgagacgctggaacgcgtcgtcgagaacgcagaaatcgaaaccgagggacgccgccgcgcggcaggacgcgaggcggccgcggccgacgaaaacaccggctcggggatagcggcgggcgactagaaccggctcatcgccggcttctcggaaaccgccgaaaaacgtttttccatccgacacgacgccgccggaccgttcccaagcgccgcggtatccgcggctgaccagggcgggcctccatcccttccggagaaaatgagcgatgatttcgcaggccagcggcgttttcccctctcctccaagggtgagattgccgatcgaaaggatcggaagaggggcgcgggccggcgttttccgccctcggcggtaccgggcggccttgccggcgcagacggggcgggaaaccagggaatagacccggagaaggattctcattgcggcagaatatatcatagaacggctgtaatgccgatatctcccccggacagacacccttgctccggcggtcccccttttgagtttacttggcttgtcgaatcatctataattcggccaagtgtatctctcattctaggaggcgatcaatgaaacgtcggttcaatttttggatattcgccctggcggcggtcctggtcctgaccggctgccaaaagaagacctcgatcaagggcgtttccctcgacgtcgttttcgccgagtcgcccctgacggacaacctgatcaccgaggtcacatacacgtggaagaccggcaaggatttcgagaaattcagccgggactaccacgtcttcgttcatttctggcacaacgacaatctcattctccaggacgatcacgctccggcgccgcccacgtcctcctgggaaccggacaagacctacaccatcacccggcggatcttcatccccaaattcatcgatgaattcaatccccagttcaagggcgaggagacactccgtttctccgtcggcctggtcaatcccttcgaccggagcggcgatcccccccgcgaggtcctgatccagaagctcaaagtcgttccgccgccgatcggcacgcccgagatcatctacgagagcggctggtacgacctcgagatcgatcagaacgcgcccctcaagcagtggcgctggacggccaaggaagccaagtgcatcatcgataatccgcgccgggacgccgtcctggtcattaaaggagcggcgaatatcgccgacgtcaaggatcaaaagatcatctttaaaatcaacgatttgacggttgatgagttcattccgggcgaaagccttttcgagaagacctaccggatccaaaaggaaatgctgggggacaaggatgaattcatcctgtccatcggggccaacccttcgtttattccggcggatatccgaccggcttccaaggacgcgcgcgaactcgggcttcaggtttcctttatttatttccggtgaggagcggaaccgccctcacttgcccggattcttggaatcgaagtcctcgagctctttcttgagccgggcttcctcggccgcggccgcctgaatatccaggttcgtttgggcgatgtcctgctgcaccttggccttggattccatcgtgttgaaagagaagaactgctgctggagggcccgcatctttaacgtgacgtactccaggcgttccttggcccggtcgtacttgtcctgaagatcggcccggaggccctcgacgtcaacggcggtttcgacgacgagggcttgggaaggttcggccgccacggccgagggtttcatttcaggctcggccggagctccctcggctgcggccgtctgttctccgtcctcggtccgggtttcgctgatggccgctttttttgtcgccttggtcagatcggtgttggtgaccgtgaccgagggcttgcctttaagggaagcccggcgttccttttcctttcgggcggcggcggccagatcctgggccgaggcggaggccgccatccctaaaagaacaaccgcgataaccgcttttctgaacttcatccttcttttctaataataaaacgagagacaagtcaagtcaaatgctcgatttcggcaaaaggccggcggtcatcgccgggacgtccggatggagagttcccggccgtcgcttcggatctcgacggctccctgtcgatctgtgcccagaacccgagctccgcatttcccgaaacggtccaggacggcggggtggggaagtcccatccggttgccgcgcccggcggaaacgacgatgacctccggacggacggcctccaggaattcctccgtgctcgaggaatcgcttccgtgatgaggcgccttgagaacctgggcccggacatcgaagccggcggccaggatttccctctcgacgtcccggccgatatcccccgtcaggagaaaggccgtcgagccgtagatcaggcggaggacgatcgacgagtcgttgccgggggctttcgccccggaggtttcggccggggctaaaacggcgatgtcgactcctccgaggttatgattgaatccgcggccgactccgcggaccggaacgccgccgagttcttcccggagggcgcggtaacgcgcgtcttcgggagccggcgttccttcccagaattccccgatggaaaaattcctggcgacggccgccaggccgttgagatggtccgggtgaggatgggtcaagacgagacggtcgattttcttgattcccttgttccagagaaaaggggatacgacgtgctccccgatgtcgaatgttcccgtcggcagtccgccgccgtcgacgagcattttctccgaaccggggaattcgacgagaacggattcgccttgcccgacgtcgatcacggtgacggtcaggtccttgacgtccgccgggaacggatgcgtcgtcaagacgatgagggcggcggcgaagccggcgaaggaaaaccggcggaggcggacgaaccgggcgggaaggagaagaaggagaagaaagacatagtaggcggccacgaccggtccgggcggcgtcggaacgcggctggagaggaacggcaggccgtccaaaagccgggtcgagtccagcaaaatccggaggaggaaggaaagaccgctggccgcgatcccggcggcaaagggaaaaacgaaggacagggggagaaaaacgtatccggcggccatcacgacggtcaccaggggaatgccgatcaggttgaggatcaaccccgagaaaatcacccggtgaaacgtcgccgcgatgatcggcaggacggccatctgggcggcgaccgaaagggcgaagagctcctcgattttgaagggcaggcggggaagggcggcccggatcgaagggaagaagaggatcaggccgagggtggcggcgaacgtgagctggaagcccgcgtcgaaaagctggaagggccggacgaagagaatgcccagagcgctgagggaaatcgtgttgaggagatggacatccttccaaaggagcttgccgatgatgaaggcggcggccatgacgaccgcccggatgacggaagcccgcccctcgacgagaaagccgtagaacaccaggaggaggagaagaaggagataggaaggccgttcggcgatccggaacgcccggaaaaggaagaaaaggagagcggagacgatggcgatatgggcgccggaaatggcgaacagatggaacaagcccgatttctggaggtctcgggtcgtcgcctcgtccatccgggagcgttctccgaggacgagcgcctcgaaaacggccccttcgggggagattcctccggggcgtccgggatcggcgaaggaccgctcgatgaggtccaggcaggtccggcgcagccgcgaaatccaccggaacggaacgctccggcggcccgggccgaggtgttcaaccagcgaggggcttttcgtcgagccgagggcatggagatcccgcgttttcatatacgcaactgaaaacggcgccttgaaattccaatattctgagggggggacgacctgggccgataggcggacccggtcgccggcgatgagccggggcagcttccctcccgtcgcggaatgcttcaccgcgacccggatccgtccggtcatgggacggtccgctccccggagggaaaccgattcaacccgcagatagagatcgtcgcggtccaagccgggcgctggggaaagggagagcgttcccgtgaaatcgaagtattcgccggtcggcaggctccgcagctcgttgctttcatatcgcgcttcgaaagcggaacccaggccggcgcccaggccggcggccgcggtcaggaggaggacgaaggccgccgcggttttccgccgggcgaacaggatccaggcggcggccaggacgacggccgtcgcggccgccgcggcggcgggggaaagagaaagaaaaccggcggcggcgatgcccgcggacacggcgatcgccaggaaaagaacgggataagccatcgcccggttatttgacgatttggcttgaatcggccagccggctttgctgctccaggcagtccagaataatctggctgatgatcttgatgccgatcgcgatgctccgctcgtccgggttgaaatacgggctttcgagcggagcggtcgaaagcctcgggttcctcacgccgagaagaaaaaagagcgacgggattttccttccgtagaaggagaaatcatcggccatcatctggggggcgagccgctgaagggggcggtcggagaggacgctgttgaggaccgggagcatcgaggcgtaaagctcgggatggttggagacggccgggatggattgcttgaacgccagggaataatccccgccgaaggcctgtgtcgtccccttgaccgcggcttccatcagccgctggatctttcgccgggtcgtgtcgttcaacgtccggagtatccccgtcaggcgcacgcgatcggctaaaagatcggattgagtccccccctcgatccggccgatcgtaagcagggccgggtccgtgggctcgatggtccggctgatgatcgattgaagggcattgacgatctgggcggccaaaacgatcgcgtcgacgccgtcctgggggtgggaagcttgggcgctccggcctttgaccaggatttcgaaggagtcggaagcggccaggatggagccgggcgaggagaacacttggcccagcgtgtccggccaaacatggaatccgaaaatgaccgcgaccggaggattctcgaggactccttcccggatcatctgggcggccccgctctcgggatcctcggaggcgggatcgggccccggttggaagatgaacttgactccgcctttcatccgatcccggagggcgttgaggacataggcggatccgagggccacggccacgtggatgtcatggccgtgggcgtgcatcacgccgccgttgaccgaccggaacggcacatcggccagctcctggatgggtacggcgtccatgtcggcccggagggcgacgatcgggccgggctgggctccgcggagcaatccgacgatgccgcctctggccactccggttttcacttcgaatccgagggcggccaggcgggcggcgacgatcttggccgtttcctgctcccgccccggcagttgcggatccatatggatcaaccgccggatcttgaccatctcggccgcgattttttccgtttcccggtcgatgtcggcggccgtttttttatcgacggcggaaaaagaaagggacggacaaagaaaagcaaataatagagttattgccggaaagagcttgcgcatgaccggctctcatcttaatctggagagccgcggattgtcaaattcggaccctcttttccggaaaaaccggggatggtccgcttcttgtccgaggttgggaaatgaaaatcggacggaggcgaaggattgaacggcggatcggagtttgatagtctcggcggcggaaggtcaaaatgaacggagagaacgttctgttcgtggattcgccgcttggaatgatcgagcttcgggaaaagaacggctttcttgtcggcctgaatttccggaatcggcgtcccggaaaagagggccgggtcggttcccttctctccgcctgcgcctgtcagcttgaggaatacttcgccggccggcggaccgtgttcgaggttcccctggccttggagggcacggcctttcagctcgaggtctggggcgcgcttcggggaatcccattcggccggaccgtgtcctatggagagatcgcccggatggtcggacggccggccgccgcccgggccgtgggggcggccaacggggccaatcccgtctccatcatcatcccctgccaccgggtgatcggcgccgacgggcgtctgaccggatacggcggcgggctgaaccgcaaggaatggcttctccggcacgagcggggctgggccgaggcggcggccggggaaggccccggccgctgatcccggaccggttctcttacttgatgaaccggctgaacgcgccggtgcccgcgtaaaccgccttcgggccgagttcttcctcgatttccatcaaccggttgtacttggcgacccgctcgctgcggcagacggagccggttttgatctgcccggcgtccagggcgacggccaaatcggcgatgaaggtgttttcggtctcgccggagcgatgggaaatgaccgtggtgaaatcatgggcgtgggcgtattccacggcctcgatcgtctcggtgaggcttccgatctggttgagcttgatgaggatcgaattggccgcccggcgctcgatgccttccttcagccgggacagggtggtgacgaagatgtcgtcgccgacgatttgaatttttcgcccgagggtttcggtcatcagcgtccagccgtcccagtcgtcctcggccaatccgtcctcgatggagacgatcggatacttggccatcaggccttcataaaaagcgatcatctcggccggcgtccgggacgctccgtccgattttttaaagacgtagcggccgtcgccgtagaattccgaggcggcgcagtcgagggccagccagatgtctttccccggccggtatccggcctgggcgatgctttccacgatgcaatccagcgcttcttcattggacccgaggttgggggcgacgccgccctcgtctccgacggagacgccgtagcctttcttcttcaggatctttttcagattgtggaacacctcggctccggcccggatggcctcggcgaaggtcggccgcccggccgggacgatcatgaactcctgaatgtcgacgctgttatcggcgtgggccccgccgttgagaatgttgatcatcgggacggggagcgtgtagcgatcccgttcccggagccaccggtacatcggcagggcgcgggcggcggcggcggcttcggccgcggccagcgatacggaaagaatcgcgttggccccgagacgggtcttcgcgggcgtgccgtccagggtgatcagaagacggtcgagggcggccgtatcgagggcatccttcccgaccaggcggggcgcgatttcgtcattgacgtggccgacggccttgaggacgcccttgccgaggtagcgggcgggatcgccgtcgcggagctccaaggcttcataagttccggtggaggcgcccgaaggaacggcggccgttcccacggcgcctcccttcagaacgactttggcggagacagtcggattccctcgggaatcaagaatttcacgggctttgacggacagaatcgttgttgcggacatggaccaatcctttaaaatgaaatatacggattaataaatcggccggccggtcaggatttgacctggtcgccttttttccggtcgacgaattctttgatgacctcaatcccttcctgcgttttttcccggacggtgcgaatgcctttttccgcctctttggagagcttctcgaatccctcgacggccttttccttgcctttttcgaattcgtccccgattctcttgcgcgtttctttgccggacgcaggggcgaacagaattccgagaacaaatccggtcgtcgccccgatcagaaacgagacggcgatttccagggcgctgcttttgccatcacttgccatggtgactctccttttttttcttgccgaaccggcgccagacaaactgggcgacggggaggaggaggggaaggtatttggaaccgggccggatgaatttggccgagatcagggaggaggcctcggcgacattgaccgcggccttcttggacgcggcgatggtcttggccagctcttccacctgctccttgatgacgaggtcgagatccttcaaatgccgagccagctcggcgatctcccccagggctttttccccctcgatcgccgtccggcgcaactgcgtaaacaggcgaacgagctgaacgatcgccacgacggcggcgaccgtgagaatgagaaaaagcacttggttgagggtcaaggtcatttcctctataaaatactggaaaatcagggggttgtcaatgtgaacggcttccgtagattcatgcgaccggggaaaaatgacggggcgtgagatgtccgaaggctcggcggggacgaacgaagcgatcgattcaattccattcctccaaccggcgattggggacttccgccgccgacccgatgtcctcctcctcctcctcctcctcctcaaactctcctcgtatccaagccatgtttttctcggactggaggaggcggccgtcgcttttcatttccctcccggccggtcccggaaaggacgttccggggccgcttttgcagctaggcccccggttcaaacgtctttttccaaaacgttcgtttcccaggctctcctctcgtttttggactatcgagagaaggcgccgaaaatcaatccggtcgcggtcgccatgaagatgacaaggctgacgtagaccgcggttttccttgttcccatgatttttccgatgacgatcatgctgggaagcgaaagagcgggcccggccagcagaagggccaaagccggcccctgtcccatccccgatccgatgagcccttggaggatggggacttcggtcagggtggcgaagtacatgagggccccggagacggaggcgaacaggttggccggaaggccgtttccgccgaccagaccggcaatgaccgcgccggggatgacgccctcatggccggggcgccctaaaagaaatccggccgccatgacgccccccaggaggagaggtaggatttgtttggcgaatgtccaggtcgaggacagccattccttgagctcgtcttttttgaaccaggcggccgtcatccagacgagagccgcggcgaaggccgcggagagaatccatttcagccggaaaatgaagtcccaggctttgacgtcgggatcgcttttggcccaattcaagaaaaccaggattccgatcatcgacccgatgtgaagggcggttttccaaagaggacgttctttgacgtttccgttttccaggccgaagccggcttcttcgacagggttatccctcttcctctggaagaaaaaatgcattagaaggccgatgatgaccgaaaaaacgacggctccaatgacccgggccaggccgagcctccagccgagaatccgggcggtcatgatgatggccaggacgttgatcgccgggccggagtagagaaacgccgtggccggcccgagtcccgccccccgagtgtaaatgccggcgaaaagcgggagaaccgtgcaggaacaaaccgccagaatggttcccgagaccgaggcgaccgagtaagccatgaacttattcgccttgggtccgagataacggatgacggattctttcttgacgaaaacggaaatcgccccggcgataaagaaagccgggacgagacagaacaaaacatgcatccgggcgtattcctggagcatcatgaatgcttcatggacggcgttctggacggaggagcggccgaaggggatgaaataagcggccaggaatacagccaggagaacggcgaatattttcagttctttcattgaagaattcctttcactcaagggcactggatgaggccctgggcccagaggcaccccccgcaagaagggaatgtgttgcccagacagtcttcgtcgttggattcgagcaggttgcatccaccgcagatatggcagggggcgaagtcaaagttccggattttttcccggaatctccggtaattccgcgaacgccaaatgcatcccagcgttctctgcccgacatttccgaatccatgcggcttgatgtttcgttcgtatccataaagataggtcgtatagccgtgaagaagccccaggcagggggcgacttgcccgtcccagcggacaaaagccgtccggtcttcgacgaagcggcagaagttcgtttcggcgaaaatgggattgcccatcaggctcaagttctcgtaaccctggaggagatggagaatggcttcccgggtgtgggaggcgacgtccatccggggcagggagatttccgtcctggccgccgaagaaaaggtcgccgtcgacagggtcagggcgcagagcatctccttttccatgtcttctgaatagggcaggatgttgctgaccaggactttatccgcgccgacttcccgggccaggtcgtccattcgtttcagatcggccacgttccgccgcatgacgacaaacgagatgccgacccggattttacggcggccgcggacgtttccggcctggaggtttttcaaagcggcgacgatcggttcgaatttcgccccccggcggatgtcctcgaatcccttttccccggccgaatcgaaagacgcccagagcatatccagcccggcccgccgaaggccgtcgatcatggggccgtcaagcagagtcccgttggtggtgatttcgactcgaagcccgagggtcttgaccgcccggatcatccggaggatgtccgcgtgggcggtcggctcgccgaatccggcgaacatcaccgattccaggtggcaaaaatccttcaattgggagaccaaccgcccgaacaaggccgtggacatgtcgcccatcggttctttccaggtgttacgaatgcaggtccggcaggccaggttgcagcgggacgtcggctcaatataaagccgggacaggctgtggatattcggcttgatctcaaaacggccgtcgcgggcccggacttccaaacgggcgccgggggaggctcccagcttttttatcaatccgggcggaagatctaggcgtccgcggattccggccttgagataccggcgcaaggggcggggatccgcggctggatttggagaaatcccgccgatcggctcccggttgcggcctccttctcccatgtcggcttcctcaggcggccgcttccccggagaaatatcttttccggaaccgaagggcgacgttgaccagggcgatcatgaccgggacctcgatcagcggcccgatcaccgcggcgaaggcctcgccggagttgagcccgaaaacggccacggccacggcgatggccagctcgaagttgttgctggccgcggtgaaggacagggtggcggtcttggaataatccgctccgactttccggcccatgaaaaacgagacgaggaacatgatcaggaaatagaggaccaggggaacggcgatgcgcaggacgtcgagcgggattttgacgatgtactcgcccttgagcgagaacatgacaacgatggtgaagagaagggcgaccagggtgatcgggctgattttggggatgaatttcgtttcgtaccacgtcttccccttgagcttcagcatcgtgaaccgggtgatgatgccggccagaaaaggaatccccaggtagatgaacacgcttcgggcgatttccccgatcgtgatgtctacggccgtccctttcagtccgaaccagccggggaggacggtgatgaagacataagcataaaccgagaaaaagatcacctgaaaaatggaattcaaagcaaccaggccggcggcgtattccgtgtcgcccttggccagctcgttccagacgatgaccatggcgatgcagcgggccagcccgataaggatcaagccgtacatgtagtggggataatcccggagaaaaaggacggccagggcgaacatgagaagcggcccgatgatccagttttggacgagcgaaaggaacagaaccttgacgttccggaaaacgtcgccgagctcctcgtatttcaccttggccagaggcgggtacatcatcaggaccaagccgacggcgatcgggatgttcgtcgtcccggactgaaacgtgttgatgaggcccacgacggccgggatgaaatatccgagcccgacgccgacggccatggccgcgaagatccacagggtgagataccggtccagaaatgaaagccgcttcgggcgcgaatcatccattgccatctccttttcgcgttttatccgacgagaagatatgccccgacgagaatgatgatgacgccggccgctttttgaaggccgcggctcgcttttttcaatcccttggactcgatcatccttcttgccgctcccatggatgttccggcgatgagaatcaagacggaatggccgagggcgtaaatgaagaggagaacgccgccgaagaggacattccccttctcggccgcaaaagccaggagaacggccagaacggggacggcgcaaggcgtggaaacaaggccgaatagaagcccgagggccaacgagccgagaagccccctgcctttaaatcgagctattccggggaaggagaaattgaaatgaaatagcccgaggagattcgcccccatgaccagacagacaacagccagggcgggcttccagaagcgcccgacgtcgccgaacatccggcccagaagggccgaaacgagccccagggcggtgaacgtcgcggccagtccgaggacaaagaacaacgaaaacaaaaacgttcttttgaggccgcctgattcgctccggcccgcgaccaggccgatcatcaggggaatcatggccaggacgcaggggttggaagcggtcatcactccgccgaggaacaccgcggggatcgccagccaaggattattctggaggatcaggccgatatcgccgaaaagcgcgttcatttcgcgggtcgaccttcagcggactccctgtttttttagaaaagccaccagctcctccttggggaacaggccgacatggcggaagatctcttttcccgtcttgtcgataaagacctgggtagggatgagctggatgccgtattttcggccgggttcgggatttttccagacgtcgtaaaatatcacctgaacctggcccttgtactcggcggcgatctccctcatgatcggctgcatcgccttgcaggggatgcatttgtcggctccaagctcgatgaacgtcaccaggtgcttggaaaaatcgatatcgaggcgcccggtggcgatcacgaggctttccgggccggccggattttcggcctgggacggcggcggattcgagcccgccgcggaggtcgtgtccatcggggtcgcgccaaggacgccgctggcggaggccgaaaccaggatcaagagagcggccgggatcagggcggacaagagcttgccgcgcgcggcggggaatcttccggggatcatttgttcaaactctccgagatccatttttttatttcgtcgacggaaggaatgcgcccggcggccttgaccgcgccgtcaatgatcagcccgggagtggcgatgactttatacgccatgattctctgaatgtcgtcgactttctccacttccgccgcgaggcccgtttcggccagagccgtgcgcgtccgctgttcgaggtcgcggcatcgggcgcaacccatacccaagatttcgattttcatgacgatctcctaaatagagtcgccggcggatcgctttttcgccgacgccggcttttcttccgccttcgatttgagggactcgacaggggaacatcttttctttcgaactccttctttccggcaagcggaaagccgccggcggtccgcatgaattgccccggcggattttttatcctctttgaaaagggcgagaaggggggcgatcgtcgtccggacgttgtccggaagacgatagatgatccattgcccatcccggacatcttccacgagactggcgtcccggaggatcctgagttgatgggaaacgcgggattgagccatctccaggacaaacatgagctcgcagacgcagaggtcctgctgaaggagcagccggacgatccgcaagcgggtcggatcggcaagggatttgaacacgcgaagaatgtcgggcatggcctggcctctttttaaagtccattataatatgataatatcttcatataatcaagatttctttcggccgctctcccggcctgggccgaggccgacatcgatcattccccggatccgttgaaaggccggggcgaatccgccgtctggtcacgcggcaagatcagccctccccttcgatacggcccatgaaaaccgcccggtctttttggccgtcgtcttttaaaagcatcggcgtttcccttattccgcggcgcgctttggattcggcgaagaaatattccggcgatccacgggatttgagacaggatccgggacgtcgttagggatgagttgcccgggagcgaagaagattttccgtggagggagacgaggccgcagtcttgaacaggattcccaggcgtccgtccgtcgcggcggtttgtcgggctttctcgttgatccctatgcctggcgtccgggtgcagcggaagaaagctcttccgtccaggtcaaccggccttgtgaattcatcgccgcccgggcaacggccgcgacgtccgcctggcggacgcgctctcgttttcgggatcttgagaagatcgcggatatgatccgaacgcctcctgcaaagtaaccgtgaattatccgcagcaggagccgttcttgtctttcggagaatgcggctctttcccgctttcctttttctcctcggggatttcctcaaggacgaaaccgccgcaacaagggctctttttcggcttcgcgccgcccgttagacgcgaaaaaatccctttcttctcttttttgttttccatggatccatgttctcctttgaaatcccttgaacgttttcccggatttaagccaacaggttaaaaatcaagccggacaggacggccgaaacgaacacaatgatcgataatccgatgataatctttttcttgaaaatgccggcgagcatggtcagctccggaatcgcgattcccgccccgctgatgatcaaggcgataacggccccgatgctcgcccccttctccatcagggccagcccgatcgggatcgcggactccacccgcaggtaaagcggcatgcttatcaaggcgacgatgactacggaaagcggatggccggctccggcgattttagcgaggagatcttcgggaagatatccgtagatcgccgccccgatgccgacgccgactatcatgtagatgaaaaccgattggaagtctccccaggctttgaaaaccgcggcgtggagacgatttttgaatccttcgggaacgcctttgtccggatcagggccgatttttttcacgcggacgttttttatttgattcgcccagcctaatttctctagaagaaccccgaaaacaatggcaaatgcggaggtcaagagaaaaaatcccagggcgactttccatcccagaaaagcgaccagcagggaaaaaatcagcggatccatcaatggggaagagacgacaaacgacatcaccgcgccgaagggaacgccggcttggaggaaaccaagcgtcatgggaaccgtggaacaagcgcaaaacggcgtgacggccccgaaaagcactcccatgacattaccccaaagacctttgccggcgatccagcgattgattttattcctgggaatatacataaaagccaaggcgatgatggcgctgatcccgagaaaaagaatcgagagctccgccatgatcaccaggaaatatttgatcgcctcgttcagcgaattcacggtcccgtcctcctttctaccgtttccccggagccgatttcggcggggtgatttttcgcaaggcgcgcgagatcaaagccatgtcacttgcgattttatcgattttgccgcggccgacggcctgaagcgcccggccgaggcggccgatttcgcgaccttccactcgggcgacgatgcgtgctccccgcggggaaatcgtcacacagcagacgcggccgtcatggggggagatattccgccgaagatatcctttcttttcgagacgatcgacgattcgggttgctccgcttttcgtgagattcaaggcgtgcccgaggtctttgatcataagtccggggtgttcccgggccttttttatcgcgacgaactcgatgaacgaaagatccccgcagcattctccgtctattcccccgcttccgaaaagcaatgtcatctcttgcaaggcatcgaataagacggcgagcgcattcttcatggcgacgttcctttggaaccagggatgagtctcggggcagaatagccgaaatagttgattaagtcaactaattgccgcgacgcctcgaatctctctttcgcctccccatgagagtccgggcgttattcgaaaatcgggagggtcctagccgtaaagcaccttgcgcatgtctttcaaaccgtgggcccgctccaaccgggcgatgatcccggggtagtccgcctcccggccctcggcgacggccagctcccattccgaaagaagcggatcaacccggtattcatgctttttcgcgagcagcgcccggatgccgcggagcgactgccagtgggtgatcatgatcagggctagggcgtaaaaaacgatgttcgggccgggcaggaaggcgatcagcccggtgaagggcgccaggatcccctctccgaccagaagcagaatccgctgggtccggcgcttatgcagaaagaagtggaaccggaggtcggcgtgcttctcctccgcctcgccgcagagaacggtgaccgcgggatccttgaggcggacggccttggccagggcttcctcctggcgaagggtccgggcgggcaggagcatgagctttttcttggccgcttcccaaacctccttggttttcgaaaagcgggctggcatcggccccggcggttcggaacagaacagccgcggatctttccgggcgtccttgacgaaaaaataagtgatcatcttactccttcgccgcggttcgccccggaggaaatttttccggatggagaaggccggcgagctcttcaagcgaatcgaacagccgcggaccgaaccggctggccgcgttttcgtccaggcggaggatccgtccgttgcggacggccgtcgtggcccgcaggcccggccggctgttcagccaggcccgcgtccgttcgaactcggcgggggaaggcgccaggacgacgatgacgtccggatcgtcccggaccaggctttccacgctgtattcgagccagcttttctccaagccggccgtgacgctcgttcctcccgccttttcgaccaaatcggtgaaatagctgtcccgcccgcaggtccaaaggccctccccttggagcttgaggaagacgcgcggccggacggcgactccggaaagggcggcggcgacccgggccgctttgtccgtcagggcccgggcgagaatcccggcttcggacgtccggccgacgaccgtcccgattttttcgacgagcgggcggatttcctcgagccggaagccgatgtccaggacgaaaacccggaggcccaggtcatccagccgctcgattcgttcccagggattgccgcggaaggcgatgatgagatcgggagcggctttccggatccgttcgatgtccgggtcgagaaagcccccgatcctgatcttttccgccgcttccggaggataatcgcaataacgggtgacgccggccacttggcttccggcccccagggtgaaaagaatttcggtgatgttcggggcgagcgaaatgacccggctcggccggccctccaggcggaattcccggccccggtcgtcgcgaatcaggcgctcctgggcgaggagcccggcggcgatcgaggccgcggccaggatcgccggaagaagaaccagacgtcttgcgctcaccggaccagtgtagtgtccccttgggggatttgcaagatttccgggaaccgggctcgtttgtttttttcgcgtccggttatttttcctgggcgatcaggagcgtccggggatcgagccggatcggaaggacgccggccggcggattatcatgatccttgaccacccggatttcgacggcgtcgctcttggcctcgagggtgatgagaacgtcgatccggccggcgtgcggggcgagcaggaccggcgttccgtccggtccgaacatctcccctccggtctccttcagggacgcgctgaaccagatcgacacgttcatccgtcgggcgaagtccttgaaccggtcgaggtcgtccggcgcggccaggccgaaattatatccgtcgacgatgatcgtatcggcgtcgaatttccccccggtgatcatcgcctcgaggctgcgaaggacttgcccggttctcatcccgtcctgcttgaaattcatgatgacccggtttttgatgatctcgtcgtaaacggtttcggagtcgcgcaggcggtgggttttgacgatctccttgaagatgtcctcgtaccaggtcatgatgtaatccacccggctggagtaggagacgtggatgaccgccttcccctggaaaagcttgtcggtggcgatgtgaacgaggcaggcggtcttgcccacgcccttcggagaggccagcacggccaggccgccggggcccggaccgccgtgggtggaatcctccaggacccggagggggctgcgcttgatcaggtgtttggcatccatcggcgatattctccttacccggtctcgcgggctcttttttcggcgtgttgcttttgcagctcctcggccacggccgcggggacccggccgtacttgaggaattccatcgtgaattcggccttgccttgggtcagggaccgcagctggttcgaatagccgaacatctcgctcaagggaacttcggcatcgacccgggagaagctcccgtcctcgatcgagctgacgatcaccccccggcgctggttgatcgagccgaacacggcgccggcgaattcggaaggaccttccacggagactttcatcaccggttcgaggatcacgggcttggccttggcgtaggcctggcggaaggctccgagggcggccgcctggaaggcgttgtccgaggaatcgacctcgtggtactggccgtccgtcaggacgacccggacgccggtgacggggaacccgatcacgccgcccttcttgaccgccgtcttgcagcccttgtcgcaggagggaatgaattcccgggggatgcggccgcccttgacctgattgacgaactcgtacgccccgtcggccagcggctcgagatagccgatgacccggccgtactggcccgccccgccggtctgtttcttatgagtgtaatcgaattctgccttcttggtgatggcttcccggtaggcgacctgcggctttccagtggcgacctcgacgttgtattcccgcttcatccgctcgacgtagacgtcgagatggagctcgcccatgccctggatgatcgtttcgtgcgactcgggatcgacgaacgtccggaatgtcggatcctccttgctgaaccggttcagggccttggccagccggtcgagcgcccttttatccggcgcggagacggccagggagataaccggctccgggacgaagatggaggtcaaggtataggggcaagagggatcggtgaaggtatcgcccgaggcgcaatcaatgccgaacagggccgcgatgtccccggctgtggcttccgggatatcctccatgtggtcggcgtgcatccggatgagccggccgaccttgattcgctggccggaccgggcgttctgaagctccgtccctttttggatccggccttgatagatccggatataggtcaactggccgtacggcccgtcctcgagcttgaaggccaggaggacgggcggggcgtccgggtcggaggacaggacgacctcggccggagcatcggggggggcggattggtcgacggcgatgtttttgacctcggacggatcgggaagatagcggacgatgccgtccagcagcgcttggatccccttgtttttataggccgagcccatgaaaaccggggtcagcttccgggcgatcgtgccgcgccggacggccgcgtgaatgagctcctcggtgacccggtcctcgagaatggcctcggtcagctcgtcggagaacatcgaggcggcgtcgagaagatcattccggcggcggtgcgcctcctcgcggaggtcgggcgggatttcccctcggcggatttcgtcgccttcaaacaggacggcctgcatggagacgaggtcgacgacgccctggtgatggtcctccaggccgatcgggatctgcatcaggacggcgttgtgcttgagcttttcctccagctggtcccggattttttgcggattggcgccgacccggtcgcacttgttgatgaaggcgagccgggggacgtcgtaacggcggagctggcggtcgacggtgatcgtttgggactggacgccgcccaccgagcaaaggaccaagacggccccgtccagcacccgcagcgaccgttccacctcgatggtgaaatcgacgtgacccggggtgtcgatgatgttgatccgatgttcggcccaggagacgctggtcgcggccgaggcgatggtgatgccccgttcacgctcgaggtccatgctgtccatggtcgcgcccactccgtccttgcccttgacctcgtgaacccggtggatcttgccgcagtaataaaggatcctttcagacagcgtggtcttgccgctgtcgatgtgggcgctgataccgatattgcgcattcgttcaattgtcgtggccatggccgttacccttcgtggaaatgcgagtttgccggggatttcgatggacttcggagaggaaaacaagaggcggaagaagacgaaccccggaatcgaacggcgattctacccgaaacgggacgggattgcaagcagatcgaccggaagcgggcgcggctctatgatctttatcgaaagaagaaaaagcggccgatccgcgttaatccctataaaaagcaggtcctttctatggttgcctttttggtgagtgaacaatcccaccttggattacctgtttagatgagttgacatgggcctcggggggcgttttttcttgacttcgcctccgcgaccccattacgatagggcttgccggaacgatggaaaggagagagagccatgggattattcggcaaatcgtttgctcaaaaagtcgatgaggccgtggccgcggtcaaggccaaggtccccgaggtgaaaaacctccgggcggtcctggacggcaaggtcgtgaccctggaaggggatgctcccgatcttaacgtcaaaggccgggtcgtcaacgagttcaatgccctggtcaacacggagaacacgatcaacaagatcaggctcgcggagacgcccgccccggcgaccgctcctccggcggccgccccggccgaagccgaacaggtgcatgtcgtcgtcgccggagacaccctgagcgctctggccttgaagtattacggcaaggccgggatgtacatgaaaattttcgaagcgaaccgggacatcctggccaatcccgatcttatccgggtcgggcagaagctgcggatcccgaagtagccttccctctgtcccgtcgtcggcgaagaatacgccggcgaaaatcggaccggtcagcgccgtccgccgaaaagcccgccaaggagttttcccagccctccgcccgaggagggggaggctgaaccttggaacaacatcccggcgacatcgtcgaggatgctgccgtccccgtctcggtcgagcagggcggcgattccgcccaatccatccgccgaggtgtttttcttccggctgagagcgccgaggatcagcggggccagggccggtatgattttcgcggcgacaccggggtccagcttgaaacgccgggcgatcatgtccgtggcttggaggcccgaagagcctagaaggccgcccagctgagcatcggcggcttggccggcgcggttgccgatcgccccggcgatgtcatccagaacggaatcgctgccgtatttgttcaggatgtggtcgatccgggcggcgcctccctgggtttccatctgccgcttcagccctcccaggatcatcggaacgaccgccggaatgatctgggcggccgcggcctttttgaggcccagacccgccgacaggtcacggctcgcttggccgccgtaggcttgcatgaattcgtcgagaaaggccatgctcatttctcttttttggatttgcgcttgatgtcttgaccatgggctctcttgtacgattgaatatcgacgaagcgtcccttggcgtccctcaccgcgtaaagcttcttccccgtcttgctcctcagaaccgttcttttcatcatatcctccttttttggaattggatccaaactctctctcctcgtaattgtgtccgagacgcgatggattgtcaataagattcagccgtccggaaacgccctcccgggccgcctgtcaagcctttgaaacctttcccaagaggggatcgtcccgcctttgaaaaatccggccgaagccgaggatcgcagagagaacatcctctgttgggggcaacctgcggagcggctggcgtccgtaagagcgttgacatttccccccggcccccctacactgaacgcggaattccatccccgcgcgaccgtttcgtcggccgacgaacgcgagaaggacgcaccgatcatgagcaaggataacgccgcccgagattacgatttccaggccatcgaggcccgctggcagatggagtggaacgccgccggcgctttcgccgcggccgccgatcccggccgcccgaagttttacgccctcgagatgtatccctatccgtcgggccggatccacatgggccacgtccgcaactattccatcggcgacgtgatcgcccggtttaagatgatgcgggggtatgatgttctccatcccatcggctgggacgccctgggcatgccggccgagaacgccgccattaagtccggcatccatccccaaaagtggacgctggacaatatcgcccacatgaaggcccagctccagaggatgggattcgcctacgactggtcgcgggaagtcaacacgtgtttgcccgaatactacacctggaaccagtggatcttcctcaagatggttgagcgcggcctggcctatcgccgggaaagctgggtcaattggtgcccgtcctgccggaccgtcctggccaacgagcaggcggccggcggtgtttgctggcgctgctcctcggccgtcgagcagaaaaagatggaacaatggttcctcaaaatcaccgcctacgccgacgagctcctctccggtcacgcccagctgggcaagtggcccgaacacgtcctggccatgcagaaaaattggatcggccgaagcgagggcgcctatctgaatttcgacgtgccgtcgcttgggaaatcgatccgggttttcaccacccgcctggacacgatctttggggcgacgttcctcgttctttcgcccgagcatcccctggtcggcgatctggtccgggggccccgggaggccgagcttcgcgcctggcttgccaagacgatcgccgccgcccgggccaagcgggagatcggcgaggccgagaaggaaggcgtggacaccggcgtcaccgccgtcaatccgttctcgggcgaacccgtcccgatttggctggccaattacgtcctgatggagtacgggacgggagcgatcatggccgttccggcccatgacggccgcgatttcgatttcgcccggaaatacggcctgccgatccgcgaggtcatcgtccccgccggctccccgcgggatccggcggccgggttgttcgaggaccggggcgtccttgttcagagcggcccctacgacggattgacttcggacgaggcggcaaaaaaaatggccggttgggccgaaagccagggcgtcggccaagcggccgtcacttaccggctccgcgattggggcatctcccgccagcgctactggggcacgcccattccgatgatccactgctccgcctgcggaatcgtccccgttccctacgaagaccttccggtccgcatcccttacgaggctcggttcaccggagaggcgggctcgcccctggagaagatcccctccttcgtcaacgtcgcttgcccgaagtgcggccggccggcccggcgcgaaaccgacacgatggacacgttcgttgattcgtcctggtattttttccgctatgcttccccggccgaggatcgcctcccgttcaggcgggaagcggccgaccattggctgcccgtcgatctctatatcggcggcgtcgagcacgccatcctccacttgatctattcccgcttcttcaccaagctgctccgcgacctcggattgaccgccttggatgagccgttcccccactacttggcccaaggcatggtgacgatgggcggcgcggccatgtcgaaatccaagggcaatgtcgtcgacccggacgaaatgctggggcattacggggccgacgccctccgcttgttcgtcctgttcgccgcccctccggaaaaggaattcgcctggaacgaggaaggcatcgaagggtgttaccggttcgtggggagggtttggcagctctaccgcgagatcacggccttgtcggccggggaggagccgccggcaggcgggaccgtcgatccggccgcggccgcccgtctccggaaaaaaatccatcagaccatccgcaaggtgggcgaggacatcgaaatccgatttcatctcaacaccgctgtctcggccgtcatggagctggccaatgtcctgcggaaggaaaaagaggctcttcggaattcggccgagggaagggctctcctggccgaaggaatggaggcgctcatcctggccttggctccgttcacgccccatgtctgcgaggaaatgtggcgggggacgggccatgagacgctggtcctccgcgcgccctggccgtcctttgatccgatcctggcgatggaggagaaggcgacgatcgtcgtcgaaatcaacgggaaggtccgggacaaattcgaggccgagcatgacgcggccgaggaggccgtcaaggaagcggccctggccctgccccggatccgggagctgctggaaggcaaaaccgtccggaaagtcgtcgtcatcaagggaaagatcgtcaacatcgttgtttgacgagggcggctcaggggagccggcccccccggcgggcggcgggccgccggcttggccggcccggaggaatggacggcgcttgaatcgagtataatgaagaggatcgaatctgaagacaacgagggacaaatgaacccggggaaagcaaggatgtttccggcctccttccgggccggtctggcggtcgggctggtgttcgcctgcgcctcgtgcgggtacatggttcgggggtcgggccggttcctggccgaccggaacatctcctcggtttatatccccatcttcaagaacctgacgacgcgttacgaggtcgatgtcaagctgacggaagccgtcatcagcgaatttatctcccggggccgggtcgcggtcgtcccgggctccgagtccgccgacgggatcctggagggtgaaatccagggattcatcgtcgagcccatcgcctatacgggagcccagggatcggccgaccgctattcaatcacgatccgcgcctccgtggttctgaaggacatcaagaaaaacacggtccttttttccaatccggcgtttgtctatcgaggggaatacgaagtccccgaggggatggatttcgaatcccaggaaaccgaggctttggaccaaatcgccaagctgttcgcgaaaaacctggtggttttcatcgtcgagggattctgagggatggccggatccttcttgcccgttccggaccggcccgaggacgtccgcccggcctattttttctgcggcgaggacttgtatgaagcccgcggcttcgtcgccgagctccgccgccggttggccggccccggcgaggcggccgttgaagtcgagaccttcatcctggccgatcgccgctggaccgaagttctcgacgccgcccgaaacatgcctttttttttctcgccttggcgtctcttgatcgtcgagggaaagggcgcgggacaggaggacctctcggccggggaagcggccgccttccgggattacttcgcttctcccgccccccaaacgacgatcatcgttcttttcgaggggaagatccggaaaacccggcccttggggaagtcgatcgcggccctgcccggtcccctcgcccgcatcgaggagatcgctccgcgcaaggaccgggagatcaagtccttgacggcggaaaagttcgaatccctggggaaacaggcgacgccggaagccgtggaaaggattttagacatcgccggcggcgagatcgcccggatcgattccgaagtggaaaagctcgccgtttacttggggccgcgaagaacggtcgaagccgatgatgtggccgccctctgctcggccagaagcttcgacaactgggagttgaccgcggccctggaggccggcgatacggacaaggccttgattatcatcgaaagcctgttcgaaaacggcgaggcgccggagatgatcctggcggtcctatccggatttttccggaccgcccttctggccaaagccgggcttcgggagggccgggatcccaaggaggttttccgggaagccaagccgtcgatcagcgaacggttcggcggcttctaccagaggatgctcggggaatacctcgccctgctcggacggatcaaggacgccgacctgcttcgctggctggaggagctggaggacatggaccgccgcctcaaatcgacggccgccgcgcccaaggaaatgatccaggcgttcgtcgtcggctatggaagaaaggcgcccgggcgccggatcacttcgccggggcgtcgctgattttcgtgatctgccggctcaggcgggatttataccgggaacccgtgttcttgtggatcgccccttttttgacggtttggtcgatgatcttgttcacggacggcagggctttctgagcctcgctcttgtccccggctttgatcaaaacgcgaagcttcttgacctgggtccgcagggaagacttgttcttggtgttgacggcgttgcggcgaaggctcgcgcgatgctggcgttcagccgaggcgtgtttagccatggttttctccttggaagtcgaagtataataaaagaaaggcctttaaaagtcaaattccgcccctggagaatgccttgagagtcgtcctgcagcgcgtccgggaggcttcggtccaaaccggcggcgaggtcgtctcccggatcggccctggcttgtgtcttttggtgggagtcgagaaaggcgacgccgaggccgacgccgaccgactcgcccgcaaagccgcttccctccgtgtcttctccgacgccgaaggccggatgaacctcgacgtcgccgaagccggcggagcgatcctggccgtttcccaattcaccctggcggcttcggtccgcaagggccgtcgtccgagcttcgacggcgccgaggaacccgcccgggccgcggccctcttcgatcgctttgtcgcggcccttcgttcgaccggattggaggtttcgaccggggtgtttcaggccgagatgctggtccgcttggtcaacgatggcccggtcaccttcgtcttggattcggccggcggccccgcgccggccggaaaaccgctcagctgaacttgaaatcgcagatccggtcgagcatttcttcggccgcggcccggacatagcggcttttatcccgggtcaaacggaccagcaggagacgggccgccgggccgccgatcgccccaagggcgagggccgcggcccgccggacgtcgacgttgggatcgtcgatcaagcgcttaatgtggacggcggcggcgcggtctttcttttcggccaggacgcggagacaggcgctcttggcgtaccagggaggccggtcgagacgctcgtaaagggcggcggccggccagttgtcgcgcctggacagctcgcggacggccaagtcccggatttcctcgatgctgtcccccaggagctcaagaaaaacggaaggaatccagggggcgtccaggtgggccagggcccgcatcatcctcatcttcttggcgcggtcacggaaaatatccagcttcttgaggagagcgttggtgaaagcttgggtatcgccggtctgcgtttccgccggcaagaggctttcgatatcccggagggcctgttcgaccacgtccggagaggcgggttcgggccggcggaggaacttggtcacggtcagaccatttctaaaatatgtcccattttatcctttttggttttcaggtagtccgcgttgatcgcgttgggggcgatctccaaggggacgcgctcgacgatctccaggccgtagccgctgaggccgatgaacttgcgcggattgttggtgatcagccggagccgcttgatcccgagggcgaccagaatctgggcgccgatgccgtagtcccgctggtcgggcttgaagccgagccgggtgttggcttcgactgtgtcggctccctggtcttggatcgcgtaggcctggattttggcggccaggccgatgccccgcccctcatggttgaggatgtagaggacgacgcccgatccttccttttcgatcatcgtcatggccccgtggagctgttccccgcaatcgcaccggctggagccgaacgcgtcgccggtcaggcactgggaatgggcccggaccagcacgggccggtcgccggagatatcgcccttgacgagggcgacatgcgtttccccgtggatctcgtcctcaaagatgaagatccggaaggttccgtattttgtcgggaggtcggcttcggagactttgcggaccaggcattccgtctgcatccggtactggatgagatcggcgatcgtcaggatggggattccgtgctcgcggctcaggcgttcgagctccggccgccgggccatcgttccgtcggggttcatgatctcgcagatcaccccggccggggtgagtccggccatccgggcgaggtcgacggacgcctcggtctggccggcccgggccagcacgccgccctccttggcctggagggggaggatgtgtcccggcttggccagatccgacggcttggtcttgggatcgatggccgcccggatggtcgccgcccggtcgaaggcggaaatgcccgtcgtgataccctcaacggcgtcgatcgtcacggtgaaggcggtctggaagcgggccgtgttctcctggaccatgagcggaagctggagctgctggagacgctcccgggtgagggggaggcagatgagtccccggccgtaggtggccatgaaattgacgacttccggagtcgttttttctgcggcgaccatgaaatcgccctcgttttcccggtcctcgtcgtcggtgatgatgatcaggcggccggcgcgaacggcctcgagggcccgttcaacgttcaccgcgtggggagctttaacggccatggatacgtcctaacgcttatggaagtgaagaaaattatacacgtattttccgagcatgtcacattcgacgtgaacggccttcccggcccgcaggtccgccaaattcgtccggcccagagtttccgggatcagctcgacgtcgaacgatcccggcccgaccgcggccacagtcaggctgacgccgttgatcgcgatcgatccttgggcgacgacgaacggccggaaggcggccggcaggatgacggccaggcggcggcccgacgaccgggaagaaacgcgcttgatcttgctcgtgaaatccacgtgtcccgagacgagatgtccccccagcggatcggccaaggtcaggggatattcgagattgagcgtctcgccggggcggcggagggaaaaattcgtccgctcgagcgtttcccggaccgtgttgaaaaaaaggcgatgtccttccttgcggacgagagtcaggcagacgccgtcgacggccaggctttgtcccggcgcgatcctcccggccgcttccggggattcgacgatcatttcccgcccgttttcccggaagccccggaaaatccccctggcctggatgatgccggtgaacatcagatatacccctccaagatgaggtctccgccgaggcggaatgaggaaacgcgggacaggcggggagcggcggccagccggtccgccccccggccggcgaagagcgccacggcgtccgctccgccgatcagtatcggggcgacggccagaacgactttatcgaccaagccctcgtcaaggaatccggccgccgtgcggcccccgccttcgacaagaagggcggcgatttccctcgatccgaggtcggaaagaacacgccgcagatccagccgcggtccttcgccgggaagctcggtcacctcggctccgcgtcgaagaaggcgggccttgcgggcctcccaatcccggtttccggcccgggcatacaacagcaccggcccgtccgacggaacctcaaacagccgggcttccggaggagtccggaggtcgggatcgaggacgacccgcaggacgggcttgccccttcgtcccggcggccggacggtcaggcgcggatcgtcgtgccgaaccgtttgggctccgaccagaaccgcgtcgttttcggaccggaggaaatgggcgtagcgccgggcttcgagagacgagatccaggcggattcccccgtccgggtggccagcttgccgtcgaggctgagggcggatttcaaggtgacgaagggccgccggtcgacgatgtacctggcgtgggcttcattgagcccggatttccgctccgggcggccggcgacgtccacggcgaggcccgccgtccgcaggaaccgtacgccccggccgcggatgacgggattgggatcgagaccagcgatgacggcccggacgattccggacgtcaggacggattcggcgcaggggggcgtccgtccccagtgaacgcacggctccagggtgagataaagagtcgccccgcgcgcgtttttcccggcccgccggagagcggcggtttcggcgtgctcccgcccggccgcttcgtggaagccggtcccgacgatccgcccgcggcggacgacgaccgctccgacatggggattcggggacgtgcggccgagcgcctggacggccagggcctcggccatgtccaggtaggcgagatcgcgctcgtcgatcatgacatcagggcctcgacgaaggcggccgggtcgaagtcctccatatcctcggctccttcgccagtgccgaccaggcggatgggcaggttgtactcgtcggcgatcgccagcaccgcgcctccccgggcggtgccgtccagcttggttaaaactaatccgctgaggccggcgcacttgcggaattcccgggcttgaacgagggcgttttgtccgagagccgcgtccagaatgagccaggtctcgaccggccggccgtcgatctcgcgggagacgatcctcttgattttatccagctcgctcatcaagttggcgttggtgtggatgcgtccggccgtgtcgacgatcatcaggtcatatccgccggcgaggaattcgcgggcggcgtcgaaaaccacggcggccggatccgatcccggccggccttgatggacggggacgcccagccggcgcccccagatcgccaattgttcctgggcggccgcccggaatgtgtcggccgccaccaggagaacccgtttcccctcggccgcggcccgctgggcgatcttggccgccgtcgtcgttttcccgcctccgttgactccgaccaggaggatgacgccggacaatcccggtccttcgtcccggatttggcggcgggaaagaagctcgatgagctcgcttttaaggacggattccagcgtttccgcgtcgtcgttttttttggtccggttccggacggcggccgtgattttttcggccacgggaacgcccgcgtcggccaggatcaaggattccgaaagagtctcgagaatctcctcgcgcggccgtccggggccgaagaccttcccgaaacggtctttccaggcctgtcgggttttcgccaggccgtcccagagtcgtcctaacatgatgaaaggattatagattccgccgggggtcaagtcaacgaatggaggagaagcgtgctttgaggcggcccgccgatgtgttaaagtgaaagatgaaatgagcgaaacggcctggagcatcgccccgccctcgaccgcggctcccgccttggccgccgccctcggactgccgccggtcctcgggcagattctggccaatcgcggtttcacggacgccgccggggcaaggcttttcctcgaggccggcttggaggacatccccgacccgttcctgctttccggcatggacgcggccgtcgcccggatcgaaaaagcgatccgggaaaaggagacaatcctgatcttcggggattacgacgtcgacggcgtgctggccacggtgatgctccataaggcgctgtcggcgctcggggggaaggtcgattgcttcatcccggaacggctcaaggacgggtacgggatcaaggacggccacgcggaggcggttgtcgcgcgcggagcccggctcgtcgtcagcgtcgattgcggcatcaaatccgccggcttcgtccgcgcggccgcggccgccggtgtggatgtcatcatcaccgatcatcacctcccgggacccgagcggccggcggccctggccgttctcgacccggtcctgccggaagcgggttatcccgatcggaacctggccggcgtcggggtggcgttcaagctcattcaagcgctctaccagagagccggacgggccggcgttcttccccattatctcaagctcgtcgccattgggaccgtcgccgacgtcgtcgaccttcgcggcgagaaccgcatcctcgttcggcggggcctggccgagctggcccgggtgtccaatcccggcctgcggagcctgatggaaatctgcggcctgaccggccggccggtgaccgtcggggacgtcggcttccgcctgggtccgcggatcaacgcggccggacggatgggccggacggagctcgccctccgtctctttttctcgaagtccgcggccgaggcggccgccgtggccggcgagttggacgtcctcaaccggcggcgccaggaaaccgaggattccatcctggccgacgccgaggggcgcgtccgggccgggggattggccgaaacgcataagatcttgatcctcggggatgaaaaatggcatcggggaatcatcgggatcgtcgcctcccgcttgaaggaaatctttcatcggccggtcgtcctgttttcctacgacgacggctgcgccttcggctcggggcgatcgattcccggattctccctgatcgattgcctcgaggaggcccggcccttcttcctgagctatggcggacaccggcaggccgtcggctgcacccttcgccgggaatccgtgccggccttcaaggaggcgatgaaccgggccgtcgacgcccgcttgaccttcgatgatctgcgaccctcgatcgccatcgacagccggctggagttcaccgacatcggggcggacttgtggcgcggcctcgctcttctcgagccccacggcgtcggcaatccccggcctgtttttctgaccgagggggccgtcgtcgcggccgagccccgcaagctcaaggaccgccacgtcaagttccttctgcggaaggacggccggacgttcgaggcgatcggctggaaccggggcgcctgggcgggggaatttccggccggaagccggatcgacggcgtgttcaccttccagacgtccgcctatctcggcgaagagcgcccgtatctggcgctcgaggatctccgggcgggatgagagaatccatggctcatccgtcttcccgaagccgggcgaaaacggccgtccgcgttctcctcatcggctttctggccgtcctcctcgccgttgttttcgtctttttaagccgccggtccgaccgtccggcggccattcggcccgagacgcggccgctgaccacgcaaaaagtggacgtcaaggaaaatatccatttcgtgaaagacacgggaggaagaaacattctggatgtccaggccgcccggaattttacggatgccgtcggactctatcacctcaagggaccggaaggggaaaagggcggcggggtccgcgtcgaaagccgcgcccgcgacggacaactgaagttcgcggcgttcgcggaggaagtgatctacgatgcggattggacccgccttgtgttccggggcggcgtggaaatccgcctcgacgacctcaccgtgaaaggcgcctccttcacctatcacaaaaaccgggacgcggtggtcaccaacgttcccgcggttttcgagggccggcggttccggggcgactgccgccgggccacgtacaacgtcacggatgaatattttgttttttccgggggaatcaccctggtcaccgcgccctgggacgacgaccccgttccggtgatcatcaccgggaaatcgatgacctatgcccggcagccgcggacgggggaaatccgcggtgacgtccgtatcgcccacggccggagccgcggccgctgcaacgacgtcttcttcgcccagtttcccgacaagcccgagtttcggctattcgacttccacggaaacgtgaaatgggaggcggacgaacgggcggtcccggcggccgtcccggccaagccgaaagcgggcgaggcctctcccgcagatgacgaactgatcttcttccaaggcgggcggcagcggatggaggccgggtcgatgatgttcgttccttacggaaccgagggctgggcgcgctacggctccatgcagggcggcgcccgggtcgacatcctcggcgaagccgggcgccagacgactttggaagcgcgggatacggtgtttttttatgatgagggttgggctctgcaggcgttccggctgcagacccgggcccggatccggggtgaggcggaaggccgaatgcggctcctggaggcgccgaccatcaattacggcgccgattccggtctcctggcggcgaacgggacggcggccgagccggcccggacgatttcggggggacgggagatcaccgccgaatggatcgccctcaatctccaaacgaaaaatctcgatgcgcggggcggagtcaaaatcgtttcccatccggaagccggaaacgccggcgacgccgccctgttcgcctccggacggacgacgttcatgaccgccggactggcccattacgaaggcggcgagaggcaattccgcctgggcgagggggcccgcctttggcagggccgggaatccctggaaggccgggacgtcctgatcttcgaggccaggggcgacatctccgcgtccgggaacgtccggtcggtgttttttcatcgcgatcaaaagaaaaacgaggatcaacgcgtggaagtcaccggcggacgcatggcccgtcagtcgaaaaaaggaaacatcctcttcctggactcctgttccttgacggtcggagaaatcgttctgaaagccggccggctgattctcgagcccggcgtcggagaggacggggaaaaataccgccggatcatcgctgatcaggagcgggtcaccgttacccagggggcgaacacggcccggggcgaccgggccgtctacgacctcagcgaggatgtgatcgtcctgacgggaaataccgtcctggaggacctggccaagggggtcatccacaaggacggcaaattgactttccatccctccgatggtaggattttaatcgaaaacaaggacgccgagcgatccaccaccatcatcaagtcgtgagcgatgaaatcgtcgctgaatgcttctcatttatccaaatcctacgacggcaaaaaggtcgtcgacgatatctccattgagatccaaagaggagagatcgtcggtctcctggggcccaacggggcggggaaaacgacgacgttttccatgattctcgggcttgtcgcccgtgacgcgggtcggatttatctcaacggcgaggacatcacggacgatcctatgtatttacgggctcggaaggggatttgccttcttccccaggatccctcttctttccgccggctgacggccgaggataaccttctggcaatcgcccggccggcgggccggcggcgcggagacgcccggaggaagctccgggaatacgggctggaatccctcgcccgggccaaggcctatacgctgtccggcggcgagcgccggaggctggaaatcgcccgggcgatgatgacctctccggaattcatcttgctggacgagccgttcaccggcatcgatccgatcgccatccaggatttgcagcggatcgtccggaacatgaaggacgacgggttgggcgttttgatcaccgatcacaacgtccaggacaccctccggatcgtcgaccgggcggcgatcatcgacaagggacggatcgtcgaggaaggttctccggaagcggtcgtcgcctccccggaagtgcggcggcgctatctcggcgaggattttcgagtttaaacggagcgcaacggcggatcaccatggctttgaaacagcgtcttgatcagcggcaggtccagaagctgattctggctcccgccctgcagcaggcgatcaagcttttgcctctcaccaacctcgagctgatcgaggtcatcgacgaggagctgtcggccaatcctcttcttgagctcgaggaggaaagtccggaagtgaagagcgtcgaggaaaccccggcggccccaagcgcgtcggaagatcttcccgcgggcacggccggggaagccgaagaatccttggccgaggaccgggaattcgaatcctatttccaggaatacatcgacgacggcttccgggcggggccggccgagccgccggaagcgcccaacatcgaaaacatgatctcccagagcgcctcgctcggggaccatctgacctggcaggccaatttgacgttcttcgatcctctcgaccgggagatcgccgagcggatcatcgggaatatcaacgacgacggatacctgacgtcatccctggatgagatcgggctcagcgccggggccccgatcgagcgcgtccgcgatgtccaggctaagatccttcagttcgatccggtgggctgcggcggcctggatttgaaggaatgcctgctggcccagatggacaacctgcaaatcaaggaagaagccgcccgggcgatgatctccgagcatcttccccttcttgaaaagtcggatttcggccaggtcgccaagcttctcaaccttcccctggccgaggtcaaggttcatctggagatcattaagcagctggatccggccccgggccgcaagtacggcgaggaccggacgcatttcgtcgttccggacatcacggtctccaaggagagcggcgagttcaaggtcgccctcaacgatgagggcctgccccggctccgcatcaacgcctattaccgccggcttctggcccgggccttgaaggagaatccggaggcctaccggtatctcaaggacaagatgaagaaagctctctggtttttgcggagcctggatcagcgcgaccagacgatttacaaggtcgccaaggcgatcgtcgaccgccagaaggatttcttcgaaaaggggctcgacggccttcagccgctgacgctcatggaaatcgcccaggagatcggggttcacgagtccacggtcggacgcgtcgtcgccaacaagtacatgatcactccgcgcggcacgtattccctgaagtattttttccataagtcgctccagggcggattcggcgaggagatctcctctctccgggtcaaggaccgcctccggcgcctgatcgaatccgaagacaaatcccgcccgatgagcgacatggaaatcgaggaaatcctgacccgggagaatttccccatcgcccgccggacggtggccaaataccgccagcagctggatatccttccctcgcatatccgcaagcgcaaattcctaatggaggagtcttgatgaacgtccacttcacggctcgacacgcggcgatccctcccgatctcaagacctatgccgagaagcgcctggccggcctggcccgttttctggaccgggcgaccgaggcggatgtcgtcctctcggctgagaaaagccggcagcgggtcgagatccaagtccgcgggaagcagggccggatccgcgtcgcggccgccggccacgacgcggccgcggtgatgaacgaagccttcgaccttctcgacgtcaagctgaaaaaggagcgggcgaaattccgggaaaaaaaacgccggggcgggcgcgaaaccgccgccgccgcggccggggaaaccgccgccgggcttccgccgcgtgtcgtccgggccgattatttctccgggaaaccgatgtccgtcggcgatgccgtcgtcgaattcaacctccggaaaaaagaggttctgatgttccgcatggagggagaggaagaccgctgggcggttctcttccgccggaaaaacggaaccttcggcctggtccgtccggaatgaacgccgtccggtccgccgcgccggccgtcgtctcgggagggctcctccggatgttcggcctgggcgtgctgatcatcggcgacagcggagtgggaaaaagcgagagcgcgatcgaactcatcgcccggggccaccggttcattacggacgatgtcgttgaagtccgccgccggcccgacgggcggatcatcggccgggccccgcggctgagccgtcatttcatggagctgcgcggcctggggctcatcaacgtccggtatattttcggcccgaaatcgattctccgcgaatcgacgatcgacctggtcatccggttgaagaagtggagccggaaaaaggaatacgaccggctgggcctgcgctttcccgaagaccacctcattcttggaacccgcgtcccccagctcaatatccccgtcgcccccgggcggaacatcgccaccctgatcgaggtggcctgcgtctcccatcttttgctccggcgcggccgccgcgccccggatcagatgctccggcgtctgaaccgggcgttcgccgcgggaaggaccggcaagccatgacccatcgacccagccgtttcctgatcatcacgggcctctccggatcgggaaagacggtcgccagccggtttctcgaggacctgggctttttctgtgtcgacaatttgccggccaagctcatcccctcgtttgtcgacctcaggcggcggaagtcggaggttctggaacgcgtcgccctggtcatggatatacgcgagcccgggttcctggctgattttcccaaagaatgggcgaaaatcaagaaaattcagggagcccggcttctctttttcgacgccaccgacggagccatcgttcaacgtttcagcgaaagccggcgtccgcatccgttggcccgcggtcgttcggtcctggacgccgtccggctggagcgcaagcggctcgcctccatcatcgagctggccgacgacgtcatcaacacgtcgtcgatgaccagcgcccagcttcgcgacgttctctcccggcgttttttccgggccgacaagcagccgttcatcatccgcatcatcagcttcggctataagcacggcattcccctggatgccgacctggtcttcgacgcccggtttctccccaatccgttctatgaggacgatctccgggagaagccggggacgaacgcccgggtccgtgaattcgtcctccggcggcccgaaaccaaggatttcctggccgagctgggccggttcctgaattttctcctccctcgtttcgaggccgagggcaagagccagctcgtcatcggcgtcggctgcaccggcggataccaccgttccgtcgtcatcgccgccgccctccgggatgtcctttgcggccggaaatatgatataaaggtttttcaccgggatattgccaaatgatcggcggcctcatcgtcatgcacggaaagttgggggaggagctcctcaacgtgctgacgatcatcctcggggaaacggccaacatcgaggcgatttccatcggctggtacgatgatgtcgaggaatcgaagaagaaaatcgcctccagcctaaagcgggtcgatcagaaaaacggcgtggtcattttcaccgacatgttcggcggcactccctccaatctcagcttcaccttccagaaggacggaagcgtcgaaatcatcacgggggccaacctgccgatgctgatcaagttcatttccctccagcgtggaatgtccctgcgcgacgtggcccggaaggtcgtcgagcagggccggaagaacatccacctggctagcgccatcctggacgggaaaaaatcctgagatgatcgagcatgtcgtccgcatcaagaaccgcctcggacttcacgcccgggcggcggtcaagttcgtcaacctggccaaccggttcacggccgacgtccggatcgagaaggacggaagcgacgtggacggcaagagcatcctcggcattttgaccctggccgcgacccaggggacggaaatcaccctgcgcctcaacggggacgacgaggcggcggccttgaaggccatcgtcgatctgatcgacggccggttcggcgagaaagagtagccggagaaccgcgtatggattacttgcgcctgcggggaatcggcgtctcccccgggatcgtcatggggccggtggtcctggccgaccggaccctgttttccagccggaaggtgtatatccccccgtatcgcgtcgccgatgagatcgagcgcttgaacgaggccctccggcggacgggcgatgaaatcacgacgatcaaggaccaggtccgggcgatggccggcgacgaacatgcgttcattttcgaagcccacctgctgattctccaggatccggcgctcacctccggattggaacgcctgatccgggaggaaaacatccggacggaatcggccctgagcgaggttcatgagtattaccgtcgtgtctttgacgcgatcgccgacgaatacatccggcagcggaaggcggacgtgaccgacgtcctgacccgcatttaccgcaacttggacgccggcgaaaaattgtccgtctccgacgacctgcgggggaaaatcctcgtcgcccacgacctcctgccctcggaagccgccatccgcctcagccagggcggcgtcctggccgtggtcctggacatgggcggccccacctcccatgccgcgatcctggcccgttccctggacatcccgacggtcgtcggcctccgcgacatcacccagcaagtcagcgccggcgacgagctgatcgtcgacggcacggacggcgaggtcatcgtcaatccgccgctgatgatccggagggagttccagagcaagaaggccaagtatgaagcctaccgcaaggaactccgccggattgcgacctggaccccggtcacccttgacggaatccggttcgtcccgatggccaacatcgagctgcccgaggaagtgggtcacgccctgtcctacggggccgagggcgtggggctgttccgctccgagttcatctacctccaacgcgcgaccctgcccaccgaggaggagcatttcgccatctacgaccggctggcgcgggacgcttttccccgcccggtttatatccggacgattgacatcggcggggagaagactcttccccagctgaaaatcgaggccgagccgaatccggctttggggctgcgggcgatccggttctcgctccaaaaccgtgaattgttccgggttcagatccgagccatcctccgggcttccgtccggaaaaatgtccgggtcatcatcccgatgatcacggaaatggaggagatcggcgaaatccgcgttctgttccgcgaagcccgggaggagctggccgcccagggtctcggcttcgatcccgacgtccccctcgggatcatgattgaagtcccggccgcggcggccatcgccgatctgctggcccgggaagtggacttcttcagcatcgggaccaacgacctgctccagtatttcctggccgtggaccggtccaacgaatacgtttcctacctctacaagcctctccaccccgcagccttgcgtcttttaaagcatgtcatcgtctcggccgaccgccagggaaaagacgtcgccctctgcggagagatggccgccgatcccctcgccgccgtcgtccttctcggtctcggtctgcggacgttcagcatgaatccgattttcatcccgcggattaagaaagcgctgcgggcggtggaagtccgggttgtccggcgggtggttcagaaggcgatgaatctgcgctcggcccaggaagtcgaggaattcatcatcgaaaagctcctctttaagtatcccgatgcgttcttgatgacgagcccgtcatcctgacgggcggcggcaggaaatgggggcgtcgccggcggctcccccggaggaggagggacgtcatggaattcagccgtcttttggtcgggctggccgtttgcctatgggctttcgtgatcggattttcgatcgtcgccttcggccagatcctcttggccgtccgcgagatcgcgctcaacacgcggaaggaggagggcaagtcccaccacgggcattacgccatcctccttgtcatggcgaaaatcaacaatgtgttgggctggatcgtggtcgtcggaggcctggcggccgggatttatgtcatcgtcttcggcgttccggcgttcaccgggctgacgaccccggtcgtcgattccgcctatttgcgcccgtaaacgtcttcgtagcggacgatatcgttttcgtcggaatcgcccagccagatctccatgattcgggcgggcccgggcccgacgccgcggacgcggtgccgggcttcccgcgggatgtagatttcctcgtcggccgcgggccgccacacccggtcgcccaccgtcacctcgagtccctcgtcgagggccacccagaactccgccctccggcggtgggattggagggatagggagcctcccgggttgaccgtgatgatcttgatgcttccggcctgttcatggggaaacgcccggaacttcccccacgggcggtgatcctcgatgatccgggagcggaaattccgctcgtcctcagaaggggacatcgtcctcgccgagggaagccggcggctcttcatcggagggaaaatcgggcgagggggcgtccggacccggctcccggtagggcgtatcgatttcagtcccgcgcggctgggcgtcgcgggggccgaggaggacgatgttgaacgcctcgatttcggttgttttgcgcttgttgccgtcgcggtcctgccaggaccgcgtccggatcttgccctcgaccaggatctgtttgccgacttccaggaatcggtcgcagaattcggccagcttcgcccaggccacgatggaatgccattcggtccggatcgacgcttggctggtttggggattgaacgagcgttcgttggtcgccagggtgaaacgggccaacgcccggtcgctttgggggaagtgccgcaattccggcctctgcccgatccgtccgatcaggatgaccttgttcaagctgttgacgtctctcatggggcttcctgcagttccttgattttttgctgagcctgccgggcttcctcctcgaggggatattttgaaagaagcagacggaggacggcgagggcctcggttttctttttcatttcggccagggcgaatcccttcttgagataagccgcggcgatcttgtcgctcatgggatacgtcaggatcaagtcatcgaaggcctcgatggcggctggaaattttctctggctgaaccggcattcgccgatcatgtagagggcgttgtcggccaacgggctggcgccgaattgttcgcgatagagggcgaagccgtccacggccaagtcgaggttccctttgctgaaatcagccatcgccgcctgataggcttcctgggcggagaggccggacggagggacggtcgcggccggcggctccgccgccggctttcgggccggtccggctttttcctcgggcttgggctttccccccgcctccggagcggccgtcgtctcccccgccggagttttggcggactcgagatcggcggccagttgaagaaggcggttttcgatctgggccagttgttcctggatgctccgcacctggccggggatttcgctccatccctcttgattccgggcttggaaaatccggaaatccttgaattgggcggccaagtcgcggacgatatcgccgagtcctttcagatccgcgcccgcttgatcgatcttcttctcgatccgctgagtttggatcttgagcaactgaatgtcttcatacatcagctcataggccttcttgctgcggtcttgggccgcggcggagagggaaaggcccgccatcagcaggacggcgggccacgaacgcttcattaaggttatttttcgatgacgaggaactgggcccggcggttgttcgcccaggcggtttcgtcgtgacccatatcgagcggctggctcttgccgtaggaaatgatcctcatccgctcggccgggatgccgagagacaacaggtagtccatcgtgctcttggcccgtttttcgcccagggccaagttgtattcctcggtgccgcgctcgtcgcagtggccctcgatcaggattttcgccgtttggaatttcttcatccaagcggcgttggcttcgagaatccccttcgcgtcatcgcggacaaaatacttgtcgtaatcgaaacggatgttcttcagggcccgctcctggttgatctgatcgagcgtctttctcaggaagagctcttcttccgaaagcggggcggcttcggccggcgccgtttccgtcacttgctccacgacgggctgttccttgacctgcggaggaggcggaggggtgggttttgttttcgctttgcaggaaactcccaagcctagggaaatggcaaggagacagacaagggccaaaacgattgtttttttcattgagtcctcctttgtcagtgtgatcgttgagggcacgatgaaatcgtcccccgccaatcccctatatacatggattaagacggtgtgtcaattcggatcgtctcaccggttgcgcgaataataaaatggattaatttacggggaaataaggcggatcagcgggtgaatccgcttcttgggaatggtccgcgaatgaggaagggacggtttcccctgtccgggcgatttcaccggtcttttcgggaggcgcaaatcggcgttctttcggggagagacggccggagggagatcccgcttcatcgtgtaaagacgtctccacccctccgccggagagccgggttcccttcgggcgttgcggacgtcctccggatttaccgggccgttttcaatcggaaatggagccgcgtgacgtcccgtcccgggcgcgggcctcactccgcggttttcactgtctccgcggacaaggggggagagatcgtttcctttttcccggccgggtcttccggctcctcgaaaatgaaataccggtatgttccgtcgttttccttgcggaggcataatcggtcgaagggcgggatttgggcggcggaggcgtcccagatcgcgtaacggatcttgttttccctaaggaaacgccgtaatttcctcaggccttgaaggcgtggaaaatccgtcacgaaaacccggcgtcggcccagcggatcgcagaccatcccgaacatggccgtcatcggcggggagagaaccctctgttgattcaaaggtccgaggagaacgggctcgaaatcgcctttcattcggcgatacgcggcgccgcggcgggtctcgtcgatcgtcatgaaggggcggctccaagtcagccggtcgaagccgatcttccgttcggcgggaaaagcagtctgtcccccataccagtcgattccgctggctccggccagccacatgattcccgccgccgtttccgcgagaaaaacggcggccagaaggatcgcccaggaggcgatccatttccggccgcggctttcccaaaatttgtcgagaacgaggacgaggaagggcaaaccgattccaagcagccacgccgtataccgagcccaccaatgcatcggcgtcaaaagaaaaaccagggccgcgcagaggaggagcgtgatccgggctcggcgcaagccgggaggcggcccggattttttcccggttaaacaggcgaggatgacggccgggaggcatcccaaaagccagagaaggccgagccctcccaagcgaccgctggcgctgcagaccgaatacggccagtgagccgggccgccctgcatccagacataagccacctgcttccagcccggccagttcctgatcacggggggagtgttggcggccttgttcaagataaaatcaaccgatttggcggatcgaccggggtcaccgattttcagcgtcagggggtaagccggatttccggtgtgggcgaggtttcgagcgtaccaatagccgccgaccagggcggagatgaggaaaacaacgggaatacaggcccaggtccgaagattcgccgcccgccgggattcggccggcaatctccgccggcgaagtccgagaacgatcaccgcggccgctccggccacacccgccggaaggattcccgagctcttgaggccgaggaccaggccggcgccggcgccgaaaacggcgacttcatcccaagcggcgaatcgaccgcgcgtgccggcggccaggcgggacaaaacggcgaagagagcgaccaccgccgaggcgaaagccgaatccacatatgtcccgttcaactgctggatatggaccggcgccagagcgaagagcagaccggcggtcagcgaagcttccgccgaggcccccaggcttgaggcgataagggccgtgccgctgattccgatcgccagaaaccaggcgttgaggagatgaaccagcccggagatccccgtcgcctgaacgacgacgaagcccatcaattcggcggccttgggatagccgttgatgaagagatcggtgaagaagggcttcaaaggttgcggggcgacccagtggacaaagcctttttcgctccagtaatgaacggccggcagatggtagatcaggcaatcgccgaagagataaggatggaaataagcgacgatgacggtcaagcccagaagggcgaggagaatcgggatgactccgcgcaggatcggagccaggggagacggggcggcggtctcgttcggccccgtttcagggaatcggcggaaaagccggtcgaaaccccaggctccggcggccgccgcggccagaaccaccagggcggcggcctgcgaaatgacgatatgagccaggctcagggcaatggtgagaacttggacgagagctaaaaaaaccaggccgccgctcagccggcggaaccaggtctccggcgatgatcgggaaagaacggttgtccaggccgtcgcccccttgaatcccatggagattttcccttctttacggccaatgtaccacggagagaacgggaaatcgaggccttgggcctcatgatcaggacgaccggatcagtttgaccagtcggcgagcttgttttcccccatggacgtcagcttgcggaaattgcggccgtcgacgtcgatcgcgtggatttggttccggccgctgacgttggaggtgaagaggatgtggcggccgtcgggggaccaggagggagattcgttccggccgtagatttcggtcagcttggaaatctgcccggaccggatgttgtacaggtagagatcgaaggcgttgtccacccgggcgacatagacgatcttgtctccgttgggcgaccaggcgggggcgtcgtgatggttggctccgaaggagatccggcggacgttgccgccctcggcgtccatgatgtagatctgggtcgttccgctgcggtccgaggtgaagacgatttcccggccgttgggggaccaggagggggcgatgtccaccgccggattgaaggtcagctgcttgatgcgtccgaccctcgtggggttggactcgatatcggcgacatagatttcgtggtttccgttcatggaggaggaaaaggccagctttttcccgtccggcgaccaggccggggtgtaattctgtcctttgagggagacaggcgtgcgggcccgggctttctcgaagacgtcgaggatataaactccgacaaccaggttctgccaggagctgtaggccaagcgcttgcctcccgggtcccaggcgggattggaatcgttgacttggttgtagatgaggcgggtctggttggccccgtcgtaatccatgagatagatttcctcgttgcggtcccggttgctgacaaaagcgattttcgaggtgaaaatcggcttttcgccgtacgctttcatgatttcatcggccgtcgcgtgggccaggtagcggagatttttatccttgtactgaaaacgccgcggggcgatgatcgtgcgcttcgatttgacgtcgtacagaacccaggaaaagatgatccctccctccggctcggcttccacccggccggtgagaagaacgttggcttggatggattcccaatccttgaactcgggactgttcgggtcggtcagcggccggatgtatccgtaatacgacttcggaagaagctcgaagatccgggtgtagcggatgtcggcctcgaggacggagtgaatctcggcagccgcgtccttggccgccggggcggcgacgaacggcgggagagcgaaggccacggccggcattccttcggtgatccgcatgttgaattcctgctgggcggaggccccgccggccgcggacagaaaaaggatgatcgtgacaaggacgttttttttcatcgggcatgctcgaagaggagattgatccccaagtattccccgtcgtaatcgtcggggagaggggggaaatgggcggcgttggcgaccgcccggacggcgatcaggtcgaaggcccggagaccgctggactgcttgatttcgatcgtggagatcgaaccgttgcggtagatccggaaataaacgagggtttggagaacgttgttgggcccgggatcgatgctgccgggaaaccagttgaccgtgatttcatcccggacgcggaggaggtaataggcgtaagggaattcggccaggccgtcgccgaatccctccccgaacccgccgcccgaaccggcgcctccgggaccgatggtcaggccggtgccgccttccccgcccccgcctgtcccggcggccgacccggacgctccggccttccctcccggacccggcttggagatggaggccctcttttcggcggcggctttgcgcttcgtcttgtcgtcgacggggtaccgaagccgtgattcggtcttggggacgactttctccggaacggtcaggtcgcggagggattccggcttgctttggctgaccgccgtcgttccccccgcggctttgtttccgccgccggggagccgtccgtcgccgcctcctcctcgtccgcccccgccccctcccaccatccccatcgaaatgtaatggatgacgcccttgggcgagggcttcttgggaagggagggattgagaatgatgaaggaaaacaggatgacgtggccggcggccgaaatgataagggcccgcttgaaggcccggtcgctgccggcggcgctccaggtcattttcggccggccttcttctcctccggccgggtcatgaggccgaccacctcgactcctgttttcttgacgatgtccaggacgtccatgacgaagccgaaggggaggctcttgtccgcccggaggtagacgactttcttgcttttcccgtagaaagcggcctgaagctggcgttcaaggaggttgatgttgatgatcgagtccccgatatagacggactggtcgggacggagggtgatggacaggccctcctcggccggggccgtgtcggtttccgccgtcggaagatcgaccccgatgccgctttgcatcatcggggccgtgaccatgaagatgaccaacaggacgagcatcacgtcgacgaacggcgtgacgttgatctcggaaagggccgtgccgacgtcgcgcttggcccggacggtgggaagcttagggagaaccatagagccgttccgcgatgctgagaagctcgagggaaaaatcctccatgtcggtgatctggtccttgagctggtggaggaacatgttgtaggccatgaccgccggaatggccgcgaacaaaccgacggccgtggcgatgagggcctcggcgatgccgggggccaccgagaccaggctggtcgatccggtgacgccgatcccgatgaaggtgtccatgatgccccagaccgtgccgaacaggccgatgaagggcgagacgcttccggtcgtggctaaaaatcccatcattttttccatccgggcgacttcggcgttggaggccttcgtcaaggcccggctgaggttttccaggcgggagccgtttgcgggctcggacgccgcctgctgctgcttggccaggtaggcgatctccttgtagccggccagaaacagggcggccgcggggctgcccggataggatttagcggcctcattgacctcggtcaggctccggctttttttaaagatctccaggaatttcttggaccgggccgtggccgtccggaaggtcttgcgcttgaatatgatgatcgtccaggagaacacggaaaaaaagaggagaatgaggaggatcgcctgaacgacgatcgaggcatcggtgatgagcttgaagatgttcatgggcgttccggttcaggataacacagggccggaaccgattcaatttaggccgccagggatccggtctttcgggcgacggcggtcaggccagcatctttgtaagaatcgccagggccgtctccttggccgattccccgctttcatagaccggaccgacgcaggacgggcacccggacttgcaggggcaggcggcgatcgtcttcaggcagtagtcgaggagcttctcgtcgagatcgaacagcgtcgggctcaggccgatgccgccgggataattatcgtagaggaaaatattgggctcgaagtccggctcgagggacaggacgcccgccccctgctgaactttggcccggacgtccctggtcgggatcgattcgcccgtcgcgttgtcgccgatcgagacgcccaagtcgtggatgtcgcacatgagaaagagcggagcgacgttgtggaggatgtaggacaagccgtagagcccgttgattttttcctcgggttcgtaggccaggccggccaggagatcccccgggatcgtcgcccaccaggctgtcgtgcccatctcgttctgggggaggctcaaatcgcccgcgccgacgttttcctgggtgtgaaacttgattttcttaaaaccgacgacttgggtggcgacgtggacttcgccgtggcggacgtcgaagcgtttcaggcgttttttgtcgaactcgtccaggatcttgatcttggtgtagtcgatggcgtcggtatagtagtcgatgtcggtcttcttgacgtacgccttgcgctcggtgaagtcgagcttctcgacgaagtactgctcgccctcgcagagatagatcgctttctcgtggagagtcgtcagggccgccgtgaaatccacctcggcgatcacccgcgtcttttccgtggtgtcgacgaccacgaagttgtcggaggagatcgaccggaggctgactccgtcggccgggtacgcgtccgacgtccagtaccacttgtccttggaatgatggaggaacttttcctcctcgaggtatttgaggatttcgccgatttcggcccggccgaacttctccccgtcctggaacgggagctcgaaggcggcgcattcgaggtggttgatgaggatagtcaggttgtcgggattgatgagggcccgctcgaccgactttccgaagaaatagtcggggttatggatgatgaactggtcgagcggggcggaggaggcgatcagcacggccgctgaggctccggatttccggccggcccggccgatccgctgccaggtcgaggcgatcgttcccgggtaggaggccagcacggccacgtcgagggtgccgatgtcgatcccgagctcgagggcgttggtcgagacgacgccgaggatctttccctcccggaggcccttctcgatctcccggcgcttgaccggcaggtagccgccgcggtaaccgcggatcaggccttcctgcttgatggttttttccagatcctccttgagataggtcagaaggacctcggtgacgagacggctctgggcgaagacgatcgtctggaggttctgatggaggaaaatcgaggcgatgcggcggctttcgttgacgtaggaccggcggatgcccaaggccgcattgaccaccggcggaacgtggaagagaacgtatttttccccacggggggcgccgttgtcgtcgatgagcgtcggcggggcctcgatcattttctcggccatctccagcgggttggcgatcgtggccgtgcagaggatgaactggggattcgccccgtagaaggcggcgacccgcttgagccggcggaggacgttggccaggtggctgccgaagatgccccggtagttatggagctcgtcgatgaccacgtatttcaggttttcgaagagcttgatccacttggtgtgatggggcaggatcccggcgtggagcatgtccggattggtcaggacgatgtgaccccgggcccggatggcccgccgggcgtcttggggagtgtcgccgtcgtaagtgaagatccggatttccccgggcaggcgggcgatcgtctcgtcgagctcggcccgctggtcgttggccagggctttggtcgggaagaggtagagggcccgggccgagggatccttgaggatcgcatcgaggacgggcaggttgtagcagagggttttccccgaggcggtcggggtgacgaccacgggattccccccgttccttaccgcttcccagctggcccgctggtggacgtacagccgctcgaagcccttgtcccggagagcctttaccagggcggggtggacctcggccgggtaatcggcgtaccggccttcctgcgccggcagatgcttcagggcggtcagcgaattcgttttcagggattcgtcccggagaatctcgagcgccttgtgaagattctcttggcggcccatagcggcatgctagcgcatcggccggccggccgtcaaattttcttgctccggccgctgaaaagccttaaaatgacaaggttatgctcaacgaaatcgtcgtgaagaaggcggcccagcacaatttaaagaggatcgacgtccgccttccccgcaaccggttcatcgtcgtcaccgggccgtccggatcgggcaaatcctcgttggccttcgacacgctgttcgccgagggccagcgccgctacatcgagtgcatgtcggcttacgcccgccaatacatggagatgatggaaaaaccggacgtcgaatccatcgagggcctgtccccggccatttcgatcgagcagaagacaatctcctccaacccccgctcgaccgtcggaaccgtgaccgagatgtacgacctcctccggctgctgttcgctcgggccggcatcccccactgcccgtcctgcggacgggcggtgagctcccagtcgaccgaccaaatcatcgaccgcatcctcgattcggcccgcggccggatcaaggtcatggcccccgtcatcaagggccgcaagggcgaataccaccggctctttgaccgcctccggaaaaagggttatctccggctccggctggacggcgttttccgcgatctcgaggatgaaatcatcctggtaaaaacgcggtcacacaccggggaagtccagatcgacgacctgcgcccgtccgcctcttcccgcggccgtctccaggaggcggttgagcgggcgttggaattgacggacggcgaggtcctgatcatcgccgaggacggagccgaaagctattattcccggaagctccgctgcccggtctgcgacgtcagcctgccggatctcgaaccgcgcaacttctcgttcaacagcccctacggcgcctgcccgcggtgccacggccttggatttgacacgaccctgaacgaggacggcgagaccgagctgaccggggaccgctgcccctcctgcgaaggagcccgcctcaatccccggagcctggccgtccggatcgacgggcggaacatccacgacatgagcgggctttcgatcgaccggctgatcgccgacctcggccgactcgaggtcctcgtttcccgcgaggcggtggccgagcggatccggcgcgagctcctcggccgcctgcgcgtctgtcacgagctcggcttgtcctacctgacgctcgaccggacggcggcctcgctttccggcggagaggcccagcgcgtccgcctggcggcccaggtcggagcccggctccggggaatcctctacgttctcgacgagccgacgatcggcctccaccagagggacaacggccggttgatcggcatgatccgccggctccgggacgacggcaacaccgtcctcgtcgtcgagcacgacgaacagaccatccgggcggccgactacatcctcgacctcggcccgggcgccggcgagcaagggggcgcggtcgtggccgaaggaacgctcccggaaattctgaaatccccggactccttgacggccaagtacctgcggggggaggcggcggtttccttccccgacgggcgccggccggctaaaagcttcctgacgatccgcaacgcccgggagcacaacctcaagaacatcgatgtctccatccccctgggatgcatgaccgccgtgaccggcgtttcgggttcgggcaaaagcaccctggtcttcgacatcctccaccgcgccctgcagaacgccctgttccgggcgaagctcagaaccggggcgttcgacaagctcgagggcgtccagcacctggacaaggtcatctccgtggaccagaaaccgatcggccggacgccgcggtccaacccggccacgtacgccggcctgttcaccgacctccggctcctcttctccttgtcccaggaggcccggacccgcggcttcgggccggggcggttcagcttcaacattccgggcggccgctgcgaggactgccagggggccggggtgaaacgggtcgagatgcatttccttcctgacgttttcgtcacctgcgaccgctgcggcggacttcgctacaacaaggaaacgctggccgtccggtacaaggggcggtcgatcgccgatttcctggccatgacggtggatgaggcgtacgagtacctcaaggcccagccgcgcctcaagcgccggctggcgaccttgcggcaggtcgggctcggctacatccggctcggccagccggccccgacgctgtccggcggcgaagcccagcgcatcaagctgaccaaggagctgggccggcgggcgaccggccgaacgctgtaccttttggacgagccgacgaccggactccatttcgacgacgtccgcaagcttttggagatcctctccgagcttgtccggatgggcaacaccgtggtcgtcatcgagcacaaccttgaagtgatccggttctgcgattatattatcgacctgggtcccgagggcggggaggacggagggcgcgtcgtcgcggccggatcccccgaggacgtcgccgcggccgacacgcccacggccgcgtttctccggtccgccctttcggcccccggacgaaccgggacaaattaggcggatcatggctttcgacgatatccccggcaacgccccgctcaaggcgattctccgctccgccctgcggcggaaaagcgccctcccgagcctgttgttctgcggggccgccggcgccggccagcgggaaaccgccttggagctggccaaggcgttcaattgcctccatctcgacgatgacgcctgcggcgagtgtccctcctgccggtcgatcgccgccggaaaccatcccgacatcatcgaggtgatcaaccttccgcggaaacagaaaaaaacggcggccgacggaggccgtgaaaacggagcggccgcgggggatgaggacgccgcggaagacgccgtcgcggaaccggcgggatccggctcgaagccccggaacatcgtcatcgatcaaatgcgccgggcgatcgagctggccctcatgaagccgatgatcggccgcaagcgggtgtttctcgtcgacgacgcttcggaaatggaagccgcggcggccaacgcctcgctgaagattctcgaggagccgccggcgttctcccagttcatcctggtggcgggcaatccggacgttcttctcccgacgattcggtcccgttgccagacgcttgtcttcggaccggtcggaaccaaggagatcatcgccgtcctccgggcgcgcggcttggatgaaacgcgggccgtctccgtcgcggccgtcgtccggggcgattatcagcgggccctgaacaccgactgggacgagttcttcgaggagcgcggccgggcgtgggacatgttccgggcgattttgaccggaagcgacggcggggatttcatccgccggcatgccggcggacgaaaagccgcctcccgggaggacatcgagaccttgctcggtttcttccgcggattcggacgggatcttctcgtcctgggcgaaacggcgggaggaggccctttattcaatcccgaccttgaagagcgccttggggagcttgcctcggtcgtcccgccggaacgggccttgcggctgatccgggccgtcgacgcggcccaggtctctttggaaaaatacgcgaacgtccgcttgcttgcgagcgttcttttcgcgagaatgacaggataacgacatgagcgatttgatttgcgcggtttccttgacgacgggaaagacgatccgggcccgcaagggcgagaccgagttggtccggggcgatctctgcctcgtggaatccgagttcgggggcgacctggcccgggtcgtcgagacggacgggccggtatgccgccatccgaaccgggcttcggaagcgccgaacgtcctccgcaaggccgacgccgaggatgagcggaggctggcctggctccgggaacgcgagcaacgggccttcgctttctgcctcgaccggatcaagttccggaatctggccatgaagctgaccgcggtccggttctatttcagcgagaaaaaaggcgtgttcttctacacggccgacggccggatcgatttccgccagctggtcaaggacctggccaaagagctccggatgcggatcgagatgcgccaggtcggcgtccgcgacgaggccaagatgatcggcggcctcggcgtctgcggccgtccgctctgctgcgcctcgttcatgaaaacgttcgagccggtgacgatccagaaagcccgcaaacagcagatcgccatcaatccgacgaagatctcgggattgtgcggccggctgatgtgctgcctggccttcgaggaggagagccggggccggatgtactacgacgaggatattccgaacgaggattgagccgccggcccgcggtcagcggccgatcgagaaagccgccgccggcgagacggccagaagcgtcccctcggccgtgtaagccttcaccgtccaggagtaggtttttcccgggaggaagcggggggcgatttccgccgggatcacgaccgacggtttgtccgtttccgccgtccagacaggctcgagcccctcgaccgtaatcctgtattccgccgccccgtcgacgccgcgccaggagaaagatttcggattttcctcgagaatccccgcgggggcgatgagaacgacgggagcgccgcggacgatccgcgtcccgctgtccggaaaatccggcgggcggggcgttcggggaaccaggaggaaaacggccgcggccaagaggacggccgtcccggccgccgcccaggcgagaccgaacctgaggcgagcccgttttttcgccgaccggacggccgccgcggaagccggcccggccagccggacggcctcgagaagagcggcccgctcggccgtccgctgaaaacaggccgggcagtcgaaatagtgcttctcgaaacactcggcttcctccgcgctcagccggcccagaagatagtcgtcgatctgtcgttcgaattcgaggtgttcggggcggcgcatcggatcgaatccttgtcctttcattagtcgggcgacgggggaaaaaatgactttgccgcccgctgcatctggttccgaaggagcttgagggcgtagtggacgcgttcgctgacccgggccggggcgagcccgaggcggagggcggtttcctcccggctcagctcttgatagtagtagagatccaggacctcgcggtatttcggcggcagggccgagacggccgcggccaggccgcggatccgctcgtgttcctccaaccggtcctgggaggaggccgggtcgttttccaccgggaatcggcgggcgattttcgatttcccccggatgtggtcgacgatccgccggcaggcgatggtgtagatgaacgtgccgatttgggaatccccgcggaattccccggcccgaacggccgcgatcgtttgcgtgagaacctcgttggtcaggtcctcccagtccgggttatcccagccgacggcccggcggatcttgaagccgacgaccggccggtatttcgcgacgacggcttccaggtcgacctcggccttgggcgggggcttcacgatcgcctaatcaccggccggattttttttcgccgagttcagcatatagcttttcacgtcgaccaggatctcccggggtttgctgccttccgacggcccgagaatgccctcctgctccatctggtcgatcaggcgggaggcccgggcatagccgagcttgagcctccgctggagataagaagccgaggcctgtccggtgtggagaatcagcttgaccgcctcctcgaacatttcgtccttttcgtccgattcgccccaaggcatctccccggtgcgctggaggacgtcgacgatgcgctcgtcgtagtccggcgtcccctgctttttcacgaagttgaccagccggcggacttccggaatcgagacataggagcagtggaggcggacgagccggggataattcggggggatgaaaagcatgtcgcccatccccaggagcttttccgccccgttttcgtccaggatgacccgggagtcgatcttgctggggacgcggaaagcgatccggctggggaagttgttcttgatcgtcccggtgatgatgtcggtcgagggacgctgggtggccaggaccaggtggatgccgaccgcccgggccaactgggccagccggccgatggcgaagtcgacgtcctgaccgctgaccatgatgagatcggccagctcgtcgatgatgatgacgatgtagggcatgggccggagcttccgctgctcctcctcggtcaacttgcctcttttttcccggagctggtcggcgatgtgatggttgtactggtcgatgttgcggaccttggcctgctgcatcaggtaatagcgctcctccatctttttgaccgtgtccatcaggatggccgcggctttcttggcgtcgttgatgaccgggctgagaagatgggggattccgtcataaagggaaaactccagccgcttgggatcgatgagcaggagcttgacctcctcgggcgaggccttatagaggatgctggcgatcaaggcgttgagacaaacgcttttcccggttccggtcgccccggcgaccagcaggtgcggcatgactccgaggtccgtcacgtagacttcatcatggacggtcttgcccaaggcaagggtcagcttggacggcgatttgatgaacgcttccgactcgaggatatcgcggagcttgatgatctcccgcttgttgttggggatttccacgcccagggaggacttgcccggaatccgctggatgcggacggattcggccccgagggccagggccaggtcgtcggagagattcgtgacctggttgatcttgattcccggcttcggagagtactcgtaggtcgtgataaccgggccgggatggtattcccgcacttcgccctcgaccttgaactcggccagcttctcctcgatcaggcttcgtttttcctgaagctcctttctgtcgatctgctcggtcggagcgccgggatccaggagcgtcagcggcgggagggtgtagtcgggccggtcgtcgaactgggggaacgcatactgctcgggccgggcgacgggaggaagcggcggtttgatcgccgccttgcgcagctcgcgccgcggaggaggagacggctcgcggcgctccgcccgggccggagccggggcggcggccggctccgctttggcccgggccgaagccttcttttcccgggccggcttttccggcttggggcggcgggggatgcggatctttactccggcgacggtgaaccgggtcatccggccgacgcccagaaacaatttcttgaaggaaaaaccgccgacggcgacggcgaaaagcgaagccgccgccaggaggaagatcaaagttcccggactgccgaaaaaaccgtggaggaaggagaccagaagctggccgagaacgccgccgaccgggattttctttccgccccaagcgatgttttgaaagaaaagatccaaaaggggacagaggatgagaagcaggagaataaactgcccggctttgccgaagatgattctccggttgccgtgaagaatggcccggatgcccaggtatccggcggccaaggggaggagccaggcggccaggccgagggcggcatatgccgtttcggccgtctccgccccgatccttcccccccagttgtcgatgcgggcgttcccgggcgcggcgctggcccaagacgggtcgagggaattatagctgatcagggcggccagggaaaaaagagcggcgaagacgagcaatatgccgacggcctcggaaaggggaaaccgccgccggggggccgcttttgacgcggtttgagtgttcgtcttccgccgcctcgccttactcatgctcctgccggaattatatcatatttgggattccggcccgggggggccggggagcggcggcagctcgaggcggtacggaccggtcgggatatcggagttcggccgggcggctccgtcttcatggccgatgaacagccggaaacggggagggaggccgggaagaagaatcgaggtctcggccggtccccgcccgtcggagccgaacgcgccgaggcggccggagaaaaccgtgattttcttcgcttcgcttccctccgcgtcggtgaagaggacataaggatgatcgatccggccgttgccgtatcgaagggccggaccgaaaacgcggctccggacgaaaaccccgtcctccctgaagacggccgcgacggtctggaaatgatagcccccggggccggggacggctgcgaaccagactcgtccggaccaacgcccggctttccgccccgccgcgtccatcacccccggcaagcggtattccttgcgcagggattcctcggacgtataggacgtcgtccgcggagccggaagatattcgtacccgaagtcgatgaccgccccctcgggaatgtcggcgacggtttccgacgcttcggcggcccacggctcggccgagggaagccggccggggcggaggatgaggcgggccaattcccggccgccggagtccgagattttcacgtagggattcgagacgtcctccttgacgcccaggccgcctccggccgaaaccgcgctccggatctcccaggaacccgacggcgcgcggcttagcgaaacgtcctggacataggtccgaaaattgaccgggaagccctgggcgggagcccggctgagcttgtagatttcaagtttcggcatgtggatttcaaacaagggctccttgaatccaggctcgatcgtcttcaccagggtgccctcccgggccaactcctcgtaaaccgcggcttccctggggaagtcctgggggaaccgggtgaagcgtccggccatcatatcgctgacgacggcgtattcgactcccttgaaggagagaaattccaggtccgtccggctgaaggtatggttgtaatagacggtgtagtcctgccgtgaaatcggggggccgtaggattcaagggcgatgaccgtgcccttgggaaggttgtattcgatccattgcttggcccgtgtccgggaatcgaggccggccaaggccgagtccagcttcgcaaggcggacggccgagggagcaatgatcgccgcgaccaggagccaagagacggcggtgaaggcggtccgccgcttccggtccgctccttcggccacccatttcctccggctccggtccaaaagccaagccaggaagactcccccgatcaggcagaaaaacggggccaggggcatcaggtatcgcgtcgcccgcgccccccagagcgagatcagggcgaactggaccaaaggataggatagcaggatcacgtccctcttttgacggcggaacaagccgaggaggaatccgccgaggacgaggaattgggagatgatccccacattctcgatgaatccatggcgcaggtagaaaagaagggcggaatgcgcggtggaatccccgaaatgcccctcctcggtcagatggcggctctgccaccgaaaatccttgaaaaacttcgggaaatcgagaacgacataagggctgccgaggatgaacacggccagaaaaacgaggcccgcgccgatcaggcgcgggctgaggatgtattcccgggcgggccgcttggtttcgcggacgcggtatgcgtgagcagcgaacagggggatgaacaggagcacccccccgtactttgtggtcatcgccaggccggccgccgctccggcccaaagataatcccgcgtccgccctttttcagcgatattccagatgaagagataggacaaaacgagaaagaagaccatggggacgtcgggcagcatgtcgtgcgacatgcgggcgtgctccaggccgaaggtgagaagaagggcggccaaggctccggcccgcggtccgaacatccttttcccgagaaggtaaagaagaagaaccgtcccggcgcccatcagggccgagaggaagcgcccgatcaagtagaaaacctgggggaattgggtgaaggtttcctcgaattcggcgatggtccggacatttccggcggctttttcgattccgtaataaaccttccacatcccggccagggcgtacatgtgaagcgtggggacatgaaagaaatgaggattgagatccccctccaagaagcgcatcgacttcgctgcgaagtagttttcgtccgcgtggtacgtgtggggaaggccccagccgatgccccaaaaccggaccgcggcggccagaatgaggagaacaaggaagaccgccgtcccggacgatttcgaggagaaggacatgatgaatcgtaatatagcggaagagttccggaaacgtcaatcgccgggccggcccgggattcagcggaaaaacatggtccgggcctgatcgaggagatacaaaaaatcccggacgctccggactgctcccagttgcttgagaaggtaggccggccggaggtaaaaggaccggacggccttttgccgcagccgccagagttcctccagagacagggagcccgagctgaagaccggcggacaggtgctgtcgaaaagcaggacgtccggatcgatcaaccccttggcgatgctttcctgccgcaagggggagccgacgtccggagtcaagacggtgaacgaggcgaagtccggatccagctccttggcgaagcggatcgtccggccgaccgaatcgggcgtctcgccaggcaggccgacgatgaaataggcgagcgtccggatgcggaattttttacatacggcaaatgcccggatcgccttttcccgggtgatcttcttgtccgtggccgccaggatttcctcctggccgctttccacgccgatcatgacggtatggcagccggccttcttcatggccgcggccagctcttcgtccagggtggtgatatgagcgttgcagacccaggaaaagcggagtccgcgattttccattccggcgcacaattccaagatccgcttcttcgagacggtgaaggtcggatcgttgaacatgatttcccggacgccgaggtcccggagggcctccaactcgtcgaggactccgtcaaggttccgcgaccggtaggcgacggctccggctgtgcaaaacacgcagccgaacgggcagccgatcgaggcgatgacgagagcgaacggccggcgccgggccagcggactgcggttggcccggaggttgaaaagatcgtggcggggaacggggagagtgaaaacgggagccggacgcgccggggccgggacggacagaccgtccgccctccggacggccagggcggagtaatcccgcttcctcccgcaaacgtagtcgacgatttccggggtgcccgtatccaagatcgctgcgtcgacgtggggagcggcggccaggaaccgttccgcctcgaagaggaagatggaacccgtggcgacgaggcgggccccggtttcctccttgacccgggcggtgaaggcgaaatcgtttttccacgtcgccgtcccgctcgtgaagataaccacgtccggagcaaaacgccggatgcgttcgagacaagcctcttcggagaggcggtcggccaccgcgtcaatcacctcgagccgggtttcccgcaggacgccggaaaggatgatgagatcgctaggcggccaataataatccgccttggacgagtaactgcagtacaagtcatggatgtagatcttatcgcccgggcaatggagaaggaggaccttgggaaccgcggcggaagcattcatgatcattcttcggtctctccagttcctccggctaaaaggcgattgccagcccggcgccgtattcccatccgcccaggtcgatggtccggcttccggccgaggccttgaccatcgtgtacttgatcttagcgaaagggaggatggggatcgtctctccgaattggaagtagacaccggcggcggcatgccagcccttggcgtgatcgacgacggtcccgatggggttgttttcaaaatagaagtaataatcgaggccgaggccggcgaacggaatcaggaaagacaccggataggaggcccggagcccgagagacaccgggatgaggacaaacgacgtcttttccttgctgtgggacagggaaccgttttttgacaataccttgacgtcgagcgaaaaacctaggcgggggatcaggttggccgtcagcccgagaccggtgatcgacccgcccggccggtaaatcgtgttgaagagcgggtcggcgatgttgtaccggccgagggaaaattcgaccgtcccctgccaggcggcaccgtccgcggccgcggccgaggaaaagccgcaaaggagcgccaggattgagaccgcggccgcaatccgtccggccgcccgccgcttccacgcgccgccgaaaggcatgccgtcctccttcgcccgaaggggcgtcagaagttgtactggatccccaagacgggctggaagtggagcaggttgatccgctggttaaggttgacgttcttggggttcaggtaattcaaccgcaaatcgaagaggatgctcagcgattcggtcggccggtactccagaccgagaaggccgccgaacaggaattcggtgaacttttcctcgacgaacgtgaggtcggagacgacgatatcggccgaggtgaagggagagcgctcggtgaaattgaaatcgttcaggctgctcgttttccccatggtcaggccgatcatcgggccggccgaaaggccgatcgtatccgtttccaggagggagaagagagcgaaggccgaaaagctccaggagggatacttcatgtcgtcggcctggaagctcaccgtccggttggagtcggcgagaaacggatgggggagggaagccgtgaacgctcccggttccttgatcgaccaggccgtcacaccgaggccgagcttgatgcggttcaggtattttccgaactgcagctcgaagacgggacgcgcgctgaaggaataagcctcgtccagggtaccggtttcaccgtacaggtcgaaatttttgtccacggccatgtccccgcccaggaacagggacaatccggtccgggcggccacgaaaaagttggaacggccggggatctccggttcggccggcgcggccgcaggcgccgtcggcttcacgccgggcttcgcttccgcttcccggacgggcgcctcgagaggcggaacctctccctcgtaccagaatgaaatcttcagcccttcgacattctggacgatcgtataggccggaacgttttgactcaggtcgaagacgacccggaccgtttccggcgtgaactgcccggtccggacatcgaggacgccgatgtcgtcgatctgggtgtaggatgggatctggatccggggcatcggcgtcaggtccacaaccaaacggggaggggcgggcagaaaggacgcctcgaccgtgtaggccccttcgatcttgagttggacggagagcttgtcgccgtccttggaaaggctcatttccttgagagccgcggccggcgtttggctcagcaaggcccgcgaggcccacaacagcattccggcgagaagcagcgagcggggagcacgacggtggatcatcatcacatgttcctccagtgttgatcaatcattgctcacggtttcggaaggagcgccttccacaccgttgatcgcgaccgcggtgatgacgtaatcgtatgtttccaccgccgtgatgtcgcggtcgaggaaagcgcatacgcccgagacttcgccgatccgaacgtacccgtcggcgctttcgccgtgcttcttccgataaacgcgatacccctggagcgaggaggcatcggccgttttcggattggcctgccagaaaagcaggtaaccgatttgacggacgacggttaccctagcatgttccaagcctttttgcaaccggttttcgggcgcggggagctcctggaaaatcatcccttccttggaaagaaggcggggatgcaagggcggaaacggcagggcccggatggccgcgtaccacgtttcggtcatgagcttgtagccctcgatgttcggatggacgccgtcggagatcagcgcgtcggccccgccgttggcgttgaaaacagcctccatgtcgacgaaggggacaacgatctggggggccagggcccggatccccgcttccagggcgatgtgccgattccgatacttggggaaattccagatccagtcgttgcgcggacagaccgtggacagaatcggcatggttccgaaggcgcggctgcgcaggcagatttccttgaggttatagaggatgacttcgaccgggccggcgttattgaagagcttgacgtcgttggtcccttccatgacgaggatgtaccgggcctggcgggcggccaggacagcctcgatccggacgagcccatgggccgtgagctcccccgggtatccttcgttgatgacgtccgtgggcccgaaaacctcgtcgagcttgtcgtccagccgggggatgtatcccagctcgggggcttccgtcgagttgatgtagccgtaggtgatgctgtcgccgaaaccgatgtatttcgactcgctgacctccggtccggcgacgcccgaaggctcttcgaggacgcgggcttctcccacgctggaaaacgggcgggcgagaagggcggccgtccggtgacattccgtccggattccctccggaccgggaaggatcacgaagaggccgttgtctgttccggccgcctcgaaccgcggccccgggattttcccggacacgacgaacggcccggccgggattccgcttccgtcgcaaaccgcgccgagaagacgcgttccggtcatccccgtgtcggcccagagaacggccggccggccgtcgtcgagggcgaccaagcggggactttgtccggtccccgtttttttgaccggcaaggggatattcgtccatccgccgtcggccagtccggcggcgtggacgcggtagcgcgagccgtcataggccgaccaggcggcccgaaggacgccgtcccggcccaaggcggcgtcgagctgaagacagggtttttcgccgtttacgaaaagacgcttttccccggaccacgaattcccgctccaacgcctggcggcgacgacgtaggtcccttcgatccgcccggtccatagaatccaaaatccgccgaggccgtcgggcgcgatccggggcggagacaaagcggcggctccctccggcgtgattctccatctccggccggaagcggcctcctcggccagaatctcctcggtttttccagacaggtgatgccagacggcccacaatcccccttccgcggggaaaaaaagatccgctccgtcgttccagccttccggagcgccgaaggtccgcgaaccgccgaaggtttcattttccagaaccccggccctggtgatgcttccgtcggcggtcatctcctctccggccagccagagacggccggcggcgtcgcggcgcaattgaagatcctcataggacgcgtccagacggagaagggccgtttccggaacgcccgacggtccgacggaagcgatatgccaggatccttccccggatcgaaaaagatattgaaccggctcgccgggaagcccaagagggcgggagaacgccggatcggctttatacagagagttgctatgcggggaggacgcgcccggcaggggaagaatcgacataagccccgccagcccgacccctaatgtccggagaaacgttttaaacgcgttttccatagcaatgactataacatatttatataacgggttgacaagcatctgtttccttggcatgataaatcgctatacctggcacaaggagccgaagacgatgaagagagccttgattgcaagcgcgtgttttttcttccttttcgccacgcttcaatacggccaaaccctgcagaatgaaaaactgctgtaccatgccccggaaggcgtgcgctggactcaatgcgccttcggccccgacggcgttctgtgggtgatttgggctcccggaaccaccaacgacgacagcggcggcgcggtttgggttctcagttacgatgggatcacggtttccgaaccgctgcggttgacggcggcggcgacgcgggccaaccgtccgcacatctcagcctcccctaggggctatattatcgctagttggggcatcgtcgacacggattcgacttttctccggatttgggatccccattccaaaacgtggggagagaccgaagtcgtttgccaggggtacggcggaaatgaaccttgcgccgtaatggacaaagacgggaacatccatgtctttttctccgatgaagccggagggaaagtctatgcccgctccaagatcaacggcgtttgggaaaatatcgtcaagctgaatgagaaatacggcaaacaaggcgcgctggccgtcggtccggacgggaccgctcatgccatctggatcgagaaaggcgccgacggcatctatgagaatttctataccaaccggacgcccgcgcagacctggtatccgcgcgagggattgcccggcgagggcggcgccggcggtcacccctggatcgcggtaggatcgaacaacaaggccgtcgcggcctggcaggatgtcaccgatcctcatttggaaaacggatccgaaatccgcgtcctcgagatcggatcctcggttcaaatcgccattcccttctcgttcatacattttgcccgcgttgtcatcgacaagaacaacaaaattcacgtggcctgccagcgcggcccgggcgacggcggcctcgggatgctgtattcgcataacatcaacgggaattggtcgcctgcccagatgatcggagcctcgatgccgaaagtccccggtttggcctccgatcccttcggcaacgtcgccgcgacgatgtcgtcctttaacgctccgggggcggatattaaagcctggtctctttatcccattaataaggttccgctgcccgaggcgagcttcaccttctcgccggtgacgggttatccgccgcttccggtggacttcaccgcggtcaaagccgtcggccccgacggccaggaagtccgttatgattggaagttcggcgacggcggctcgggctccggccggaacaccagccatacgttcctgacggccggcacctacaacgtgaccttgaccatcaccgacaacatcaaccgcacggacaccgtgacgaaacagatcgtcgtcctgaaaaccaatcccctcgtgccccagaatctgtcggccacgatcaccctggaccgggtctggacgaatccgaagatcacgttcaacctgttctgggcggtcaatcccgacaacgtccccgagcacatcgaggcgtacgcgatttatatgaaagaggacgacggcgaatacgtccgcctcctcaccctgtcgccggagacgctctcggcttctttcgagttcaccgacctgaagaaaaagcgctccttcgccattagcacgctgggctacggaggcacggaaagcacctggggttatttccaataagcggggacaatgacgaaacgcgcgctcccggtccttggactgatcgccgcgtcccttgttttcgtttcttcggcctttgccggggagaatatttccaattctccggcctggccttcctgggcgccccgggcgaccgcggatgccgcgggcaacttctacgtcgtttggacggagctctatccgagcggcggcggggacctctttttcactaagtacacgaaaagcgcgaagacctggtccacgccccagaatctcagcggctcgggccgggtgaccagcgaggggaatgacaacgccgggatcgcctgcgacggctcgggcaacgtccacgtggtctggaccgagcggacgatcgtccggctccggacgctgtcgggcggcgggaactggagcacggccgggacgatcggggaaggggccttgttggaaggagctaaaatcgccgcttccggcgcgggcaatctgtacatcgtctggtggggcgacgacgggatcgtccgttcccggtcccgggtgaacgggaactgggaagccgcccgccggatcagttcgagccggcggtcgaagttcgccgatatcgccgtcggcagcggctccgtcatggtcgtgttttcccagaagggatcctattattacaacgcggcttatgttctccggggaacgtcgttcggcgccggctggtccgccccggccgttgtctcgggcgaaaaccgcgaccagatctatccggactgcgagttcctcaacggaacggcgccgcaggtcatcttcctctacgaaaacatcgcgggggagccctccaccgtcattcattgcgcttggacgggcaacgggttcggcccccggcaggtgatctcctaccccggagcgttgcactgcccctccttgatcgagaaatccggtgttttagtcgccacctggcagatcggcggctggaatcggggcctggcgatttattacaactacttctataacggccagtggaaaggcccgacagccattcccgactcgcggatgtcgacgtacagcgacgccgccctcgaccaggccggggcggccctggccgtctgggacggcaacggcgatatcatggccctcgtcatgacgagcggcgaatcgccgacgcccaacaacccgcccgtggccgatttctccttccagccggcgaccggctcggcgccgctgacggtgaatttcgacgccggcgcgtccaccgatcccgacgggacgatcgccgcgtacgactggatcctcggcgacgggcagacggcatccggccggacggtcgcccacacgttccaaacgccggggacttttacgaactccctgaccgtcacggacaatctcggggcgaccaacacgaaggtgaaaaatctcgaagtcatcaacaaggcgccggtgccggccttcacggtgtcgtccccatccctgatcgtcacggtcaagatcgacttcgacgccggatcctcctacgatccggacgggatgatcacccgctacgactggatcttcggcgacggctggagcgcccagggacagaggttctcccgggttttcacccgtccgggaacctacgtcctcaagctgacggtcaccgataatttcgggaaaaaggcctcgttgacgaaaacgttcacccttctggctctccaacccccgctgaacgtccgttgggagtccttcgtcgacgaaagcctgtttcaaatccgggttgtcaccgacgttcaatggcaagccaacccggccaacgaggcgatcgctcccatcgtcaagtaccgcgtcttccggaagaagcctgaggcggacgccgccgcctatcaattggccgccgagaccgacggaacgacctttttctggcgggataccggggtgacggaagccggccggtacgtctaccttgtcaaatcggtggacgcggccgggcacgaaagcctgatgccggatgaagcggcctcgaatgctcttggcaagacgccgagccggcggtcccagggcgtctttgtcccgacgatccggcgttgaacgccggacacgcgcggggggatcatgacgcgcatgaatcataatcgaagcctagccttccttgcggccggaatgatcgtcctggcttttctcggctgccgcggcggaggcgacggctccgctgctgtctccggcgggacggccgacggacaagccgccgggctttccgcccgccgcccgcttgcggatttcgacggccggatcgtctttcaatccgacttgggcggaaacaacgacatctatctcttgacgcgggcgggcctgcggcggctgacggacgatccggccagcgacgagttcccccgctggtcccccgacgggcgtttcatcgctttcacctccaaccgcggcggatcttaccagatctatgtgatgaacgacgacgggacgaatgtccgccgggtgacgaacggccccggcgaggcgatcgagcagggctggcatcccgacgggaaaaaaatcgcctatacaatccaacgaaaacgggccgtcggccggtcctaccggctatggacggccgatctcgtttccgggtccgtcacgccccttcttccggattttgacggttcggccgccctgcccgacttttctccggccgagccgctgctggcctttaccgggaagcggacgatcggctgggacgccttcgtggccgacctgcgctccggcgaagtccgggccctgagcgagggaggcaagtcctgccggccgcgcttctctccggacggctcgcggatcgcctatgtctcctcgacggccgacggcaagggggatatctggctggtgaatcccgacggcggaggccgggagcgcttgaccgagcggccggagacctacgattatttcccggcctggtcgcccgacggccggtggatcgtcttcgcctcggggacggagcactacccgacggagggcgtctgggagctgactttgatcgatcccgcgtccaagcgcgtcgttccgctgttcaaaagcggcggccgggacgtcttcccggattggcgctgagcccgcgccttcagttcatcttgccggcgagcagccggcccaggtactcgcgggggatccccaagagcgtcggccgccagagccggtcgcacttcgagcaggtgggcaggtcgtcgatcgttcgggcgatgagcttctcccggagggccaccatccggtcgttgttccaaatctcccggagcgacgaatcccggacgttgccgaggaggtaggatccgaagaaatcctgggtgcagggcaggaccgaaccgtcccagaagatgatcagggcgtgccataggaaggtgcacggccggtagggcttcgaccggtccggcccgccggacgtctccccggcccaattgtgcagctccttgacatggactttgtccagcgggaggcctttgaaccgggcgaggaaggcttttttcgccgcccggtcggttttctgaaaaacgtcgggaaagtggatgagctcgatgaaggtgacgggctttttccgcttcatctccttcttgagctcgaggaagcggacgatgttgccgacggtcttctcgaacttcgctcccgcccggatccgctcgtaggcctcggctgtgaatccgtcgaaggaaaacgcgaactggtcgatcccggaatcgagaaggaggcgggatttctcctcggtcagcagggttccgttggtgtggaatcgggtgacgatgccggcgtcatgggcgcagcggatcatccggaagaaatccggatgggcgagcgattccccgcgatggaggaggtggacgtcgaagacaaagcccttcgcctcgtcgatgattttcttgaacaggccgaaatccatgaatccccgctgctcgcgcggcaggcttttgttcgggcacatgacgcaggacaagccgcaggtgctggtcgcctcgatccacagtcggatgggcatgtgggcgaggcgggtttccttcccggcgtacgaccggtagatccgccagaggcggcggtagtagtcaaaacgcttcatgaggacgtattgtagccgattcccccggggggcggaagtccgcgaccggaatcccatcgcccgccgccgaagggcaagtcaaaggaaaggaagagaatgttctccccgggaggagggggcggcggcatcgagtaaagcctcatccgggcgatggggaagagagccgttgatcacactcccgcgacgcctggaatgcaagggccggacggcgcgacggaggccgcctgaggcccgcggacgagcttgattggacgccggccgcccgcgccgtcttcccggcggggctcagaccggggcacccgctaacggacgagggaaaccagcgatatccaggcgggaatggggacttgttcgggacggacggtcttggccaggccgagggaggccaaggcggcctcccccttatccggggggatccccatggccaggaaattattgagcaaggttttccggcgctgggcgaaagcgccgccgaggaatttccggaagcccgcctcgtcggcgaccgggtgaaggggggccgcccggcggatcatcgagacaacggccgaatcgaccttgggcggcggactaaacgagccgggggcgacccggaagaggattttcacctcgaaaaaaatctggagcatgatcgaaagcggggcgaactccttcgttcccggcccggccgcgatccgttccgcgacctcccgctggagaagaaaggaggcccgggaaaacagccgccgctcctcccagacgcgggctaaaaacggacccgagatcgagtacggcaggttgccggcgattttcaccggcggagaaactccggccatttcccggatcaggcgctcgaaggagacctccagggcgtcgccctcgacgacggcgacgtttcccggcttctccgcgttcagggattcggccaggatgcggtccttctcgacggccacgatcattcggacaaggggggatagcgcccgggtgagcgcccccttgccggggccgatctcgatgaccacatccccggggcggggatcgatcgtccgggcgattttatcaagcagccggagatcgcgaagaaaatgctggccgaggacctggcgccgggttttcaacgcgcggccttcaccgtctcccgggtgtagcgcttcttgaatttgacggccatgaccagggtttcgagaagggagagaaaatccagcttcgtccggccgcggacccggtcgacgaagacgattggcgcctcggcgatccggaagccgaggagagaggttttgcggaggatttccaggacgacggattggccgacggagatcaggtcgtccaggtccacggcttcgagaacctcgcgccggtacagacggtagcccgaggagacgtcgcggatcgacaacccgtaaagccgccggatgaacgtcccgacgcagaacgtgatgaagcggcgatgaaggccgcggtcggcatcccggccgcccggaacaaaccgggacccgaggacgaggtcggcttgggcggccgcggccagcaggtccgggatgtatttcggggcgtgggagaaatccgcgtccatctcgacgacgaaatccgcgccgagggccagggcggccttcagcccgtcgatgccgccggcgccgcggccgcggcgcttcttccggacgagggcgtggacgcggggatcggccgccgcccgctcctcggcccagcggccggtgccgtccggggaatcgtcgtcggccacgacgacccggacatcggcgtccaggggtagggcgaggatcgcctcgaccatgtcggcgatgttctccttctcgttgtaagtcgggagcatcaccgccaaaagcggcttgcgggccggctcgctcacgggacggcgacctcccggacggcctggagcaccatgtccggcgtgaggcgtttcatgcagacgggccggggacaggcctgcttgtagcagggggcgcattccgccccggcgaagagcttgggaccgcgtccgtacatctcgatttcagccgggcaggtcggcccgaacaaggccacggttttctttttcagggccaaggccaggtgcatggccagcgtgtccgagcagacgacgacgtccatcttggccaggaagccggcgaattcgaggagggtgttgtccgtgccggtgtcgaagaccttgagcttgctccggcgggccagccgctggttgagggctttctcgcgcgggccgccgagcaggaagatgttggcgttgagggcccgcttcagcttcgggatgagttccaggaaatggtcctcgggccattgtttggtcgtgaacttcgccccggcgcccgtgttcaagccgatgttgagccgctttttcggcactttgcggtcgaggaaaaagcgctcggctttttgacgcggggcgtcggccagaacgaagacgtaatcgtcggcctggtactcgatctcggccgcctcgaagatggcctcttggtaggtcattcgattgacccggaacttgaggtcgtcgtcgacgccgagccggagggaataggcggccgccggggtgagggccgtgaggttgccgtgttcgttcaggccgaagccgagcttgcggggcgcgtccagcagaacggccagggcggtcaggcccggatccttgtccaatgaatagaccgcgtcgaaccgctgggcccggagggcgagaagggtttccgcgttcaaggggacgacccggtcgatcagggggatgccgcggagaaggtcgacggtttcctcgtccaccagccaggtgatgaacgcctcgggatactgccgcttcaggcccgtcaggaggggggtcgtccggagaacgtccccttgggcccggcacttgatgaccaggattttgggcccgaagggcttgaaatgggggcagtggtcgcatgtccgcttataaacgcagggtttttcgcccttgaaatagatgcaattcgtctcgacgagcagggaggttgccatcagccgtatgttatgccatatcgccgggtttgtcgcaagtcagccgatccgggccgccggccgttcctttcaaggatcgccggcctggcttgaagtcccccgaatccctattttttccgggcgacgtagaggatgtgggagtaggcgtagccacggtggagggggatgatctccacgtcgaatcccaggccggcgagggtggcggcataatcctcccggccccggaaatggaaccgcgagccgagggtgaagccgacgatcttgacggagattgtctcctggaccgcgttccaagcatatttccagcggggcgcgaggtccatttccttcaggatcagcgttcccccggagggcagggccccggcgcacttctttaatatcgcgttctgagtctcgaccggcaggaggtagaggacgtcgatgattgtgcaagcgccggttttggggtaaggggcggaaacgacgttgccgagccggaaatccacgtcgcgaagcttccccaggaaccgccgggcggccgtgattttccgggcgtcgagatcgattccgatgatcttccggtccggggaaccaagcttcaggatggccgtgaacaagccgttcccgcagccgaggtctaaaatgtcgcacccgtccgggacgtaggcctcgatccggagaatcggacacatgcggaacttaaggcgcggatagagcttcatcgggaaaccggcgccgcgaaagaggccgtagacggcccttcgggtgacgcggacggggcggagcgaggcggacacaggagtcacgattgatccttatcggccatagcggtcgtaccagttctggaagatgatcagcgtccacagcagctggcggtggttgtgcgagccggcgaaatgctccttcaatatcgaatcgacgaagccctggtcgaaaaaaccatgccggcgaaggcggtcgggggcgagggtctcgagaacgaagctcttcaagccgttccgcatccagacgccgagggggatgtcaaaaccgatttttttcttgttcaggatcgactccgggaggcggccggccaaagctttcttgaggatgtccttggaccggaagccccggagcttgagggagctgggaatcgcggcggcgaactcgacgaacgtgtaatcgaggaacggcgcccggatctcgagcgaggcggccatgctcatccggtcgactttcggcagaaggtcgtcctggaggtaaagcttcaagtcgaggtaggcgatccggtcgagcggatcggccgcccgggtgttcgcggcgtggaaggcgaccggggcgtaaggatcctcggccagggcggcgttgacggggggagcgaacagccgccgccggagctcgggcggataggccccccaccagatgaaattcgcgatttccggcgggtattccgcgccgctcacaaactttttggccttgaattcgaagctcagccggcgggccgaggcgggaagggcccggacgaccggccggatgaggccgcgtctcgcgaagccggggaccttccggtaccagcgggccgccttgtaggccttgtacgtgtcgtacccggcgaacagctcgtcccctccgtccccggccagggcgacggtgacgtactctcgggccagcttggagatcacgtaggtcgggatgatggaggcgtcggccaggggctcgtccaggaagccggccagcgtcggaacgaggccgctgacttcggtcggggtgacgacgaaggcgcggtgatccgtcccgaacgtgtcggccacgatccgggcggcgtcgagctcgtcgaacgatttttcccggaagccgatggagtacgtcttgatccccgccccggcgacctcgctcatcagggcggtgacggcgctggaatcgatgccgccgctgagaaagacgccgagggggacgtcggagatgagccggcgccggacggattcccggagccggtcgatgatctccgccgtgtattcggccgccgggcgggggacaatcgccgtttcggcgtggcggacgtcccagtaggaaagctcggtttccttcccgtcctcgaaaacgagcaggcggccgggcaggattttccggatcccgcggaagatcgagcgcggggccggaatgtactcgaaagtgaagaaccgggccagggactcgaggtcgatgtcccggggaatcggggcctggaggagggccttgatctcggaggcgaaatagagcctcgatccgatccggcaataatggagcggtttgactcccaagcggtcgcgggccaggacgaggcggcggcttttcgcgtcccagagggcgacggcgaacatcccgttgagggcgtggacgaaatccgttccccgctcctcgtaaagatgaacgacgacctcggtgtcggactgcgtggccaggacgtggccccgggcgaggagatccttgcggatctcggggaaattatagatttccccgttcatcacgacccagaccgtccggtcctcgttggccatcggctggtgaccggtgaggaggtcgatgatgctcaggcggcgcatccccagggcggcttgtccatcgatatggaagccctcgtcgtcgggcccgcggtggatcagggtgcgggtcatccgcttgagaaggtccggggcgccggggtcgagtccccggccgtcgacgaatccgcagatgccgcacatggcgttcattttaaacggattcgttccaaaagaccacaatttcttgcgccggaagcggcaaaagtgtaccctgaggggcggaatccgggatgaagaaaatcatcatcaacgccgacgatttcggcctgtgcgcgccggtcaacgaagggatcattctggcccatcgccggggggtcctgacgagcgccaccctgatgaccaacacgccgggattcgagcaggcggtcgccctggcccgggagaatcccgccctgggcgtcggcgtgcacctgaacatcgtccgcggccggccgctttccccgccggaggaaattccgacgctcgtcgggcccgacggccgtttcccggccggcgcggggcggattctcctgaagctggcggccggccggatccgtcccgccgagatcgagcgggagctccgggcccagatcgagaaagcccgggcgacgggccttcccctgacccatctcgacagcgaaaagcacatgcacgccgtcccggctgttttcaagatcgttctccgtctggggcgggaatacggcttccgcagagtccggttcatccgggaatacggcttctcccgccatcccgctcaatccctgaaggcggcgtttctttccctctgctgcgcccggatgaggcgccgggtccgggccgccggattcgtgatcaccgattcgttttatggtatatgtaatagcggccggatgagcgcggcccggctccgccggattttccgccgggtcggggaaggaacggcggaaatcggggtccaccccggattccagaacccggagctgttcgccgtcgaggccgaggtcgggcgttattacatcaacgccttccgggagggcgagctccaggctttgctcgacccgggcctgcccgcggccgcccgggcctcaaacgtcgccttggtgaacttcaatggaatatgacatccgaaagagcgatccggaacatccccaggtttccatcgtcgtccctttctataacgaggaaggaaacgtcgaggaaatgcaccggcggctgaaagccgtcctggaacagaccggccggacctacgagatcatctatgtcgacgacggaagccgggaccggacctacgagatgctccgggcgatctaccagcgcgacccggctgtccgggtcatcaagctccgccgcaacttcggccagacggccggccttcaagcgggatttgaccatgtccggggcgacgtcatcatttccatggacggcgacctccagcatgctccggaggaaatcccccagttcctggccaaaatcgacaagggctatgacatcgtcagcggctggcgggtggaccgcaaggacaacgcccttttccgcaagttcccctccaaggtggccaaccggatgatgggacggctggtcaaggtcaaaatccacgacttcggcacgacgtacaaggcctaccggcgggaggtcatcagcagcatccggctgttcggagagctccaccgcttcatcccggccctcatcagccgggagggcttcaaaatcaccgagatcccgatttcgaacatcaaccggctcaaggggaaatccaattacgggatttcacgggtgaagcgggtttttttcgacctcatcaccgtgaagttcatggtcagcttcatcgaccgtccgctgcagatcttcggccttcttgggatggtcttcggctcggccggctttttgatcgccgcggtgatcacggttggattctatttcctaagctggaacatcaaggaaaacatggggaatcttatcttcagcgtcttcctcatgatcctgggcatctttttcatcatgatcggattgctggccgaagtcgtttcccggatttatttccagacccaccggatccggatttattcggtcgaccggatcgacgaccggacgggagacgacgggggtcgcgccgcctagggacggtcctgcatggccgaaacctggccggttcccgcccgtcgggatcgacgggacctgattctccatcttgtttttggcattctcctcgccgcctgggtggccgtgatgctccggaatctcgggattctgtctctttggatggacgagggctttcactatctggccgcccggggcattctcgatcacggctatccgctctttccgtcgggtcatatttattggaaggcgattctttatgcctatgtcctggccgcgggcgcttttgtcttcggcctcaacgccgtgacgatgcgggtcttcagcgttttgtgcgcggccggcctgctggccctggcctatcacgccggccggcggtttttctcccggacggtgggcgtctcggccgccgttctcctggccttctccgcctgggaatgggaatatgcccggctggccctctatttcgcccccctccagctctgttatcttgccggactctatttgttttatcggggatacatcgccgacgaaaaaaaattcaggctgccggccgtcgtgttgtttctcctcgcgccgctcatccaccagctcgggatgggggtgatcttcgcttatcccgccctcctgttcatgcgcggtccccggcgcttcttccgccgggacgtcctgacgggactggccgccgtcgtcttattctatttagcgatccagctccaggaatttttcttttggaaagtcggatttgtctatgagaagacggacatgagcctcggcggaatgatcgcgtatttcttcggaagcttcaacctggattatttccggcagttttaccggagctttccgcggatgagcctgactgttctggccgggttgttcctctgcctccgccgggtcgtctggaaaagaaaaagggcgcggccggccgtagagccggggccggaccggtcgccctggctttacttcaatatctgcctgatcctccccctgtttttcttcggctttttccggacgcatgtccagccccgctacttggcccagctctatcctcttttcatcctgatgttcctggcggctctccgggccgccggccgcctggcggtcgacggcctggccgccccggcgttcaggatcgaaaaagcccggacccggacggttttcagcttcatgctcttcatcgggcttctgttcgtcctgaccgagggcgtccgtccggagcggctcccgtccgtgatcaaccgccgctacggggatccgattacgaccgacatcatcacctcctcgggacggttcgagcattacgaccacgagagcgtcggccggtatgtcgcggccaagctccggaaagacgatgtcgtcatcgccatccatgtcgtttttcagaagatctatgccggccgggtggattactggctgtggtcgggcggcccgggcacctgggacgcctgggagaagacgaaggacggttggaaagatttttatgtcggagcccgctggatcaacagcgcggccgaccttcgccggattatccaagcccatccggggcagcggatctggctggtgacatcgccgtcgctgttccggaccgaccacatcaacgcggccctctacgacttcatctccgtcgaaaatgccgacaagctcgcataccgcggccaggacggcatgagcgaggtctatgtctggaacgacccggaattgacggcgggcggccggcgggcctgcgagggggaatggctggccgtccgccgcggggcggtcgtcgccggctccggcctgtcgggattcgcggctgtttcctgggacgggagcgcggccaaggcggacgaatcgacgacgaagatcgtccgccgcctggcccccggctcctaccgggcttcggtccgctacaaggcctccccgggccaggcggatgaaacggccggacggatcttgctggttccgggaaagggccggcccttgcggaccatcctcctttccggggacgcccgccggcccgacgcggacgggtggcgggaagccgacgtcgaattcctcgtcccccgggagacggccgtctccgttcgggtccaggtcccggccggatgcgttctgatgatcgattacctcgatatccggccgaaggaggggcgttcatgaaggacgaacgggctccgggaagcacgcagaaagagctcctcgatcccaagcggaagctcgccggcaagtacgccggcttgtgcgtcgggaaaaagggtttggcggccttgctgaaatacgagttcgtcaatctcttcatcgtcccgatccccggcgcgctggggctggttctccgacgggcctttttcccctggatcctagggaaggtcggccggggcgtcgtcttcggccggaacgtcgtcctccgccatccgcacaagattgaaatcggggacaacacgttcatcgacgacggggccgtcctggacgccaagggcgaggccaacgaggggatccggatcggggccaacgccatgatcggccgcaacacgatcctgacctgcaaggaaggatccatttatctgggggaccactgcaacgtctcggccaactgcagcctgttatcggagacggagatccggctcggcgattattgttttctggccggggagtgttatctcgtggccggcggcaatcatcccgtcgccgatacgtcccgcccgatcatgttccaagcctcgtcggccaagggcggcatccgggtcggagaagacacctggatgggcgccggagtcatcgtcctggacggagtgacgatcgggaagggcagcgtcatcggggccggggctctcatcgccgcctcgctccccgaatacacgttcgccgtggccgaccggcgtctgcgcctggccgaccggcggacgctcgcggaccggaatcccgcctagcggccttcccccggccgccgtccccggatcctcccgctcagcgggtgacgcggatgtccgtgtacacttcctccgagacggcccggatgcgcttgaggaagaggaatccggcgttgatccggacccaggtccgaaggggaatgatatggacgtcctcgaagacctggaaatccgcctcgacctcgatctccttgacgaagggcggcgtctccgatggcgtgagccgggcgtgaaacggcgtgaacgttgaggcgtcgatcgtataggttccttcccagttctcgacatccttgaccttggcccggacgtcgaggaaatacaacagacgtccgtccggagccgccccttcccgggcggcgaaggagaattccgtccggcgttcgggcgaaaaaggcagaagcccggcgaaatcctccacccgcatccccagccgggagcggcggcgggcgggctcctttcccctctcccgggccgtttcttgggcccggtatttctcccagcgggcccggcgctcggcgagatacttctccgtgatgtcccgggtgacgccgtcttccgtccggacgacgcttagaatgtcctcttcgcgccgcccctcgatcacggcgacggccttggtctggacggtcgtccgctcgggccggcctttgcggtcaagttcaatctgggtactgcggatggaggcctgccagtttgatttcggattgaagctttcgaggcgggcggcgacccgatcgagaagcgtttcgaccgggagggaggcttgggcggagagggcggccgggatgagtagaaaagccgcccccgcggccggaagaatgaagcggcgcatgcggatctcctgtcggggattcccaatcataccagaaatcggtttgcggaggcgtgtctttctcccggagccgcggaagggggcccagccgatcccggggcggccggagagtaaaaaacagttgacaagcccggccgctgccctctagaatacgactgttccgagagaatcgactaaaataatagtatataaaggagaggcgcatgtcgacgttcctgatcgtggtcctgggcgttctgggctttctggccctggtcatcggtttcttgggctggctgttcttccatcagggcggatgctgcgttaaaaagacggcggccaagatctcccgcaagtgcgccgtctaaaaagccggggacgggccattccccgcccccgggcggaggaatccccggccgggaggaaagacggacgggttgatccgctccgccggagtctcctccctgatcggttggaataaggggcgatgagccgttccctcattcccaaatcacttccgcccgtgtatgataaagatcgtgagatgacaggagtgtgccatgggtccgattaaaaatgaagtcgcggtgatgttctccggggggatcgactccctcctggcggccgtcctccttcagaaggaattcgaaaaggttcacttgatcacattcgacaagggctatctcgaattcggcgtccggaacaatctccccaatgtcgagcgcctcaaggccgccttcggcgaggacaagatcacccaccagatcatcgaccacaagccgatcatcaagaagatcgccatgagctcttttttcaagaaccgggacaagtacaacgccgagacgcgcatgtgcgtcggctgccgcttgagtatgaacaccgggggcctgctcttcgccctggaaaacgacctcgtcggcttcgccgatggctcaaaccgcgagcagatcccatcgccggccaacctgaccgggacggccgagaattatcccagcatcgtcaacggcgggaagcggttcgcccaggaatacggcgtccatttcatgaccccgacgtacgaatatggaaaccgggacgagcgccgggccaagttgaaggagttgggctacgatatcgactacttgagcatggatgagagcaaaaagctctccggcctggtgagcaaaggcctgggaaagcggtcccagccgatgtgcttctcgggctggctcatccactggaagcgcaacttattcggaaaaccggtcgagcagaacgaggccatgaccgtcgattacgtcaccgagaagcaaaacggcgtcgtccgggacgtcatccaggactatttcgccgacaaggggatcgacatcgacgccctggtcaaggcccgcaaggccgatccgcgcggtcaattcactccggacttcgtttgatcgccgggggatcagcccgggaccttcctttcggcgtttccgggatttcctccgcgcgatcttcccggagccggagctccggcggaatcccccgaatgcgtccgacctgattttttcggccgatccggcggccggcgcgccgcttggtccggccgtccgggaaaatgatcctcaccatgatcggtcccgttttgggaggaatcggccatcgaatttggtggtacagcgaagacaagaagcggggcggcatgaagacgggagaaacgggcgggctttcgaagaaagcggtgatcaggatgtgcgaagaagcgggattcgcgctcgaggcgcattccaggtttttattccggttgaatcacctatatattttccggcccggatatccggctgatattcatccctttaaatgacaaccggggaggaccccctcagagccagccggcccggcgataccaatccaccgcccgggccatcccctcggcgaacccgacggccggttcgaagccgagctccctccgggccttgtcgatgttcaagcccttggggtggacgaaaaaagccaggcgcgaggaattgagcggagcttctttcccggcgaagccgaacaggatccccagcaccgccccggccgcccgggtcagtcccatggggggatggaagcgcggcaggctctttccgagggcggcggcgatcgtctcgaccatcttccggacgggcatcgcctggtttccggcgatattataaatttcccccgcccgtccgcggccggcgcagagaagcgttccggccaccaggtcgtcgatatacgccggagattggagggtttcgccccggccgggcagcagaaacctgcccccggcgatcgatcggatgagcttgaaagtccggcggtcgccgggcccgtagatccagcccggacggatgacgaccacgtcctggccggccgaggccgcttccagggcggcgcgctcgccggcgagcttggtcctgtcgtagacgttccggggatcgaggggatatttttcgtcggcggtttcgccgggccggacatggcccaggactccggccgagctgaagtgaaccacccggcggacgccgttttcccgggcggccgccaacaccgcccgcgtcccgccggcgtttacggccatgaattccgcggccccgatccgggcggccccgagggcggaggccaagtggaagacaacgtcggccccggccgaagcccgatccaggagggcggcgtcgcggatgtcgccggagacgaactccacgcccgggggagggttgttccgaagcctgcggccgagcgctttaaccgtccagccggaggccgcgagggccgcacagagatgatttccgacgaaacccgttcccccggtgacgaaggcgttcatcgacggacggccctcgtgaccgcctcggtgatcttttccttgtagcgcgggtacgtgtactcccgggcggccaggtccgccccggcccgggcccggcgctccgcctccgcggatgtcagggcgaagtccagggcggcggcgaatttttcgggatcgggcggcgccaggacggcgatctcctccgtcaaaacctggctgtttgtccacaggtcggtggccacgacgggcttgcccgctttgagataggcgtaaattttcagcggcgtgttggtccccgagacgcggggtgagacgaggacgtcgctcagactgatatagacgggcacgcgctggggcggcactttttccacgaggacgaaccggtcggcgaagcccagctcggccgcccgcttccgggccggttcgtggtcggccttcgacccgccgacgattaaaagaacggctcgctccttcatccggccgaaggcttcaacgagcagagacacgccctgatagggctcgaaattgcccgcgtagagaacgattttttcaccgtcgccggcgatatcccgccggacggcggcgatttccgccggaccgggcggcgccggatcgaaatcgttgaagtccaggatgttttcgagaaaaacggccttgccgccgaatcccagccgggcggcatagtcgagcaggtctcggcagatgacgatcacggagcgcgatcccttgaggatgaagcgctccatccggaggaaggctgtcttcaggagggcgctccgggaaaaatcgaagttttcgagctgctgggggaggctggagtgcatgtcgtagagatgcggagtgcggaagatcttcccgagcaggacgccgaggagggccgcttcctcgtgggagaagatgagatcgtagcgctttcggaggagcgacccgaaggccgtcgcgaacatcagggcgtccaggggaagcttgaccagcgaggggccgatcttgatatcgcggacgccgatcaggttggggacgcgcttgatggccaggccgggaaaggccacgtctccgccgcgcgggtaggtgaccagatcgacggaatggcccagatcggacagggctttcagacggaaatagacgctgatgggcgttccccggggctggaagaacggctccggggcgagcatcaggatcttcatcgccacgggctcactcggccttggtcggtggggtttcgatgacctcgcggatgacgtagatatgtttttcgaccgcctcgtggtaggttcggaccatgatttcgcccaggaggcccatggtcacgaactggaacccgacgaccaggagcaggacggccagcaggagaagcggccggttgccgatggctgttttcaggacgagccgctggtaggagagaatcagtccgatgaccgtcccggccgcgccggagatgagacccatcaggccgaatatctgcagcggccgggtcgaatagctgaggaggaatttcaccgtcaggaggtcgagcatcacccggatcgagcgggagatgccgtatttcgacttgccgtggatgcgggggcggaagttcaccgggacctcggcgatggcgacgccgacggaggcggcgatggccgcgatgaaccggtgcatctccccgtagaggtggatgttttcgatgacttcgcggcggaaggccttcaaggtgcagccgaaatcccggagacggaccttggtgatggccgagatcaaccggttggccaagagcgaggggatgcgccgggtgaagaaatgttttttccaacggtccttgcgccagccgctgaccaggtcgtatccctcctcgatcttgtcgatgagcatcccgatgtcggccgggtcgttttccaagtcggcgtccaaggtgacgatgatccggccccgggcattgtcgaacccggccgaaagggcggccgtctggccgaaattcttccggagccggatcgcccgaacccggacgtcggaggcctggatggaccggaggacgtcccaggaaccgtcccggctgccgtcgtcgaccaggatgatttcataggtccggccgagcttatcgccggcggccttgatttcggcgtgaagagggcgaaggttcttttcctcgttgaaaacggggacgatgatggagagatcgatgcctttggccatggaaacggggcaactatagcacaattcggccgggaattgaatttccgccgccgttcggtcataataagattctcccggcgcggagggccttatttccgatggccgataagaaaatcctcctggtcgattacgacacgaagaaccgggacgccgtggccgccctgttcgagccgtaccgttttcagattttccaggcctccgacggggcggcggcttatgattccttcaaaatcgagaatcccgacctggtgatccttgaagccatcctccccaagctccatggcttcgacctgaccaagcggatcacccaggaatccaagggccggacatcggtgatcatcgtcaccggtctctaccgggggccgcagtacaagcaggaggccttaacctcgttcggagcggccgcgtacttcgaaaagcccttcgacggcgagcaccttctccagaccgctctcgacctgctcagggaaaagtcggacttcggagtggacctcccgacggcggccgaggtcatccgtttgctttccgatcgtctcaaggccgcccccccggcgccgccggcccgaggttgacacctgttcgggcttgctgttagactcttgaaccgtcatgaccaacttgtggacacgatgcaacaattgccagcgtatcctttacaaggaggatatcctggataacctgtccgtctgtccggcctgcgcgttccatttccggctttccgcctcggaatggctggccttgctgtacgacgacgcccggttcgacatcaccgaccacgacatccaaccccgggatcccctgcatttcgtcgacagccagccctatcacaagcgcctggcggacaaccagcggaagacttccctgcccgaggccgtggtcaacgggctggggatgatcgggggcattcggacggcgatctccgccctggacttcgccttcatggggggaagcatgggctcggtcgtcggggaaaagatcacccgggccgccgagagggcgatggctgaaaaaattcctttcatcatcatctcgtgctcgggcggagcgcggatgcaggaaggcgccctcagcctcatgcagatggccaagacgtgcgcggccctcggccgcctggaacaagccggcctgccgttcatctccgtcctggccgatcccacgacgggcggggtcacggccagcttcgccatgctgggcgatctgaacatcgccgagcccaacgcccttatcggtttcgccggcccccgcgtcatcgagcagaccatcaaggagaagctgccgaagggcttccagcgatccgagtttctcctcagccacggcatgatcgacgacgtcgttccgcggaaaaaccttaaagcgtacctggtccgcgctctccgtcttttcctcaacaaatccgcgtgaacacgccgcggtccgccgcgccttccgggaagggcttctctccggccgcctgccgggcgtatttagccgacttggagcggttcggcatcaagctcggcctggacaacatgcgggccctgctgagggggctgggcgatcctcacgaggcatatcccctgattcacgttgccggaaccaacggaaagggatcggtcgcggccatgctggctgcgatcctggcccggtccggccgccggatcggtctgtacacatccccccaccttgtccgggtcgaggagcggatccgaatcaacggccggccggtttccgaaggggacttccgtctccggatcgcggtcatccgggcaaaaatccaggagctccgggcggcccgaatcctcgacgtctcgccgacttattttgaggtcctgacggccgcggccttgctccatttccgggagaagcgcgtcgacggcgcggttttagaggtcgggatgggcgggcggttcgacgcgaccaacgtcgtccggcctctcgtctcgatcatcactaccgtgtcccgggaccacatggaatacctgggaaacaccctggcgaaaatcgccttcgaaaaggccgggatcatcaagcccggcgttcccgtggtcagcggcgtcgcccccggcccggccctggccgtgatccggcgccgggcggaggaggagaaagcccccttgatcgaggtcttcggccgcggcgcctcgttcgagtcgcggttccgcggcggaggaaggttcctctaccgggcgggcgggaacgtcttccgcctcgcgccttccctgaccggggaacaccagggccgcaatgcggccgtggccgcggccgccgcccgcgtcctggacaaggtctggtctccggttggaatccgggaaatcgaggagggaatccgggacacccgctgggaaggccggctcgagcgggccggaacgaggccgcgcgtcttcctggacggggcccacaacgaagccggggccgaggccgtggccgcgttcatcaagtcggcggcgtcccgccggcccgttttggttttcgcggtcatgaaagacaaggcggtcggccggatcgcccggatcctcttccccgccgtccgccggatcatcctgacgacgatcccctacaagcgggcggcctcgccggaggaaatcctggccaaggcgccggcgtttgcttcgaaaaccgttcttgaacccgacctgggaaaggccctggcccaggcccgccgcctggccggcccgggcgggacggtcttcgttgcggggagtctttttttggtcggggaagtcaaaaaaatcctccgttcgcgctgagcctccgttcccgcccggaattggatttttaacgaatcgatatgataaactcggatttccgataaccgaacggaacggcctttcatgcttgagatcgacgcgagtgtcattgtcacctttgtcctggtctggattcttgttgtcgtcctgaaccgggtttttttcaagccgctccggggggtgatggacgcgcgggaaaaacgcctccaagacgacatggccgccgcccagtcgaacctggacgagacggcccgccggttgaaggcggtcgatgccgggctcaaggcggcccgcttggaggccgaggaaacgcgagatcgggtcgagctcgaggcgctgcgggaaaagaaccggttgatcacggaagcgggacaagcggccaagaccgagatcgaaaacgcccgggccgcgttcgaggccgaggtcgcccggctgaaagaggaactgcgggccgaggccgtccccctttcggaaaaaatcgaggaaaagctgctgcatcggtcatgaatgtctctcgtgccctcgccgttctcctgctggtctcctttccggcggccggtttcgccgccggggaggcggagcacgcggccggcggcggcggattggattttctctggaaagtcatcaacttcgccgtcctgttcggggcgttgttctattttctgcggaagcccctccaggcgatgctggacaagaaggccgaaacggtccgcgacctgctggccgacgcccggcgcgagcgggaggaggcggaagccaagctgaccgaggccgcaaccagggtcgccgagctccaagacgaggccgcccggctgaaggaacgggccgcggccgaggcccgggccgagacggagcggatccgggatatcgcctcgcgggaagcggagcggatccggacgctggccgcccaggaagtggccgtccggcttcaggccggcatccgcgagctcaaggaatacacgaccgagctggccgccggcctggccgaggaacggctcaaaaaacggctgaccgaagccgatcacatcgacttgatcgaccggtccatcgaccggctgaaggtgatgtccgatgaatccgctgctcattaaacggtatacggagggcttggccggagctctcccggatgaatccgagtaccgggttgtgtcgaaggacttggaggatttcctcgggctcgtgaagggccacgagcggctgttcgccctgctgagccgtccgttcctgcgtcccacaaagaaagcggccgtcatcaaggaaatcctcgcccgggtcgattatcacgacaagtcgaagcggtttcttctccttctcgtccggcagcggcggcttgacctcctgcccgagatcatccgtaacctgccggccaagtggaaggagctccggggaatccggacgttcgacgtccggtcggtcgtgctgttgtccgagaaacaaaagagccggctggaggcggagctcgcccgcctggagcaggccccggtctcctgttcctatggactcgacccggctctcatcggcggcttgttcatccgcaagggaaaccgggtttatgacgcctcgttgcggggcgagctccagcggcttaaagacatcatcggcggaagggagccccatggccattaaagcggacgaaatcagcaagatcatccagcgtcagatcgagggcttcgaggagtcggtcgacatccgcgaagtcgggaccgtcatcaccgtgggcgacggcatcgcccgggtccacggcttggaccgggtcatgtacaacgagcttctggaattccctcacgacgtcctcggcctcgccctgaacctcgaggaggacagcgtcggcgtcgtcctcctcagcgaaagctccatgatcgtcgagggcgacctcgtccggcggacccaccggatcatctccgtgcccgccggcccgcccctgatcggccgggtcatcgaccctctcggccggccgcttgacggcaaggggccgatcaaaagcgacgtcttcatgcccgtcgaacgccttgctccgggcgtggtcgaccggctcccggttcgggagccgctccagaccgggatcaaggcgatcgactccatgatcccgatcggccgcggccagcgcgagctgatcatcggcgaccgccagaccggaaagtcggccatcgtcctggacacgattctcaaccagaaggacaccggcgtcatctgcgtctatgtcgccgtcggccagaagaattccacggtcgcccacttcatcaaaaccctggaggatcacggggcgatggaatattccgtggtcgtcgtggccgccgcctccgatccgtcgcctctccaatacctcgctccctacagcggatgcgccgtcggcgagtggttccgggacaacggccgccacgccctctgcgtctatgacgacctgtccaagcacgccgcggcttaccgcgagatctcccttctcctccgccggccgcccggacgcgaggcctatcccggcgacgtgttctatctccattcgcggctgctcgagcgggcggccaagttgaatgacgatctcggcggcgggtcgctgaccgcccttccgatcatcgaaacccaggcgggcgacgtctccggctacatcccgaccaacgtgatctcgatcaccgacggccagatctacctcgaggccgagcttttcaattccggcatccggcccgggatcaacgtcggcatctcggtctcccgggtcgggggccacgcccagaccaaggccatgaaacaggtcgccggcaagctccgcggcgatctccagcaataccgcgagctcctctcgttcgcccagttcggcacggagctcgaccgcatttcccaggcccagctcgatcgggggatccggctgacggaaattctcaagcagagccagttcgagcccctcccgatcgaaaagcaggtggtcatcctttatgccggcaaccgcgggtacttggacgagatccccgtcggcaagatccgcgattatgaaaagaagctctatgccttcatcgagcgggagcacccggagattttcgccgggatcgccgataaaaaggccctcgacaagcacttggacgaggcgatcgccgccgccttggaggaattcggccggcgcttccgcgaggaggccgcctgatggccaacctgatcgacctgcggcggcgcatccggagcgtccgcaactcccagcaggttacgaaggcgatgaagacggtcgccacggccaagtacaagaaagcctcccggacaatcgctgaaggccggccgctttggcactccttccctgattccgtcgggcggctggcgggctgggccgggccggacgcccacccgttcctggacgtccgggaggaacggacgatcgatgtcctcgtcatgacttcggacaaggggctgtgcggcgccttcaactccaatcttttggcgaaaaccctcgaattcctcaaaagcaaggagccggaagcccgtgtccggctcgagctgatcggacggaaagcggcccagtttttcaagcgcctcccctatcccatcgaccgggcttatgccgagcatacggatcggatcggagcgggggagctgaggtctttggccgccgggttgatggaaaaattcctcttcctggaaacggacgccgtctacgcggcctacaacgaattcaagtccgttctcgccccgcggctcgccatcgtccggatcctgcccgttgattccgggggcggagaggagggcggggctgtcgtcccggattgggagcctcttccatctccgctcatcgccgcctactggccccgatatgtcgaatcccaaatcgtccatgcctacgccgagtcccaggcggccgagcaggctgcccggatgatggccatggatgccgcttccaacaacgccgaggagctgatcgaggtcctgaccctcaacctgaataaagcccgccaggcgggcatcaccaaagagcttctcgaaatcatgaccgccgtggaggcgctcaagtcctgaatccaacggagaacgccatgaatcaacccgcacccgcgccccgcgccggcgtcgtcgtccaagtcatcggtcccgtcgtggatattttgttcaagggccagaccgttcctgaaatttattccgccatccggatcacgagcgaggggttcgattcgccctcgccggtcgacatcgttgtcgaggtcgaacagcacatcggcgaggacaccgtccgctgcgtggccatgcacccgaccgaaggcctggcccgggggatgaaagcggtcgacacgggcggcccgatcacggtccccgtcgggcccgaagtcctgggccgggtcatgaacgtcatcggcgagccggtcgaccgcctcggcccgatcgagacgtccctccggtaccccatccaccgccaaccccccaccctggacgaccaaaacacccacttggagatgttcgagacggggatcaaggtcatcgacctcatccagccgttcctcaagggcggcaagatcggcctgttcggcggagcgggcgtcggcaagaccgtcatcatcatggagctcatccaaaacgtggccatgaagcacggcggcttttcggttttcgccggagtcggggagaggacgcgcgagggcaacgatctgtggctggaaatgaaggaaagcaaggtcatcgacaaggccgccctgatctacgggcagatgaccgagccgccgggcgcccggctccgggtcggcctgacggccctctcggtagccgagtattttcgcgatgagatgaaccaggacatcctcctcttcatcgacaacatcttccgcttcacccaggccggagcggaggtctcggccctgctcggacggatgccctcggccgtcggctaccagccgaacctggccaccgagctgggcgagctgcaggaacggatcacttcgacgaagaaaggatcgatcacctcggtccaagcgatctatgtcccggccgacgatttcaccgatccggccccggccacgacgttctcccacctcgacgcctcgaccagtttgagccgggccttgacccagatggggatctacccggcggtcgatcccctggcctcgaccagccgcatcctcgatccccgcgtcgtcggcgacgagcattaccgcgtcgcccggagggtcaaggagatcctccagcgctacaaggaccttcaggacattatcgccatcctcgggatcgaggagctgtccgacgaggacaagctgatcgtcgcccgggcccgcaagatccagaggttcctctcgcagcccttccatgtcgccgaggaatacaccggccgggaaggcaaatatgtgacgatcgacgagaccgtccgcggcttccgcgagatcgtcgagggcctccacgacgacaagcccgagcaagctttttacatggtcggggggatcgatgacgtcgtccgccgggccgaggagctgaaaaacgcgtgagcgataaagcgccggaccgctttcgcctccgggtcgtcacttcgggagcgctcttggtcgagacgcaggccgacgaggcccagattccgaccatcgacggcctgatcggcgtctttcccctccatcggccccttgtcgtcgccctggggcggggtacgctgtcttaccgtcaaggcgcttatgaggagcggttcgaaatcgacggcgggtacgccgaaatcagcccggattccgtcctggtcttcaccgaaacggcggccgccgattcctcggccgacggggcggaataattaccggattccgcgtttcgttccctggaatcccccgcccgcgcccggtttgccaagatttatccaatgatgatatatatttgaaaaaaaagagataaagagagaagacgcatgcgcatcctcgtcgtgaccggcggctatcctcccgcggaccggacttccgcggatctcgcctgccgcggccttgtcgagggtctgacccggaggggacacgaagtccgcgtactggccggcggggcgtttccgggcgcgccccttgggacggagcccgtccttcgccggcttgtccgcgaccgggccgaccggaacgcctggtccgacgttttccggaaggagctggccaaccaggccgcccttcgggaatccatcctcggattccggcccgcggcggcgctcttcttcggtttgccccggatttcggcttcgctgccgcttctggctgaaagcttaggagtcgcctcctgcctctatgtcgacggcgacagcctggccgtttgggaacgggacctctggtaccgggagcagccccgaggaccgcgcgggcggagggcgatccgctttctcacccgccgcttcggcctttccgctttcccccgtcctctccacgagctcccggccgtcttcaccagccggtatgtcctggaggcgacggaacgcgtcggcaagccggtccgccgggcggccgtcttcccgccgggcgtcgatctccgccgttttcctttcaaggaaacggccggggcgcggccggtccgcatgctttttctcgggccggtgacgcccgaagacggcgccgatgtcgccgtccggaccctgggcttgctgaagagagatccaggcggggccggcttgaccctgacggtcgccgggccgctttccggcttctccgagatcctcgcgtccctgcaagaccgggcggagcaagccggcgcggccggcgatgtttcctttgtcgagtatgccccggacatgtcgtcgccggacatgcttctcggccacgacctgttcctccatcccgcggcccgagtgggatccatcaccccggccttgctggaagcgatggcctgcggccttccggtcgtggccgccgcccggggcgggaattccgaggtccttgaggacggccgcaacgccctggtcgttcctccggaaaatccggaagcctgcgcccgggccgtccggcggctgctggacgatccggccctccgggaaatgctgcggcggaacgcccggaaaacgatcgaggagcggttcaggctcgaccggaccgtggaagcggtcgaaaagatcctggaggagatcgccgcggatccccggccgttttcggccgtatcccgggacgaggaggacgcggccggcggcgaggacgtgtccgcgtccggccgccccgagcgctggctccgttggagcggcgtactcattcggatccggcgcctgtttcggccgaaggcggtggccgccaagctgaaaggcggggcgcggatcgccgcctgccggctgtctctcctcgcgtttcctccggtcctcaagggaatccatcgctggctcggccggaggcgctcccggccggccggcggcgagccgcgggaagtgctcgtcgtccaattggccgacctcggcgatatcgtcttgtccgggccgtttctgcggaacctgcggacgctcctgccccggtcgaagatcgtcctggccgtccatcccggcggcctgaatatcatcgaaaaatgtcccgaggtcgacgagatcctgacttttccctaccggagcttcgctcgttggaacgacgccttttacggaagcgtccggtggtggttgaaaggattgaccctggccgtccggacgttccggaagcgccgcttcgacttggcggtttccctgcgctggaacaacgacgccccccaggcggcttccctgatcctgatggccgccagcggcgccccgaggcgggtggcttacctcaatccgccgaacgccccggccaaaccgggaagaaacggcctcaacggcctgatcaccgacggcccggcgcggggcgccgagaagcatgaggtcgagtaccaggcggatctcctccgtcatctcggaggacggtccgaggacgcgtccttgaaggtttggacgaccgccgacgatgaaaaaaaagcccggaacctcctggatgggcatcggatcggctccggggagctcgtgatcgccttcgctcccggcgcgcgctgggaattccgccgctggccggcggagcggttcgtcgccctcgggcggtggctccaggacgtccatggcgcccggatcctgatcctggccgcgaaatccgaaacggcgctggccgcggagatcgagcgcggattgaagccggaggggacggtgaacctggccgggaagacgacgatccgggagatggccgccgtcctgagatcctgccggtacttcgtcggcaacgactccggcccgatgcatatcgcggtcgccgcgggggtcgtttccgtcggcctgttcgggccgggtgaatacgcccgcttccggccttgggggccggcccacgcggtcgtccacctgggtttgacgtgcaatccctgctcgcaaaactgcctgttttccgaggcgcgctgcatccagggcatttccgtcgcccaggttcaggatatcatgacgggcctgctgggctccccatctctttctggaaaggcggtcgaagatgaacaagcttgagcaggaaatccggcggctgagggaggagttggaccgcaagcgggaggagctggccgacatccggaagctcttcggcggagaaatcgaccgggagttttccgctctcgtggaaggatactcggaccgggagctcgagctccatctccaggaggttctggcctcgatggacgccctggccgaggcccggccggatctccgggcggtctcctcccatcggaaaaccatcggccggccgatcgttttcttgaaacgggtccttctggaaacgacgttcgcccagttcaatgtcttcctggagcgacagcgccagttcgaccggcggatcttggacctgttgcgggccctgcatgtgcgggacgtccgggggcaggcgcggtttaaagccttggaagcgcgaatcgccggctgcgaggaggacctggtccttctccgggcgaagctcgaggacttgcgggcggcggagccgggttcgagcggtcccgaacatccggagcggggctgaacgccggctttcggaaggacatggacggaagggagatgagcggaaaaatggatcagcggatgggcggggccgaaccggccgccgaaacggccgaactcgtccgaagccggggaatccaggccgccgtcaacgcccttcggaggcgggaactggctctcggcctccggaaaccgaccctggccgtctatgatcatgcctttcatttcatcggcggggcccagaaatacgggctgaccatggccgccgccctccgggacatgttcgacctcacgatcctggccaaccgcgatgtcgggccggaggaattccggcgatggtacggcttggacctctccggctgcccggtcaaagtgatcccgattcccttctacgacgagcggaacttgatccatctcgacccggccttggtcggacgggtcgatgaaaatccgttccaccgcctcagccgggaaagcggcggctatgacgtcttcgtcaacaacagcatgaacgagatggtctttcccctggctcccgtctccgtgttcatctgccatttcccggaacggcggccgcggacttatttttacgccgaccggtatacccgggtggtctgcaacagccgctacacggccgcctggatcgaaaaaaaatgggggttttcgccccaccggcttctgtatccgcccgtcgacatggaggccgaaggggaagccggtcccaagaagaagctgatcctttccgcctcccgcttcgaaccggagggattcaagaggcagagggagatgatcaaggccttcttgaagcttctccgggaaaggccggaggcggcggacggctggacgttcgtcctggccgggggaagcgggcccgggaacgcctatttggacggcttgagggagttggccgccggagcggccggccggatcgagctccgggtcaacgtcaccgcggccgagttgaaatccctttaccgggacgcggccctgttctggcacatgtgcggcctgaacggcgaggatcccggccaaacggagcatttcgggatgaccacggtggaagccatgcagaacgccgtcgtcccgctcgtttttgccggaggcgggctgccggagatcgtcgatgatggaatcaacggattcctggccggctccacggcccgcctcttggagcggacgttgttccttctccgggatccgggaaaaagagaagccttggggcgggccgcccgggagaaagcccggaggttttcccgtccgcgctttgaggcggaaacccggatgattttcgaggacgtcctcgcgctgctcgccggctccggcgatccggccgcggaatgagacggagagagcggcgatggatttccccttgcgacgcggcgaaacgctggatgatttctaccgcggccgcgtccgcctgatccagccgaggaaaggataccggttcgccacggatgctccgctcttggcggcgttcgccggcctccggccgggggacgaggtctgcgagctggggacgggaaacggcgtcatcgccgtcttgctgggttttaagccgtttgcccgcctcacggcggtggagatccagcctcggctggccgacatagcccgccggaacgtcgccggaaacggcctgtccgggaggatcgaggtcgtcgaggccgacctgcggaccttccggcccgggaagcggttcgacgtgctggtttccaatcccccgtatcatgggaaaaagaccggctttccctgcccggacagggagaaggcgattgcaaaacatgaaataacgtgcgatattatggaactcatgcgcgcggtttccgagctcctgaaagacgacggacgggctttttttatttacccggccgcccgcgaggaggaattccgggccgcggcccggagccgcggcctgcggccggttgtaatccggcggattcatccgcgcgccggcgaagagccgaacctctttctgtccgagctccggttcgccgcggctttttcgggggaggaaaccgtgctcccgccgctcgtcctccatcccggccggggcggagaattcggaccggaagcggcggcgatgctcgagggaccgttgaatgaaactcatcgctaacctccaggaggtttacaagcaccggcttctcatccggacgctggtcggacgggagctgaaggcccgctaccgggggacggtcctgggcttcttctggtctttcttcaacccgttcctcctgatggtcgtctataccgtcgttttcggattcatcctcaagccgcgcgatcctactctcggcgaggggccctggatgtatgccctgtacttgttcgccgggatcctgccctggacgtggttttcgtcatcgttgaacgattcggccaacgtcctgatggtcaacggcaacctcatcaagaagatcctcttcccggccgaggtcctccccatcgtctcggtcacctcgaacttcatccacttcctcttcggcctgccgatcctgctcatcttcctgtttgttttcggcaagccgccgacggtctacctcctcctgctgccggccgtcctcctggtccagttcgtcttttccctgggcttcagcctcctgttgtccgccctgaccgttcacttccgggacatcaaggacatcctcagcaacttgctgacgttctggttcttctccacgccgatcgtctattctctcgggatgctggagcactcgccggccctccgggccgtcctcgatctcaacccgatgacccatatcatcgggggctaccacgactgcctcttcttcgggcaaatgatccactggaagcggctgggagtcacgttgatcgtctccctggtcctgttcgtgatcggctacgccgtcttcgaccgcctccgcgactccttcccggaggaagtctgatggccgccatcgagttggaccgcgtcagccggatctaccagaaatactcctcccggcaccggttccagacgttcaagagcgccatcgtcaagggaagcctgttcgggtcgctcaagccggacgagctcgtccgggccgtcgacgacgtcagcttcagcgtcgagaaagggcaaaccttcggtctgatcggggagaacggctcgggcaagagcacgatcctgaagatggtcgccgggatcgccaagccctcctccgggcggatcttggtgacgggcaaggtttcggccctgatcgagctgggcgccgggttccatccggaaatctcgggccgggaaaacgtgtatatcaacggcatcatgctcgggctgtccaagaaggagatcgcccgcaagttcgacgagatcgtccgcttcgccgagctcgaggatttcatcgaggctccggtcaagacgtattcctcggggatgtacatgcggctgggattttccatcgccatcaacgtcaatcccgaggtcctgctcatcgacgaggtcctggccgtcggcgacgcggccttcgttcccaagtgtctcgaccggatcgacgatttccgccgccggaaaaagacgatcctgttcgtcagccacgacctgtccaccgtggccaagatctgcaacacggtggcctggatgaagaacggaaagatccggatgatcgacgagcccaagagggtcgtcgacgcttatatgcaggatgtcaccgaggcgcaggaggccgagttccgcgagcggaaggaggaagcggccgcggccgtcgtcgccgttccggcccccccgccggccgcggaagggccggcctccgcccgcttggagcaaggcccggcggcggaagccgccgtgaccgcggctccggccgaagcccccgcccccgcggccgaaccgccggccgccgccgaggaaggacgccgcgaacagcgctggggcaagcgggaagtggagatccggcgggtcgttcttcggaacggccagggggaggaaaagcacgtcttccgtcccggcgagacgatggtgatcgatatggacatcgccgcccgcgagccggtcaaggatttcgtgttcggcctcgctgttttcaactccatgggggtgttgtgctacgggacgaacacccgcctggaggagttcgagtccgtcgctttttcgggggagggccgggtcgtctgccggatcgagtcgcttcccctgatcaacgggacctattacctcgacctggccgctcataagcgcgacggatacccatatgattaccaccggaacatgtattccttcctcgtttcctcgatgatccgggacgagggcgtggcccgcttggaccatgcctgggaattctccccggagatcaagatcaaatcgccggcgaaatgagatgagaaagattcgttcggcggccgccttgaagcgcctgcgggccggctggcgccgccaaggcttaaagacggtcttcaccaacggctgctttgatctgatccacggcgggcacgtccatctcttccgccgggccaaggcccagggcgacatcctgatcgtggccgtcaattccgacgcctcggtccggaggctgaagggcccgagccggccggtgtttccgctggccgagcggatggaggtcctggccgcgttcggagatatcgactatgtgacttggtttgaggacgatacgccccaaaagatcatcgccgccctgctgcccgacgtcctggtcaagggcggagattggggcgcgggcgaaatcgtcggaacggcggacgtcgaggcggccgggggacgggtgtaccgcgtcccataccgccgcggccactccagcacgaacctcatcgaaaaaatccggagatcggcccgccgccgctgacggcggaacggcctggaaaagaagctctccctatgtccgggagccgtcccggaccgcctcgaaaaaccaggaccacagcctcttgtggaactcgaagcttgggggatgggcttcgatcagcgtccggaacgaaaacagcgccccgtcgtccggcccgatcttgaactccggcgccgggtcccagagcttccggaattccgggtggaactggacgccgagcacatggggatatcgctcgtgctcgatcgcctcgatgattttcccgtccatcgagcgggcggcgacggcgaagcccttgccgggcgtgtccgcggcctggtggtgggagctggcggccaggggatagccgtccaaagccgggcccatggccttccaaacgcggctttcaggaaggagacggacggggtggagcatgtaaggggccagggccggatcgtgcggagcgatcatctcgtagggattcttatgccactcgtcccgggggagggcgaggacgtcctcgacggtcgttttcccgtagatttcgctccagagatcctgaatcatcgttccgcccgtgccgacccaaaggctctgcatgccgagacagatgccgaggacggggtaatccggccggtcctccaagaaggccttgaaatccgggttccggccgccgcccaggagatggaagatcatcgacagctcgagataatgacggtaaggattctcgacgacggtccggaaatccgtctcttcgccgtaggccgccggaggcatgtccggtccgccgaagaaaatgatcccgtcggagaggtcgaagattttccggaactcagccgaggccgcgttcgcttggtaaagcgaggcgattcccagctcggccgaaaccgcatggaagtggacgttggccagcttgttgtcccggacgaaacggacggattcgcggtagtcggtccgctccttgacatggtagacgccgacgatttccaggttgtcgatgggaagcatcccctcggccttgagggcgagaagatgacggaacgtgttgggggccgggtagaaaataaccaaccggacgagatccttgggggctcgggccgtgtcgaaaaagcgttccggggccgatgaattttgggcggccgcggccggcggaacgagcattcccaaggcggcgaccatcaaagcgaggacggcgaaggcctggaggcgggctcggaatcggaacatgcattactccttgcggccggcgtctccccggaaatccggcggaatccggcggccgggaagagctcattatacgtgcggccggacggggagacaatctctctcccccgcgctccgtttttcggcggcgtttcctccgcgccgaccgacccttcctctttgttttaatcgagttcttttcattgcgttcatcccgcgctcgcgaaacgaacgccgaaaacaaaacggcctcccctttccccgacttccagggacatgcgggagaagaccgggtcgagcgtttctccgatccatctggacgagagcgacgcaacgcttctcccgagatcggcgtccgtttttgccgtcgttcccttttgggggataatctcgaggaggggggcggggcaaacgccggttccgtccgcccgggcttcgccgggaacgcgagggtcaaaaagacggaaaatcatgaaacatgcttgaggcggtcgagcggcgggacgcgggaattgcggcccggattcgcgtataatcttcgttcgtcccatgagcctggattttctgaaggagacgccggaattcaaggacctcgtccgggcggtttcgtcccttccgaaaacccccgagggccaggcccttcttttcggagaagaggaccggccgcgtctttcgatttccggcttgacggaggcggccgtcccctaccttttcgtccagttggccctgactgggccgcgccgggttgtcttcatccgtccgtccgcccgtccgttgtccggcttcgaggatcaggcccgttttttcctccagaacctcggctcgacgaaaaccgtccggagctttcccgcgctctcggagaatcccgccccggacgccgccccgtccctggagtcggcggccacccggatgcgctatttttatgatctgctgaatcgcccgccggccctgaccgtgaccaatcttttcgggctcctgcggccgtttccggctccggaatgcctccctgagctttttctccgcctgaacaaggacgccgagtgcggccgggaccgggtgatcgagcggctggcctctttcgggtatgcgcgcgaggatttgatcgccttccgcggggagtacgcctatcggggcggaatcgtcgatgtcttctccccctggcagaaaaatccggtccggatcgaattcggcggcgaccgcgtcgtttccctccgcgagtttgatccgtccacccagcgggccgtccgccagaccgaggcggctctcatcccctcgctttcggaggggaccgccgctccggccgccgcctccgttccgttcacccggtacctcgccgacgcggtgttcgtcttcgaccatccggaagagatcgagaaggagtgggacgaggcgagaaccgacctcccctcgcgggccggggccgggccgcaggacggccccgcaggtccgcccttcgaatcgatctatcctccggccctgttcgaacggctccgcgccgaggcggtttattgcggggagctcgcaccggccggagcccgccgggaaatcgccttcggctttcagcccgtgcctcgtttcgacaacaagatcttcttcttccttgagacgatgagacggatttacgaggagcgcgaccgctgcgtcatctttttatccacgccgccgatgcggaagaagatcggggcccttctcgaaaccaaggagatcccctcgctcgaagcggattcgcctcttccggcggccgccggcggcgagatccgtctctgcctgggcgatctcgagcggggcttcagctatccgcggcaaaagatccatttcttcgccgagaaggacattctcaccgaggagcggatcatccccgcccggcccgcggcccggccctcgatcacccattttcaggacctgagggccggagactatatcgtccatgccgattatggcgtgggcgtgttccggggcctggtcaaaatggacgtggaggaccgggcggcggaattcatggagctcggctaccgggacggagacacgttgttcgtcccggtcgaggacttgagcctcgttcagaaatatacgcccgtcggagccggccaaccgctgctggacaagctcggaaccggccattggctgaaaaccaaggagcggacgaaaaaagccgtccagaagctggcccgggagctcctggatctttatgcccggcgcaaagccatcaagggattcgctttcagcccggagggccgctggcaggacgaatttgaaaaaaccttcgagttcgaggaaaccgaggaccagctccgctccataaaggagatcaagacggatatggagacggccgcgcccatggaccggttgctctgcggcgacgtcggctacggaaagacggaggtcgccgtccgggccgccttcaaggcggtcatggacggcaagcaggtcgccgtcctttgtcccacgaccgtcctggccagccagcattacaagacgttctccgggcggatggttctgttcccggtccgggtcgccgccctgtcccggttccaaccggccgccgaacggcgccggatcatcgaggacctgaagaacggccgcgtcgacatcatcatcggaacgcaccgtctcctttcggctgacgtggctttccgcgacctgggactgcttgttgtcgacgaggagcagcggtttggagtcgcccacaaggaaaaaatcaagcatctcaaggccagcgtcgacgtcttgacgctgacggccacgccgatcccccggacccttaacctgtccctgaccggcctccgcgatatcagcctgatcgaaacgccgcccaaggaccggctggccgttcacacggtcgtgacgacgttttctccgaggctgatcgcggccgcgatccggcaggagatcgcccgcggggggcaggtctattacgtcctcaacaaaatcgaggagatggattccttgccggcgaagatccgggaatgggtcccggacgcccgcttggccgtggtccacggccggatggctccggccgagctcgaaatgaagatgattgatttcatcaaccagaagtacgatgtcctggtctcgacgacgatcatcgaaaacggaatcgacatccccctggtcaacaccctgatcgtccagcgggccgatcatttcggcttggcccagctctaccagctgcgcggccgggtcggacggtcttcccgccaggccttcgcctattttctcgttccgccgttcgccgagctgactccgatcgcccgcaagcgcctcgaagccatcaaggaattcagcgagctcggatccggattccgtctggcgatgaaggatctggaaatccggggcgccggccatctgttcggagagcagcaacatgggacgatggaagccgttggatacgactacttcatccatctcctggagcaggcgatcaaggagctcaagggcggggaggtcgaggaggcccggtgcgagatcaatcttcgggtcgaggtccgaatccccgaggcctacatcccggccatcaacgtgcggctcagcttgtataagcggatttcctcggccgcggacctggatgagatccggtcgctggaggaggaaatccgggaccgcttcggcccgcagccgccgagcgtcgaacatctcctccaatacggccggatcaagattctggcccagcgtctgaagctttcggccgtcgatcgcgtcgaccggaagctgattctcaaattccaaccttcaacggatgttgatccagcccggatttcaagtcttctcaacaagatgcggggatcaatgactccggaaggcgttctcagcctgccgctccgctcccccgcctcagccggcgttctgtgtgaaaccgcccggctcttgctggagttgtcagggatgggataaaataactcattggcatttggcacagatgaagcgcaatccggactttttggcggcggctgttttggcggcggcggctctctgcctgggggcgggagcctgcggcggcaagaccggatctcctcccgcttccgagggattccgtctggacgatccgcaaaaagccgctcttccggtcttgacggtcgagggaattgccttcaccaatgctgatttcgcccggttcgcccgcttgacggtcggcgagcccgaggcctccttgacggccgaggcggccggccggctgttcgatgatttcgtcgaaaggaagctgatcgtcctctcggcggccgcccgcgggatcgacttgagcgacgaggaaaaagagaaatccctggcggttttcaagctgaaccgggccgagggagccgtttcgtcctccgaggccgacaacgcggatctcctggaaggcgtcctcgttgagaagtacatggccttggaaatatcgggaatcacggttccggaggatgagatcgccgcctattacgaagcccacaagaacgaattcctccagccggagcgcctccaggtgagccagattctcctttcctcggaaggccgggccagcgaaatcctggaaaagatccgttcggccggcgaaaacgagttccgtgaggccgcccggacgtcttcggaaggacccgaggcgaaaaacggcggactgatgggcgttttcagcctcggccaactccccctggagctggaaaaagtcatcttcgccctggaggaaggccggatcagccgggtggtccagtctccctatggctaccatatcttccggctcgaccggaaattcgagccccggctccggtctcgaggcgagaccgtccctttgatcgaagcccgtcttctcgaacagaaaaatcaagcggcccgggacgcccgcgtcgcatccctgaaagaaacgatgtcctggaaaatccggacggagaatctgccgttcgtgtatccgggatcctgataaggaaggtgccatgtcgaagaagaaaatcatcctggccgtctctctccttcttgtcgcggcggtcgccgtcccggcccggcaggtcatcgaggaaatcatcgccgtcgtcaacgacgacatcatcaccctctccgatttcaagacggaatacgaggagcgtctcatggccgcccgggcccagtaccggggggaggaactggagcgggcgatcgaatacaccaaggcccacatcctcgacgaaatgatcacggacctgttgctcatccagatggcccgcaagatgaacatcaacgtcacggaccagctgaaaatggtcgtcgagaatatcaagcgggccaatgatatcgaaaacgatgagatgttgaagcgggccctggcccaacagggatacaactacgacgagtggatcgccacgatggaaaagcagatcctgcgggaagccgtcctccgtaatcaaatcgggcagaaagtggtgatcgacgacgccgagattgtcgattattataaaaagcaccaggacgaattcgttgttcccgaggaatatgagctccgggcggtctacttggcgatcgagggccgggaggccgccgccctggaagctcgcaaggccgagatcgaagcgaagatcaagggaggcgcgccgttcgcggaggtggccgaggccgattccgacgagccgctcaaggcggccaagggaagcctggggacgttcaaggaaggcgagctcgaccggacgctgctggcggccgtcaagccgttgaacaaaggcgggatgacgccctgggttcagtccaagaacggctggtatttgatcctggttgaggaaaagaaggacagccggctccggacttttgacgaatcccggggggcgatcaccgaaaaaatcggcacgcagaagcaaaacgccgaggtggataagtttctggccgagatcaaatcgaaaaactacatcaagattctcaagcccgatccgttcgccgacctcaactgacggcttccggtttccgcttgagggccacccgggcgatccagcttttttcggccttcatcgaaaggaagccgaagaccgacacggccaaggcggccagggcgtcgacgatgagatccttcatcgtgtcgacaagggccgcccgcccgacgagcgaggttttatcctccagggcgaacttctgcatgttgagcccgaggacgccgtcggccgcgaattcatagatctcccagagaacgcccagcgaaagcgcgaacgagaaagcgaacagggcgacgaactgggggctcagcgtcacggctactttttcgcttttattgagaaggctgacgattgaaaacccgagcgctccgagcatgatcccgctgaacgcgtggaggatgacgtcccagtgcgggatccggtagtaaaagtcgcggacttcccccaggaagatggcggcgtagaggaagacaacgaagaggaggtacatccggctgggaaggatgatccggaagcgcttctcgagcatcgagggaagaaacaggatgagaagaccgaggcaggactcgaggagcatgagaacatagtcgctgcggaccttcccagaagcggccgtggagacggcggccgcccccggagcgcggaccgccccgatcaaggcatagaccgccgaagcgacgagagtgaaaaagatgaagacgccgaccgcttttcccaagcggccggccggccagccgacaccgcccccggcggcgggaagccgcggcggaactcctccgccttccgccttctcggtgttcatgaggactcccccgctgccggacggcggcggagagaaagaatccggccggcttgtctcctccgggaggctaatccttcgccggctcttcctgcaggacggccgacgattcgtccttctggtggacggcctggtcttcttggaaatcgatctgccgggacaccggatattcgcccatcgaaatatggcgcggaccgcccatttggacgaaaagcttgacgtaatacgacttccaatggggattggccttgaaagagtcgagggttttaccggccacgccgaaattggatttcagggtgatcggcgggctggtcgcgccaggggcgaggccttcgccccggaccgccgtatgaaagctgtcgcccaggttctcgaccgagtccacctctttgaagatggcgttgacgttgatgtagcggagggtttcggacgagttgttcttgagcttgaaggtcaccgtcgggaccagggtcagcttaggattcggccattgccggtattccttcatcgtccagctggtgctcacgtcgacgacctccagggacgaatggacctcctgttcgttgtaggatttgcaccccgtctgtcccagccagatcagggccgcgacgaccgccaaggcgactccggaagcggggaagatgcgtctcatcatgttcctcctgtcggacctcttgatcataacccgtccggtgggggaaagcaagaacggtcccgggtttccttgcgcctcggcgcggtttcgctataatgaaattccacgaaatgtcgatgaaaggacgaatgtcatgggcctggtgaagcgcggcaaggatctctggttttacgaagatctctactccgatgtgacctacgggttcaaggtcaagcggatcgtcgtccctgaaacgccgaccggcttccagaagctgatgatcctcgacaccgagcggttcgggcgggtcctgattctggacggaatcgtccagctgaccgaggaagacgagggcatttatcatgaatggatcggcctttggccgctgttcgccacccccaagactccggaaaacgtcttgatcatcggcggcggcgacggcggcgtcgcccgggccgtcctccgccatcccggagttaaaagcgtgacgatggccgagatcgaccgggtcgtcatcgagcagtgccggacgcaccttccggggatttccgccggagtttgggatgatccccgcttccgcctgatcatcggcgacggggccgaggtgatccggaagatgaaaggccggtgcgacgtgatcatcatcgactcgaccgaccccgtcggcccggccaaaagcctcttcgacaccagcttttacgagagcgtctacgacgccctccgcgaaggcggcgtcaccatccatcagaccggggctcttcttctccagccgtttgaggcgccgggaagctggcggcagatggagcggattttcgacgacgtccaggtcgtccagttcacgaacgtcagctacctgggcgggccgttcagcctgaccgccgggtcccgcggccggaacgttttcaaggcggccgcgcgcaacgcccggcgcaatttcaaggccgcggggatccggaccagctggtattcccccgacatctcggccgttccgtatcccgagttccagaggcgcctcgaggtcgacaagtacggcgaggaaatcgtcctggacttccctctttccggccggccgccgtcccggccgcgggttggaaagtggagccgggagctttgccaggcgatcggcatgcttcccttcggggaccccatggtctccgatcccgcctggagggatgacgacacgctcgtccagtatatcgagacgagcgccatcaatttccgccggttcgggaatacggcctcagccaactgcttcacctgcgcccggcttccgcgggacgaggccgcggcgttcaccaccggatttttcggggccgatgcggcggtctgctggtccctgccgcggggcgttttcgccgacatccggaaggtgcgccgcgactccctgatttaccgctcaggggcgtccggggggccggccggggagatccgccgtccgcggccggccgaagcggccgaaatcttcaagccctcgttccggctgcccgtcgagacgggcttcgccccggccttcgagctcgtcatggacatcttcgattgcgatttcgatcgaatttcgtcctgcgaggcggtcgccgcttgggcccgggaatcggcccggacggccggcttgaaaaccatcggaagaccggatgctcctgacttcggccacgccaagaagaaaacggccggtccgtccgtgacccagttcctccgcggcggttcgaacatcagccactattcgatcaactggctgatgatcgtcttgaacctggtcgcccgggaaccggtccccctgcggcgggtcatcacccacgctatggattatttccaggggaaaaaagcccactgctggatcctgccgcgaggggcgtccggcaagagcctcaaggacatcgccgaaaacacggtcttgttcgaggtccggcgggactaggccggcgggggctctcggaacgaaagaagggttcggccgcagcgttctataaaatccttgaccgaagacaaatcgaaaaaacccttttttcaatccagccggggtaagatttttaaatggaaggacatatcgcccctcggctggattttagaaaacgtgatccacggccttgacgctcgtccctctgattgatagattgcttccatcatggttttgaggaggagtgaacatgagaaaattctcggccgccgcggccgttttacccttgtttctaaccctggccgtcgtcccggcccaggcggttcaaatcacgggcaaggggattatgctgggtctttctctctccagatggagcggcgaggatatcggaagacatgatgcctggatgagcttcgccctgggcggattcctgaccttcaatatcatcgacgaattgtccgttcaaccggagctcttgttcgttcagaaagggacgaagtggccggacaacgatctcaatctcaatttccgcttgagctacctggaactgccgattctggcgaaatattcttttaccgtcgggccgggcgtgaaggtcttcattttcggcggaccggctttcgccttcaaggtcggagcgaccatgcgttttgaatggcaaggcgagttgataaccgatgacatcaagggaatgaagtctttggacctcggcctggcgttcggggcggggggggagttgcccatcggcgtcaatagactcactctgggtctccgttatacgctcggcctgatgaactgctatgaagtggagggggaagccctcgaggccaaaaacggcgcgcttttgatcatggccgggatcggcttctgataccggccggatcgggtcctcattcgacgaccgcggaggcgaaaacgaggcggacgccgaaggattcggccaagccgacgtgacgggccagggcggcgagcgactcgcgcttcggatggcagatcgcgacggcccgtccattttccttcgctgagcggaagagctcccggagcccggcggcaaaggcctcatcgccgcgttccgtgtcgagaaaaacccggcgggcggcggcccggactcctatccggccggcttcccgcagggcgacggtggccgcggtcgtccggctgtcgatgaaataaagtccccgctccttgaggatctcgagaatcgggcgcatcaactccgccttttccgtcgtcgccgagccctcgtgattgttgaggccgcgggcgcccgggacccgggcgaggcaacgatcaatctcggcccggatctctccgcgggacttcccctcccggatcgccgggccggagcccgccggatcggtcttgttcccgttggattccaggggcagatggagcatgatctccaatccgcaggcggcggccaagcgggccgattcctccgtcaagtccgcatccggcaggatggccacggtgagcgggcggccgacggcgtagatgctttcgaccgcctccaggctgtaaccgatgtcgtcgatgatgatcgcggccaggggaacggaagacgccggcggcatccgctttttcgccgccgggccggatttggagggagggccggcgggggatgtccctgtcggccgcggcctggtcagaaggaaggcgataacggccgtcagaatcgcgagagccagcgggatgagccaggccaagggccggcgccgcttccgcttcatgggcgccggctgccgggcaggcccttggttttttcgagataatccgcgccggtttttttccccggaccgattttcacgtccggcgtgaggcctttttcaaacagggcctcccccgaggcgagggtgaatgcgccgaccgtcagcagcaatccgtctccggcgtcgagcggcaggagcctctgttcggccgttaagccggccgtcggggttccgacgacggtcgcccgcttgaagtcgcggaggacgccggccgcgatttcggccgggcccatcgtcgccgggtccacccagacgaccagagggacatcgggcagaacgggttcggccgggcaagcccaaacggtcttgatgccgccttttttctcgaacgttccggcccgggggcttttcaggaagagattgaccaagccgcgcgcctcctcgatctcgccttcgcggcagccgcgcaggtcgagaatgagcgtgttcttgcggcccgcaacttgaggaagaacgatcgtgcggaaggcgtccatcgctccggaaaaaagatggtggatccggacgatccccgccgttccgggctcggccgtccaggctacgggagcgggatacggggcgtaccggtcgacggttttctcgagggtttcattttcatggatcaagcggagcttgaccggcgcgggtttctcgctcttcaaggcgaagcggaactcgttgtggctccagacaagggtggagcggtcgtcgaccgcgctgaccgcgtctcccggctggatgccggctttctccgcgggcgacccctcaacgaccgcgacgacgacgggaaacgcgcccggccgcttataagcggccaagccgatgtcgtaaagccgctcgaggcggggagaagacgcccgggccgtcaattcggagctcagataggccgaggccgggtcgagggctccgatgagccctcggaaagcgccttccatcgtctgaagcgggttcgtttcattgacataatcgtcgcggatatgctcgatggcccggtccaggatgtcgaaatccttggccggaggaagtttcgaggactgcaagggcgggcggacccagaggaggaggaagaaggccgcggccgccaggccataggaaacaaggatccggggacggggtagcttcatcggggtcgttggctccgtaaggagaaatcctatcaccttcgccgaagccaaagcaagggattgacgggcttggtctggtagcggatctcgaaatagagggaaatccccgagagcgaggcggtgtcgccggcgacggccaggggcgttccgggcccgacgaagtcgccgttgcggacgaggaattcggcgcaatgaccgtagagcgagtggtagccgccgccgtgctcgaggatgaggaggttgccgtagctcgggaagaaatcggcgtagacgacctttccggcatggatggcccggatagtcaaatcccctggggacggggtgatctcgatgccgttgttctcggttttcgtgttgaagctgcccttttgcagtccgtaattttgggtgacgcgtccgtcgaccggccagtcgaggcggcccttggtctcgccgaacggcaggccggggaaaacgcccggatgaggacgggattccaggtcgcggagaagcttttcgagctcccgggcgcgctggttgagctcgccgatggcctgttcgtaggttttttggttggttttaatctgggcgacgagcgtccggttcttcttttcctcggcctcgagctcggcctgcttggccgtcgactgcttcgtcaaggcggcgatctcggcctccttttcccccagctcccggtcggcttggcccagggcggccagccgggagaggaaatcggcgatgacccggtcctgggctccggcgacggcttcgagcgcccggatctggtcgacgaaggttcgcagatcgcgcgcttccagggcatagcgggcgacgctgaaacggccgtgcttgtagatggtgaggagaacccgggccagccggtcgcggtcggcggccagggcgttgcgcatttccgggatgcttcggccgacggcgtcccggtcggcccgggtccgggcgagctggacctggaggagcttccattcgcttcggagaaggcgtttccggacggcgatccggtccagctgggagagaacggttctttcccgcttttcctcatcgccgagcttcgcccggagccgttcgatgtcgccgcggatctcggccaggcgcttttcgtattcgacggcttgaccggaggccgcggccggctcggattggccgaaagcggaccgggcgaggaagggggcgaagacaagccagccgcccaggacggccgtgacgatcctccggcggctcatcggcgcgtcaggtagaggaccgcccccgccgccccgatgaccagactgtaggccaagtcgacgaaggcgtaagacagggcggccgatgaggacagcccgtaataagcgaagatcgccacataggccccctcccggacggccaggccgttgatcgtgaccggaagcatctggacgaggagaacgagggggatgaagatgaaataatcgaacgccgggatggggagatccagggatattccgatcaggatgaagtagacgatgacgttcagctggagaaacacggcccacagcatcgcccggaaaaacggccggggccggcggcggtaggacaggatcgcctcccggaaaagaagcgccttgtcccgcgctttccggagaagtccgtccggctcgcccccgcggagccaccggccggtgagggggaggaagaagacggccgcggacgccagcccggccgttccgaggactaaggccgccccgatgaacgggaccttcccggccatctccaggcggccgagcgaggcggccagggcgaagaagaagaggacgatgacgccggtcatccgttcgacgacgacgatggccgacgacttgacgatcgacgaggaatatttcgatccgtcccagatgcggacgacgtcgccgccgaagctcgtcgggagaaaggtgttgaagaacttgccgatgaggtaggatttcgccagaaagccgaacgggatgtcgtcgccctgggcccgggccaagatccgccagcggtggacgctgatgagaagacccagggcgtggagacagaacgagagggccaggagcccccagtcggcgccgccgagggcccggccgatttcgggcagcttggcccgggagagaaagaaaaccgcggccaggccgcccagtccgagggccaggcggagaagaaaacggagggttttccggcgcatcgattctttctaccataaggcaagcccgaaacggaaggggagggggacgtccggatcgattttattcagagaggattcagccgaaaccggatcgacccggccccaaaaagaagaaaccggcggcgttcccggagggggcggcaaggcggaaaataaggtggaaaaagagagatatgacttaaatcataggaaaaataaaaaattcttgacaatcgccctcccggtttctatcatgggactcaagccactatctgattgaaaggagaatccatgaaacgaaagattatggtgacggtattagctctggcggttctggccgggacggccgcggccgggacgaaggaattttggaagggcggaatctatgtgactccgcagatcggggtgaacagctggggagggagcatccccttcggcgtgaacgccgaatacggcctcacagagaacatcgggatcggcggatcggtcatgctcaacatgtggagcgaagaatactggtcgtccaccctcatcaacttcaacgccgacgtcgcctaccatttcaccaagctcaacgcggaaaagtttgatttgtacgccggaggcggcctcggctactccgcctattcctggaaatggaaagattcttccggcggcggaatcggcggcacgggcagctcgggcatctatatcccgattttcgtcggcgggcggtactattttaatccgaaaatggccgtcagcctgcgcctggtcggatccctgacggggcactggtccggattcggcggcgtgctcggggtgacgttcgtcctgggcaagtaagcggtccggacggatacgaccaagacaccgcgcccgcccgcggcgttccgcggcgcgcgggaaaggaaaaatcgtcatgaaaaaattcatcgcgggaatgttgatcatcgccgcgtccgccctgttcctgagcgcggacgtttacatcaagagcaattcccataccgacgccatgtcgatgatgggacagaccacgccggccaccgacaccgtctccgagctgtggatcggcgacaacgccctggccatggtcagccaggacggccggacggtgatcgacttggccaagaacaccttcgccatgatcaacatggccgaaaagtcctacgtcgaaacggcgcttccggttgatttcgccaagctcctgccggccgaaatggcctcgatggccgggatgttcgtcatgtcggcgaccgtgaatccgactggagagacgaaaaaggtcgggtcgtggaactgccagggctatgacatgaccatgacggtcatgggcatgcccatgaaaaccaagatttgggcctcgaccgaagtcgccttcgactgggcgaagttctccgaaagattcatgccggccatgacgaaagggatgatgcggctggacgacgcctcggtgaaggaaatgatgaagatcaagggctaccagatcgcctcggaagtgaacgccgagatgatgggggccaagatccactcgacgaccaccgtcgcggagatctccatgaaggccgcgccggccggaatctacgggatcccggcgggcttcaccaagaaggccacgctcagcatggacgacgtccagaaacggtaagatttctttcctctgcgtttcttcccgggcgccggaacggatgttccggcgcccggtttcccccccttcggccaaatcagaacctgtttaaccatttccccatttcccggccgatcgcggatccggcatggccggccgggcgccgaaggaaggatacggcgttcccggattttccggccggatcggcgtataatgcggaaggattccccatggatcaagtcaaccgcatcaatcccgtcgtcgagattctccgggcctccccgcggcggatcaacaagctgtttctccagaaagaagagggccatcgccccgtcggaacgatcgttggcttggcgaaggcaaaccgcattccctgcgtctttctcccaaaacaggctctcgacaaaatgtctccccatcatcagggcgtcgtggcggttctctctccgaaggaatatgtttccctcgaagagatcctcgcctccgccggtccgtccccattcctcgtccttctggatgagatcgaggatccccaaaacctgggggccgttctccggagcgccgagggcgcgggcgccgacggcatcgtcctgcccgagcgccgctcggccggcctgaccgagaccgtcttcgaggtgtcggccggagccctcgaacacctccgggtcgcccgcgtcccgaacctcgcccaaaccatggacgcgcttaaaaagcgcggcttttggcttgtcggggcggaaagcggcggcgacggccggtatttcgagttcgactacaccgtcgccgtggccgtcgtcctcggttcggagggaaaaggccttcggccccttatccgccggaaatgcgaccgggttctctccatcccgatgcgggggcgggttaattccctcaacgtcgcctcggccgcctcggtctttttcttcgagatcgcccgccagcggtcgaccccctcgggcgcgcttcgcccggaccgttgatgcgaaaaatcaataacattccgcggacggatcgtcgataacgccgttgtcacagggcgcggattccgatgcctcttcctccggagccgttccggcgcccggtctccgccttgacctttcctctctttggaattatcttttaaaaaagggggggcttgtccctcggaaaggagagactgatgaaaaccaacatgggggtggttgaccggctcgtccggatcgcggcggccgccgcgatcgtggtcctctactgcctggaagtgatcaacggagtttgggccgtcgttttgggaatcgtcgcggtcgttttcatcgtgacgagcttcattggattttgtcctctgtacgttcccttccggatttcaacgaaaaaaaagccgaagccgtccccctgagttcccgtctcgcgggccgggagcggcgggatctccgttccctgtcccgcgttataaagactttgcccaaaagggcatggtcttgccatttaagaacctgaccggagccgaggcttgacgagatcgttttgacctgaattccatgagctccctccggctgtgaagatccattctccgccctcctcagataaagaggagagcgtaaaaaaacgtccttttccttgtccagtcccggtaagatttttaaatggcaagatatatcacccttcggcaggattttagatggcgcgattcacgtccttgacaggcgttccggccggcttatagaatatctgggtatcatttccaattgcagagagctcaatgacgaaacccgaggatttctacacgcttgaaaaaccgatcgtcgccttgaaagaacagatcgacgccctggtcctggccggcgaacccggcttcaatgaaaaagcggccgctctgcgccttgagatcgaggccgaatggcggaaaatccagcccggcctgatcccgagtcagatcgttcaggtcgcccggcatcccaagcggccgatgaccctcgattacatcaaagccctgacaactgatttcatggagatgcacggggaccgccggttcgccgatgatccggccctggtcgccggactggccttctataaggggcggaccgtagccgtcatgggccatcagaagggccggacgacccgcgaacggctcgaccgcaacttcggccagatgaatcccgaggggtaccgcaaagcctatcgcatcttccgggaagcggaaaaattcggctttccaatcattactttcattgacacgcagggcgcttatcccggcatcggggccgaggagcggggccaggccgaggcgatcgcctacaacctgaaggtcatgtccgggctccgggtgccgatcatctgcctgatcatcggcgagggaggaagcggcggggcgctgggcatcggcgtcggcaaccggatcctcatgctcgaaaacgcctattattcggttatttcgcccgagggctgcgcggcgattctctggaaggaccaatcggccgtccgccaagccgctgaaaacctgcatatccgggcttccgacttgctggcgctcggcgtcatcgataaaatcatcccggagccgccgggcggcgcgcatatcgatccggagacggccttcaaaaacacggatcaagtcctccaccaaaccctgaccaagctccaagccaagaccgccgacgagctcgtcgaagagcgctacgccaagttccgcaagatgggggtctacgtcgtcccgtgagcgcggacccgactccgaaaaaggcgctcgcggccgtcaagggcacccacgacatccttcccggcgaggtcgaggtctggcaaaaagtcgaggccgaggtggcggcgcttttcggccggtacggctaccgggagctccgggcgccggtcatcgagccgaccgagctctttgagaaaggcaccggccggacgaccgacatcgttcagaaggagatgtacaccttcacggacaagggcgggaggtcgatcaccctccggccggagtacacgccgtcggtcgcccgggcgatcgtggagcaccggctcgacctgctggggacgccgatgcgctactactacatcggcccgatgttccgctatgacaagccccagaaaggccgctaccgccagttccaccagatcgacgccgaggttttcggggaaaaggacccggccgtcgacgccgagatcatcgaaatggccgacacgatgctccggatcctgggcgtgaccgggaccgaaacgctggtgaattcggtgggctgcaagacctgccggcccgcgtacgcccgggccctccggacccaggccgaaaaagtccgggacggcttgtgcgaggactgccggcgcaagatcgagaccaatcccctccgaattttcgactgcaaggtcgcctcctgccgggagttggccgcgtcttttcccgccatcccggaatttctctgttccgaatgccgggaccatttcgccggcgtccggaaaactctggatctttccggcgtttcctaccggttcgagcccgcgctcgtccgcggcctggattactacacgaaaaccgccttcgaggtcgttcaaacgggcgccggccagcagaatgccgtattgggcggaggccgctacgacgatatgatgaaggatttcggcggaccggatatctgcggcatcggtttcgcctgcggcgtcgagcgcttgatcgccctgctgaccctcaagcccgagccgcgccggttcgtttatatcgtccacgccggggacgcggccaaaacgaaggcggtcgagctggcccgccggttccgggccgagggcgtcgaaacgcttctcgaattcgccggccgcggattcaaaagccagttcggccgggccaacaagctcggcgcctcctgggttttaatcatcggcgaggacgagctggcccggggcgagttcctgctcaaggacatggccaccggatcgcagacatccggaacgcccgacgccctgatccaaacgctgctctaggcctccgcggccgcctcagccgccggggattattcgtcgcgcacggttttggtatagatgattttcgccgaggcgccgctttccaggtaataaaagtggatttcattcgcgccggcgatgtcggcgaaaaggtacccgtcctcatggtcgaccatatacagccgcttcgtgtccgcggcgatcacgccggagaagggctcggaaaacgtcccctggcggttggtccaagtccggacgcccgtgaagacgcggcctttctgttccttgatttcaaaaacggctttgacgggcgattcatcgttcattgtgaagcccgattcctcccagtgcatgtcccgttcgatccctttccagatcccgacaagccgaggaagcgcgtcgtccgccgccgggacggggggaacggcgaggccggcaagaaaaaggcatccggtcagaacgagggtgaatccgcgcattgaaatcctccttgtggaaatgcggcttgagcgggtccgccggtattaggaatcggccgcgctctttgatttcttatcataggcccggcggcgggaaagcgtcaagggactgaactagttcaggaaccgcccggtttttggacaatccgccggaaatcctcatgaacggaggcggaaaatcttccccggagcgaaatcccgatgagcgaagaatcggaacaggaagccgggaaacgaaatcctttccgccgtctcgcggaaggtggacgcgtccatcggtttggagggggcggcggttatttacgatcacggatccccggcgttggtttgccatgggccgatgaatggagtattttaagcggaacgaatcgaccgagaggtgatcatgttcaagcgatccgcgatcgtcctggccttgagcgtttttctttccgtctttccggcatcgccccagaataaaaaaatcgagtttgatcatcaagcggccttcggctacttgaaggatctcgccgccgacacgatgctcggccggaaaagcggcgagccgagcggactccgcgcggccgaatacatcgccgccaagctcaagtcctggggactcgagccggccggaccgaacaacggctatttccaggattttacgttcgagtcttatgatgtccaacggggcgcgtccctcgggatcgtcgcccacaaccggacgcgcgacttcgtctacggagaagattggatccaatcccgctactctggatcgggcctgttcggggcggacgtcgttttcgccggatacgggatttccgcgccggacaaggatttcgacgaatacgcggccgtcgacgtcaaggacaagctcgtcctcttttcgacggatacccccgtccggctgcgcgacgctctccgggaagaagcgaagctggagaaccgtatcaaggccgcccgaagccgcggggcgcggggcgtgctgcttttccggagcgatactcagcctctcgggaactacttccggggcggcctggacaaagaaatctatgatcccggattcgtcatcctttccgtggaacgcaagatcgtggatttcattttcaaatggcagaggggcgacccccgccacttttttcggcagattgaagaaaccggaaagccgcaatcgtacgacctggcggtccagtccctgatcaacatccaggttgatttcaatgaaaaggcgccgacccagaacgtcctggcgaagatctccgggacggatccgaagctcaagaacgaaatcgtcgtcatcggcgcccacatggatcatctcggcgtggacatgaccggcgacatcctcaacggcgccgatgacaacgcgtcggggacggccgtggtcatggaagccgcccgggtgatgaagctcaaccgcttcaagcccaagcggacgatcctcttcgctctttggggagcggaggaagagggccttttcggctcgaagcattactccgaaaatcccgttttccccctggatcaaaccgtggccaatatcaacctggatatggtgggccacggaaccgggaaggtcgaggcgtccggcgcttattacgccccggagatctatgagatcctgaaagcccgccttccccaagagatccgggacaacatgattttcacccggggcggcccgggcggctcggatcatacctatttcctttacaatggcgtgccggcgttctatctcgacacggacggccctcatttcaagacgaaccgcgtcggcgacgtcatcgcccacatcaagccggacatcatgcggaacgccggtttgttcgtcatggccgctctcgaaatcctgtcctgcgagcgggacgtcccgatcctcgccgggcgccgggaaatgttccattggcgctatcagacgatcttcaatcacgagaccccgcccctggagaaagtgatcggggagcaccaggattcgctggatcaggacgttgacttccaactggccgttgtttccgggaacgacggcttgaccggcgatgccttgaggatggatttgctgcggaaacttctcgacggcaaggaggcgatcgcccggtcgaaagggctcgtcctcttcgggaacgaaggggcgtcggagcgccgccggccgtggaaaacgaccgtagtccccggcctgcggggactggccgccatccgcgacgatcttcgctggacggaagcgttggccaagcagggcttcgccttcatcgtcctcgacgatcccggcgttcttttcggcggcgggggattgagcgaggaggggaaaaagattctcgaggccctggaaaagacgagtctcctgctgatcgccgacggcctggatgcctctcaatccgtcgccttgctggaaaacatcaagaagccggtctttttgcggaccggcgccgtccccggcgacgcggtcctcgacctggccaagaaaacgggatcgacgatcggcctggttctgggcaaggaggaactcgccgcttcctatgcggcgagagtccaggcggcgagccggcggatcggggcggaatatatttcgatcgtttccgagaggtgtctctgggggaaagccggccgggagcaaatgctcggcgtcatcgccggattgctcggggaaaaactcgagccggcggagatgacgaagctgttttccgcttcgttcctccgggtcttgaggccgccgggccggtaggcgccggcctggttttgttttgccgggggaggggcggagtccgctttccccggtttggacaacatgttgaaaatcttctagaatagcggcggaatacctccgataaggcgaaatcccgatgagcgaagaaacggaacacgcgtcctggaaacggacccattatgccggggccttgcggcccgcccacgaaggaagcgaggtcgtcctctgcggctgggttcagaagaccagggacatgggacatttgatcttcgtcgacatccgcgaccgcgagggcctggcccaggccgttttccaaaccgaccggccggagctgatggaagaagccaagcggctccggaacgaatcggtcgtcggggtgcgcggccgcgtccgccgccgctcggccgtcaacccggacctgccgacgggagaggtcgaggtcgaagcgtccgctctccgggtcttcgccccctccaagctcccgcccttcgcgatcgtcgacccgccccaggcctccgaggagctgcggttcaaataccggtatctcgacctgcgccggccgaagatgcagcgccagatccgtctccggcacgatgccgccctggccgtccgcaattatttgaaccggaacggctttctcgagatcgagacgccgatcctggccaatccgacgcccgagggcgcccgcgattacctcgtccccagccgcatatccaagggccggttctatgccctgccccagtcgccccagcagttcaagcaaaccctgatgatcgccggattcgaccgatatttccagatcgtccgctgcttccgggacgaggatctccgggccgaccgccagcccgaattcactcaaatcgacatcgagatgagcttccccgagcgggaggagtttttcgagctcaacgagggcttgatggaagcgatcttcgctctctccggacggacgatcggccgccccttcgcccggctgacctatgccgaggcgatggagaaatacggctcggacaagcccgacctccgcgtgccgctcgagatgagggacctgacggcggcggcccgcgacatcgcttccgatgtcatccgcggggccctggccgccggcgcggagcttaaaggcctgctcgtccccggggccgcctcgatgtcgcgcggccagctggacaagctgggtgagaaagccaaggcgctcggggccaagggcccgttctggatcaagaaacagaacggctggaaatcgtccctcaagctgtccgaggctgatttcgataaagtctgggcgtccctcggcggagcggaaaacgacctggccctgtttatcgccgatgcgaggctcgccgccctgaaggccctcggggagatccggcggacttggccgggcgatgaatcggcccggaaggaaatgctccggttcgtctgggtgacggatttccccctgtttgaatggagcgaggaggaacagcggcacgtctcgatgcaccacccgttcaccgcgccggcggccggggacctgccgcttctcgaaaccgacccggcccgggtccgggcccaggcctacgacctcgtcctcaacggcgtggaggtcggcgggggctccgtccggatccacgacagggacctccagcgccggatcttcaaggttctgggtctttccgaagccgagaccgaggagaaattcggttatttcctcgaagccctgagcttcggcgctccgccccacggcgggatcgccttcggcttcgatcggctggtgatgctcctggcgggcgaggagtccatccgcgaggtcattcctttcccgaagacgaccagcgccctggacctgatgacaggctcgccctcggccgtcgacgagcgccagctctccgatttgggattgaagataaagtgaccggtctttccaggaccggccgaacgtctttgccgaggatcatcgcataatgaccaaagaggatgcgcggcgcttcatgagccggagggagtttctggcgggcgggctggcggccttcgccggcctgccgatgctcggcaaaaccgggttcgccgcccggcccgggaccgcgcccgccggcttggacgagaagatcggccagatgatcatggtcggttttcgcgggctgaccctcgaggcggataatcccgtcatcgccgacatccgcgaccggaaaatcggcggggtcgttcttttcgactatgatgttccgtcccaaaatcccgtccgtaacatcgcctcccccgaacaggtcggggccctgatcgcttccctgcaggaaacggcggcgacgccgcttttcatcgccgtcgaccaggaaggcggccgggtctcgcggctcaaggaaaagtacggcttcccggcgacggtttcccaaaaacatctcggcggcctggatgacgcggctgtcacccgcgcctgcgccgaggcggaggcggccgtcctggccgaggccggattcaacctcaacttcgctccggtcgtcgatctcgacgtcaatccggaaaatcccgtgatcggcggcctcgagcggagcttttcggccgatccggccgtcgtcgtcaggcatgcccgcgaggtcatccaggcgtatcatcgcgccggcgtcctcacgaccttgaagcatttccccggccacggcagctcgaaaaacgattcccacctggggttcacggacgtcaccggcacctggtcgaaaagggagctggagccctacgcggaaatcatcggagaagggctttgcgacgcggtcatgacggcccatgttttcaacgccgaaatcgatccgcgatatccggcgacgctttcccggccggcgatccagggcttgctccgagaggggatgggctacgacggcctcgccgtttccgacgacatgcaaatgaaggcggtttcggcgaacttcggcttgaaggaagcggtcatccgggccgtggacgccggcctcgacatcctgatcttcgccaacaattcggtcttcgatccggagatcgccgcggccgccgccggcatcctcaagggggccgcggccgccggggtgatcccggaagcccgcttcgaccgttcctatgaacggatcatgcgcctcaagcggagaatgcgtcgttgacgttcgatcgcctcgtcccatcccctatcctctttttcggcgcggcctgtttggtccggtggagcgaaggcccgcctccggaagccccttttaccgttctcactttgatcgtcatgatcgtcccgatctccgacgtcgccattctttcccgggatgcgttgaacgcggcatgaaagccgcggcggaggccgtccctgtcgtctttcccgttctttatgtccggccatcgcctccgtgcatccgcctccccgggaggagggcggcatcgggcgcgtcatgccgggcgtcccggctccgatggctcagactgatcacgcttctccccttgattcgcggccgcgaaaggccggggctaaacggacgagggaacgtgcggaacatccctggcggaggcggcgggatttcattataatttttccgcgaggccggctcgcggatcggaaatgaaaaggattcgttcgcggatcgtcgtttttttggccgtctcctttttttccgccttcggcccgccggccgcatcctcggaggaatcggccggcgtcctttccggtttcgtcctcgattacgagtcgcggcgcggactcgcggacgttcgagtgatccttccggcgggcgaaggtcccggccggactgaacgctccgcggtcaccggcaagggcggagcgttcgagttccgcggccttccggctggcgtctattcctgtctcttcgatcggagcggctacgccccccgggccgtggagggactccgggtggatccggcggttccggtccgcctggacgtggagatggtccgccttcccggcccgctccgcgaggaggtaacggtgacggccgaggccgggccgagccgtatcgagcggacggcgggggccgtgtcggtcgaaggagagcgcctccgccaaacgcccggttcggtcgacgacgtcagccgcgtcctcaaggccacggccggcatctcccaagtcaacgacaccagcaacgagctgatcgtccgcggcggcagcccctgggaaaacgccttctacgtcgatcagattccgttttacgacatcaaccatttccaggtgcagggcggcagcggaggcctgatcggcgtgattaacgcctcctgggtccggtcgctcaatttcttcaagggcgggtttcacgcggcctacggcgaccggatgtcctcggttatcgagatggtcttccgagagggcgaccgcgaacgcgtccaggctcaagtggacatcaacaccgccggtttcggcggcggagtggaggggccgatcctcggcggccggggctcgttcctagtctcggcgaaacggagctatcacgacctcgtcacgaaaatcatcggctacggcgtcgccccgcgcttcggcgacgtccacttcaaggccgtgctcgacctcggcccccgccaccggctcgagctgctcgatgtgaacgccgacagccgcttgtcctatgacgccgaggaagcggtggccatgggcttcacccgggcgctcaactataaaaaccgccagaacacggccgggctgtgctggtacgccggctggagcgattcctactccacggtgacgaccctctcctggtcgcgctaccgcaacgccgacgagctcttggactcggtcaccgattcggcggcctttctcttcgacgaaacgacggacatcatcggcctccgccacgtcggagggctcgttctctccgggcggctccgggcttcgctcggattcgaggccaaggccgagatttacgatttcaacaactattacggcgcctacgtcgatccgtacgcctcgctcattcccccggtcctggcccggggggacttgacggtcgccaagggcgcggttttcgccggcctggactggcggccggcccccccgttgaccgtatccctgggagcccggctcgacgtcctttcccacaaccggacggccgaggtttcccctcggctttcggctgcctgggcggtcagtccacgcctgaccctcaaggccgcggccgggatcttccgccaagcggttccgacggccatccttggaatcacgccggccgtccgcgacaaccgcaatccggcggccgcccatttccttttcggcgtctcccacgacgtctcgaaggacttccgctggaccctggatgtctacgacaagcagtaccgccgtctgccggtgactcccgaggacccggaattttccgtcttcgacctctgccttgattacggcgtgtaccgttcgttcacgacggtgaccgacgacggtcaagccgccgcccggggtttggaaatcacggcggaaaagaagcccggcggaacgtggcatctcttcgccggagcgagcctgttccggtcccggttccgcgacgccctgggccgctggcgcgaccggttgaacgacaaccggtatgttctgaccatgatcggaggcgtccggatcgcccggaaatggaatctcggcctgcgctgggatctggccggcggcgttccgtacacgccttatgacatcgcccggtcgacggccctgaacgccgccgtcctcgacgtcacccggctcgattcgacccgttacccggattacagctcggtgagcctgcgggcggaccgggagttccggttccggacatccgttctcttggcctacctcagcgtcgtcaatctcctggaccgggaaaacatcgcccgctattactggaaccgggtcgaaaacaggcaggacatcgtcccgcaggcgccgatcctcccggtcttcgggctcgaataccggttctgatccgcccggttcaaggacggcgcgtttcggcgaagagcgcgcctccgagaccaaggacgccgaacagcagcatcagtgtgactcccgacttggccgcggccaagaccgggggaacgttttccgcggcggcggccgcgccgaaaaacggggcgagggccgcgatatgggaggcgaggccggcgaacgccccgagaagcgcgccgccggtcattccccgaaggacgcgcgccccgatttgaaagccggaggccgcccgggcgatcgccgccccggccagcaccggcacccagaccgccaagccccaggtccggttgaacgacggcgcccccccggcgacggccgcgaagccggcccccaggccgcccaggacgacggccgcagccagggcgaggagcggcgtcgtccaggattttttcggctccccggcccgcctttccgcccgcgtcctgatcctccggcgcagggtcagcgggaaattgtagaacgcgtcaaaaacgaaatgctccagccaggcgcctttctcgccgaacaccggaacccggtggacggcctcgttggcccaatggccggccatgaaccgggccaggtcgggataccggtatgtcatctggatcgggaacgccaagtagccgaagaccttgagaaaactgaccccgagggcgatgttgtagtccttgaagttccgctccttgatcatcaggccgacgacgtagaatccccggaccaaggatcccggcgaaaccggcaggaggttcaaggcgccgatgatgagcccggcgcggagcgtcgccgcctgccaggtcaattccggatgggccaggacgtagacgactgccgctacgagaaagacggtttccgagacgaacagggtggcggcatggacggccaggctcttgagatatttctggatgtacggctccttgacctgggccttgatgcgctcaacctcgggagccgtcagaaggccgtttttcccgccctggtcgatcatcccgatcatccagcgctcccgctcggccggccggacgagaagccgcgcgggctggataaaaagggcccggatccgttccttgaagtaagccttctcggtcaaaaaacggtggaagccgggcggcaagagggaaaacggcagctgagcgtaataccgccagggagcggaggagatgttctgggcgcgctcctcggaggcccggcccgtccggacccagcggatcatcgcctcggcgatccgggcccgccccgcccgcaggatgtagcggggactcgtgagcatccggccgcaatggcggcgaaaatcgtcccggccccagatttttcggacgagcggagtcagaatgagcggaagaagccagagcggatacttccaccaaatccgccccggccaggcgaaaacaaacaagagcggcgaagccagggccagtcccggcgctccgaggaaaagaagggagaggactccgcttttcgccaagacggaggccgtccggtcgtcggtgatgttccggacccgccagctctcgcggaatccggccatgatccgccggcggaggcggccggaaaacagccggacatgatgatgcgtccaatcgacaagggaatcgcggtaggccgcgtcttcccgcttcagttcctccagggccggccgaagatcggcgaagtcgccggcgtgttctccggcgaaacgctcgagcttccgaagatcgcccttgtcgaattggacgagccggccccgcccgagcccccggagaatgagcttgaaatcgacggggcactgcgggttgaggggcgtcaaggccatccccgcccggaaatcgacggcggtcagcccggccctcgggtcgggatcggaggcgatccttttcatggcattgggctggcttttcaacgatccccattcgtactggcgggccagctcctccgctcccatccgccgcatcatcgccgtcagccgtttcatgaattcacgcttcgtccggtattccggggacccgatcccgtcctccggatcgccgggcttccaacggcgccgggaatcgaggtcgtcatcgatttcaaaccgccacattcggccgtccacccattcgccgagctcgccgtagctgccgagcctctcgtcgcggaaggtgccgatgacgtcggccacagcgtcgtcgcggccgaactccacccgggcggcccggcggatgaatttctgccagagggcttgggagcggccggccgcggccagcgactggagcgaaaacggggcctgaaagccgaagccgtagaaaaagttccggacgcgggcggcgaagcgcgacggaggaatcaggattttcagggcgtaggtccgcccggcttccagcccttccacttggtcctcgaccgggacgatcgaccgcgccgcgacctggtagacctggccggcgaagccgcccccggcgaacttgaggatttccaaggaaacgcgggcccgggcggccggccaaacgccgcggagttcgtattctaagaccgttcccggctcatagcgctgccggcggaggggccgaaggacgccctgggcggcgtacgccgcctccataaagcggatcgtcttgggcgcgtattcgggaggcatgaacgtcccgtttcgaaccccctatttcacgtcggcggccgcagcgttcaacaccttcttcgtttgcttgtcttgggcgaaaacgatgacccggagcccttcccggccgatacggttccggcggtcggcgaacttgtaattggggatccggtcgtaggttttctcaaattccgtgagataggcgtccgtcgtctgctcggaagcggccaggtcgaagaccacccggggattttccggggagaccgcctggaaatcccggacgaccattttatggaaaacgatgccgttgccccccttgaaccggacttccttttcgacgagggcggcgaacgtctcggccccggccgcgtttttttcggcgttcacgtcgaccgcgacttcgtcgccgtcgcggacggccttgaccgtaaaggagaccgccggctcttccttcaaaagggatttgatctcggccagatattccttgtactttccctccgcgccggcccggccgccgccgccggacgccttccgcgcgccgtcaaagaacgtggacggcgtgctgttgaccccgtaatactgctggcgggcccgggtcgccggattgatcatcgggtcagggcggggaatcggaagatgatattccagaatcgccaggtgcgtctcggggacggattcgatgagtccgtcgaacccgaggtcggctccggcgcagggcgggcattctgaaccggtgaagatctcggccaggaccgtcttgcctttccaatcagcgggaacggcgaacgcttccggatggaagggcaatgccctttgtcgggtttccaacgcggcctcgaatccctccggtgttcccttgaccgtcgcccacagatcccgggctttcgcctcggcgtcgcggtagttttcgacggccgcggccaaataaccgcccagggcgtcctcgttctttccgagcttcaccgaggcttcggcggacgcataggaataagcgtcgtcttccgcgccgccggccgaccggtaaaccttcaagaaatcgagggcccggctcggttcaccggcgttgacgcaggccaaggcggcgacgacattgatgttgttgccgtattcgaataaatagggacgctcctcctccggcaccgagcggataaaggcctcctccttgaggagccggtccgctccgtcccggtaggaaacgacggcctgaacgacgccggccgcgtcgaagcgggccaggttgggatggtggaggatatccatggccgcggcgaagtacgagtagatccggtcgaatccctcgccctgccccacgaccgttttttgaagggccaggacttcgtccagggcggcgcacattttgactttggtgacgaggatcgcttcctcgagcatcggcctcagcgggctctggggataggcggccttgatgcgctcgagctctttcaagcgggcggcaaggtccgaaatattctgggcggccatgatttcccggtattccgggggccgctgggactgcggggcggcgagggccgcggccgttcccaggatcaaggcgacggcggccagggcgaaaaagattcgttttccgtgcatgcgggtctccttttcaaggatatcagtatatcagaaaacgcggggagtccaccggccgcggcggcgcgtccttgactttccccccttggcgctttatggtgtcgatccaaaccatcccaccgacggaggaatcgcatgaatttaaaaatagaacaccatcgccgcttcggccttgccgcggctttcctgttgggaacggccgtcgtcctcggggtcgcggccgcgggagcggacattctgtccacgctccgcctgagcgaagcggccgccaaggaaggaatcctcgaaggattgttgaccggctctccttacgatcagaaggctttcgccgccttcaaggcccttcctccctccgcccgggccgaggccgtccgcggggggctcgcctggatcaagacgtattccgagtcgcccgcctttaaagccgcctacgccgatttccggagcgagcagaagccgggccctcccgacaaggtcatctcggccgatgaatcgctgaaacagcagaaggccaattttgaaaagcaggtcgccgagatgcaggaaaacctggccggcctcgatgcggaaacgagaaaggcggtggaggagggcatcaagcaaatgcgggcccggatggaggagatggaaaaggaccccgggcagatggccctgatgcgccagggcaaggagatggagagcggggaaaacgccgagcaatacgccgagcagctcaagtcttgggaggaggaatacccggcggacgtccgcggtctgatcaagagaagaatccgggaattcctagatacgagcgccggggtggatttctcggccaagttagtcaagaggaagtcgaggatgtattttgccgacgaagcttatgaagacaagccctccgattggaagatctgcttccgggcgggaaaggaagcgacccaggcggcccgggagttcgcggccgcttggctggccgagctcgagaaataacaagcggatcgccgcccgaaagcgatccggaggaggcggggatgccgggcatctatccggaaatgattatgggattgccggagatcgagactcccctcgccgggatccgcggccgcctgatccagggggagctgacccaagcggttttcttcgacatcgccgccggctccaaggtcccgccgcatgcccactgcgcccaatggggcttgatgatcgagggtgaaatgatcctgaccatcggggaggagaccaagacgtatcgaaaaggagaccggtatttcattcccggaggcgccgtccactcggccgccttcctcacccgggtgttcgtcctcgacgttttcgacgatccggcccggtacagggccaaatccgctccggcggatgccgggaaggaataatcggcggggcgcgcatcttcaaccgaagcggccggtgatgtaatcctcggtccgcttgtcggacggccgggtgaaaatctccgccgtccggccgaactccaccagctcgcccagaagcatgaagcccgtctcgtcggagacccgggcggcctgctgcatgttgtgggttacgatgacgatcgtgtagcgctccttgagccggcgcatcagctcctcgactttcgccgtggccatcgggtcgagggtcgagcaaggctcgtccatgaggaggacctcggcttcgaccgcgacgaggcgggcgatgcacaaccgctgcttctgttcgagcgagagggacagggcgtttttcttgagccggtccttgagctcgtcccagaggttgaccgcccggaggctctcttcaacccttcgatccagatcgccgccggcggccaggcggtgcacccgggggccgaaggcgatattctcgaagacgctcaaggggaagggattgggccgctggaagaccatcccgacctttttccgcaggacggtcagggagcagtccttccggcggatgtccttcccgttgaacaggatttccccttcgatccgggcgccctcgaccaggtcgttcatccggttgaggctgcgcagaagggtggacttcccgcagccggaggagccgatcaaggccgtgatcgcccgcggcttgaaagagacggaaacgttcgacagggcttggaaatccccgtaccagaggttaaggccgcggacctcgaggacaggcgggagaggccggggatcgatcgcctttttcacggcctcacccgaaccttccgatgatataatcctcggtccgcttgtccgccggcgcggtgaagaggcggctggtcgggccgacctcgatcatttcacccatcaagaaaaacgccgtccgcgtcccgacgcgggcggcttgtttcgtgttgttcgtcaccaggacgagcgtgtggctttggcggagactgagcatcgactcctcgaccttggccgtggagatcggatccaagccggagcatggctcgtcgtagaggatcacgtcgggcttgagggccagggttcgggcgatgcacagccgctgctgctgtccgccggagagcttctggccgggcatgttcagccggtccttgacctcctcccaaagataagcggcccggaggctttcctcgatcaggccgtcgagcatcgcggcgtcccggacgccggccatccggggtccgtaggtgatgttatcccgaatggagagcggcaaggggacgggcatggcgaagatcatcccgatgcgcttccgcacggcctcggccgacatgtcccggacgacgtccgctccgtccaggagaacggtcccggccgtccgggcgcggggattcaattcgttcatcctgttcaagctgcggaggaaggaggtcttgccggagttggaaggaccgatgatgctgaggatttcgccggaggcgatgtccaggtccaagcctttcagggcggcggcggctccgtaggagaccgagaggccgcgaacggaaactttgaccgtcccggcgggggcgctcatttcttcctcgaggctctcgaccggacgacggtcgcgatgacgttcatgatcaggacaatcccgatcaggacgagggccgtgccgtagcggaagctttcgggaatgcccgggatctgggtggtgatgacgtagagatggtagggcaaagccatcgcctggtcggacaggcccgtcgggaggttgggcaggtagaaggcggccacggtgaagaggataggggccgtctccccggcgacccggccgacgctgaggatcgccccggtcaagatgccggacagggcccgagggagaaccgcgtgccggacggtctgccatcgcgaggcgcccagggagaagctgacctcgcgataagcgtccgggaccgaccggagggcctcccgggtcgtggtgatgatgacgggcagggccatgatcccgagggtcagagctccggagatgatggaaacgccgaacttcaggaaaacgacgaacaggctcaagccgaaaaggccgaaaacaaccgaagacactccagccaggttgatgatcgccaggttgatgatccgggtcagaagattgtccttggcgtattcggtgaggtagatggcggccatcaccccgatcggcagggcgaaggccagggagatgaacacgaggtagacggttccgatgatcgccggaaagatccccccggcccgcatcccgtcccggggcatcgagaacaagaattcccaggacagcgctccccatcccttggcgatgaccagggcgacgatggcggcgacggggatgacgacaagcagggtggccaacagcaagacgccgaagccgattttctggccgcggagctcgcgtctcatttcttccggccccggttgaggagaagatcggcggtcaggttgatggcgaaggagatgatgaacaggacgatgccgacggcgaacagggcgaagtagtgaggactgcccttggccgcctcgcccatctcggcggcgatcgtcgcggtcagcgtccggacgggctcgaagagggaatgggggatgacggccgcgttcccggtgaccatcatcacggccatcgtctcgccgaagacccggccgatgccgagcatggccgcggcgatgatgcccgggagggccccgtggatgatgacccggtggagcgtctgccaatgggtcgccccgagggccaaggctccgtcccggtactcgcgggggacggcgttgatcgcgtcctcggagatggtgatgatcgtcggcagggccatgaaagcgagcatcagggatccggagaaagcggttaacccggtcggcaggttgaggaggctcttcaggaaaggaacgaggacggtgatgccgatgaagccgaggacgacggaggggatggccgaaaggacttcgacgaaggacttgagtatcgcccggaggcgcttgggagcgacctcggcgatgtagaacgcagcggcgatgccgagggggacggcgatcacaaccgccccggctgtgacgagcagcgatccgaggatcaagggcaggatgccgagccggggcggagcggagatgggataccaaagatgcccgccgagaaattcgcccggcgacgccgttttcaggacggaaacgccttcccggagcaggaagacgaaaatcagaagaacgaagacgatcgaggcgatcccgctgagaaagatgagacgctcgatcacgaactcgcggagccggcgcggggagagcttcatcggacgggcacaaaatcggtcgcccggacgatttcctggccttccggcgacaagacgaaatcgaggatgtccttgaccgtcccggacggtccgccccgggtgaaaaagtaaagcggccgggagatcgggtaggcgccggatcggacggtctcgatcgtcggcgagacggccggggagcggtcatcccgggacacggagaggaccttttgccgcggactgatatagccgaggccgtaatatccgatcgcgttttcgtttctggccgtttcctcggcgatggcgtaagacgaaggcatcatcagggccgccggggcgaattcctccggtcccttgctttttccccggcggaggacgtgctccttgaagaaaatgtgggttccggagttgacctcccgggagaggaggacgatcggccggttctcgcctccgaacgcgctccagcgcttgacgttacccatgaaaatctcgcggagctggtccatcgtcagggcggagacgggattcgagggatgaacgaccacgacgattccgtcgagggcgacgatcgtttcatgaacgaccatgccggccgtttcggcctgctggatttccttctcctcgagatcccgggacgactcggcgatgtcgcaggtgccgttcaggatggcggcgatgcccgtccccgagccgcctccggtgacggccacgttgatttcgggatggagcgtgttgaaagcctcggcccaagcttggccgaggttgaccatggtgtccgagcctttgatttggagggcggccgctccgcctgagccggttttcttcccgccgcaaaaaacagcggaaaggacaagcgcgcccgcggccaggaaggccgcgagcgtcttccagaccggaacctgcgcctccttcctctccacagacttctcctttggaaataattacgggatagtgaaattcattataaaaagggggggggatcctgtcaagaaaaccgcccggccccctcctcagaccgtcttccttcccgaaaaattcacgggatgcacatcgccgcttcatgaacgcggggcatcctgactcttgccaagcggcccggaatgtccgaaaatggccgcggagggacttatggaacgcgtgtttgacgaggagctgcaattcctcaaggagaagattctgcggatggccgccttggttgaggacgccctgtccttggccatcgacgctctcaaggagcagaaggaagagccggcccgggccgttctgaaaaacgaggaaaacatcaatgtcctcgacgtcgaggtggatgagatctgcatgcggcttctggccctccgccagcccatggccggggatctgcggttcatcaccgccggaatgaaaatcggaagcgacctggagcggatgggagacctggccgtcaacgtcgccgaactggccctggatctcgcccgtctccccctcctcaagcccttgatcgacatcccccggatgtccctcttggcccaggcgatggtccgagacgcgatcgaagcgttcatcaaccgggacgacgccctgggccgggacgtctgcctccgggacgacgaagtcgacgccctggacgatcagattttccgggagctcctgaccttcatgatggaggatccccacaatatcaggcgggcggtggccttgatcctcgtcagccggaacctggaacggatcgccgaccacgccaccaacatcgccgaggatgtcatctatatggtccggggcaaaacgatcaagcatcacatcgagaaaaacgggattccgagatcgacggaaaatcaggcttgattttttctttttctttccctataatacaaccaatgttttcttgtgccggctggagaaaacttttatccttcctaataccaatattttcccttttctgctgttaaacacagccggcattctcccccttcgattccgcggacgggagaggcctgtccgccccggagacgccttccgatgacatcgttgatggctctccgccggggaggcttgggcgatctcctggtcgtcttgccggccgtccgccttctgaggatgacgctgcccgaagcccggatcacgcttgtcgcccggccgatcttcgggcgtttgtttcttgattccgggatcgtggacgcggtcgccgacgcggatgatttccgctgggcggctctggccggagcggacggcctctcggagcgcttcaagccggatccggcggaaatcgatttggccgccggctggtttcattcgccgtcggcggcggttttcgagcggagcgcggcaggactatggccgggagcagggattttgactgtttccgccgatccgggcaccggccgtccgctctccgtttcgttttttgaggggacggcggcgggtctgaggaatttgggacttccctccgcgccttttgaatcctgcgccttccttccccggccgcggagtccggaacggatttcggctccccgccggccttacgccgtcgttcacccgggagcgggaagccgcctcaagcgctggccgggcggtcgtttccggcaggccgtcgggtcgctggcggcctcgggactttccggggccgtggtcctgggcgaggccgagtcgttcttgaaggtccaatggaccgccggcgtcctccccccgggatggcttcttctcgaccggccggccgtgccggagctcgccgctctcctttccgaagcttcgctctatctgggcaacgattccggcgtgacccatctggcggccgtcctcggcgttccgggagcggcggtctttcgggaagaattcgccggggcctggcggcccggcggaaaaatcacgcaggtttcagccgccgacgtgcgcgacatccccgtcgaggcggtgctttcgtcgcttgatttgccggccggccggacttaaaataaacacagattctcctttgccggctggggagagttccctcatcatcatcacccccttttgctgatcagccggctttccttcccgcgatggaccatccttccgcgccggcgagagcctcttctgacgcgcggatgccgtttatggcataataaacgagagggcttgctggaacggcccgggcgaggacaggatgagcgatgaagccgcgtcggcgaatctgagcgtttcggccgaaatgagcgagatcgaccggcttcgggactttctcaaagaccggctccggggcgtccggatatccggagacgatttgttccgcctcgacctggccctttttgaaatcctggtcaacatcgtccgctacgggtatcccgacggggccggcgagatccgtttggacatccgggtccagccggacgaaatccggctggaaatccgggatcatggaatcccattcgatccccaggcggttccgccgccggccatggacgaaatcctctccggcagaaaaaaaggcgggttggggattcacctggtccgcaacctcaccgatggaatgatgtatcggcgcgaaggccccgagaatgtcctggtccttcgcaagtccatctccggagagtgagggctctactcccgaacggcggcctttttccgccggtgctcccgggcgatcagaacgcaaagaagaatccagaggcttactccggccgcgttgatcgcggcgaatccctcgatcgagaaagacagggcggccgtccccgcccagacgactccggcgcagagggcgtcgccggcccggacgaagaacgtctcaatggctgcttgggctttgtacttctcttcccggcgggtaacgagaaacagggccgagcgggtcgttttcatcagggagtaatccgtcccgttctcgacggccttgatccacttgaggaggacgagcgaggcgccgaaggcggcgtagccgtatccccccagggcgatgaccgggaggaagagcagcgccccggccacgcccacccagcggaagatgcgggagacgaggacaagctggattcccaggccgatggtgttgcccagagactggtacccggcgaacgccgtgccgatcgcgttctggagggcgatgccgccggtggccgccgttcccagctcccgcagggccattttctgctgcagatcggagaacatgaattcgccgagggcgttgatgaaattgtacaagccgatcatcagggcgatgtacagaagatagcggcttttgaaaatcaagcggaatccgccgctgggaagaaggggcgaggctttggattccgcgggccggccggtcccctcccggtcctcccgcagatcgaggcggtggatggcccaggagaggaggattgtgaatcccaaaattccggccgtcgtcaggatcatcccgtacgatccgaaaacggggatgagcttgcgggcgacgagcgggccgctgactccgccgagcgaggccccgagggcgatcaggggaaagatccgcttcccttgttcctcatcgtagatgtcgttggcgaaaccccagaattgggccggaatcatctggttgtacatcccgatccagatgaagaaagcgatcccgaggatcgagaccggaaccccaacgagattcagaaggtcgaagatcaacaagttcgagatgcaaaacagggtcacccaggtgatcaggaggtgacggggaactttggaggacagcttggcgaatccccaaatcacgaaaaccaggagaacggcttgggggatggccaggtagctcttgaccgaggccgaatgggcggcgagaagaaggccctcgcggacggctttgatctggtaatagccgaaaatgatgagaaaactgttcagggtcagaaggagagctttggtcagctcctccgggcggacgaacgtcaggatccggaggacccgggcggcggcttgggcggccgccggagccgccgtcccggacggatcctcggcgtccttcatggggagagctcagctcttcggggatttcctttcgaaaagaacggccgcttccccctgctcccggatcaggccgcggatgattccggcgacgcgccgggaccggatgaagagggccgcgatttcgtccggctgaagaaaagcgccaaggcgggaggtgagcgcggccagggtcagcgattcgaggcggtggaaaagggagcgggagcagcggtgaaaaacgcaggaggcgggaagctccgtcccgggccgaaacgcttcggaaaaatcgacccggcagatcttccagctgtccacatgaaccagggtgtcgtccttgtcgccgcattcgtcggcggccaggaattcgaagacttggacgtcggccagctcatcaagaaaattggtccggacgggcggctcttccctcagccgttcccggtcccgcaggctccggcagttttccaagtaccattgaaggctgccccgcgttccttcgatttcgcgctcgaccacgggcgggatgatctccagttcgagaaggcggctgagggcgtaggccgccagctcgtaacgatagctgtgccgggtcggcagggccgtccgccggtcgatgtacttgaaaagggcccgtccccggatccgtccatcgtcgagtgtcaaccgccagggcatcgtccgtcccggctcgacgtccttttcgacgacgacgacgggcgccgacgccaagtaggattcgatcgcctcgatcttgttcatcgacggctcctcttgggagaccgccgcggcgacgaacagccagagaacggcgcccccgatgaaaagcaaaagactccttcctcgcgtgctcattgtctcacctctccggccggccgaaggacggggaccatctccatccgatcgccggtgatgactaaaacggcttcgtgtccaccgtcgttgatccagaggcccgtatcgatgacccagatttttcctccgaggcggctgacggatccggagagggccgcggtcgtcggcgaatggccgatgacgatcgcccgggctccgagattggccaggatccggtccgtttcctcccggatcgtctcttcatccttgatggccaggtcgcggtaccacaacggcccgtccgtccggtacatccaaacccactcgaatttctcccgggcgaaataccgttcgaattcacgggccgtttcggcgttgatcagctcgcaggacagggcggagagaggctcggtcaggccgccgtggacgaagacgatgtcgttgatcttgaggacgatcgggcgccgggccagccagcgtccgtagttgtcgttaaagtaccggctgtaagtgttccgggcttggaaatttccctcgatgaagcgttcccatgccgggatgttctccggacccgtcagcgcttccgtctgcttccggtagcggctccagacggggagaaacgaccggaactgctcggcggtgacgtatcctttgatgtcgaaggacagcccgaggatgttcatctcctcgtggttgccgaggagcatgtggaaggcgccgccggcttcgcgggcttcgtcctccaagcgccggatgaggtcgaggatccttcgggcgtcgggcccgcggtccatgacatcgcccatctggacgacatgcgtcttgccggcggcccaatggagacggtcgtcgatgatgttcaggtccgtcaggatccggacgaacggagcataggcgccgtgcaggtccccgatggccacgattttcccgaccccggtgaaaacgcaggggaccggcggaacggcggcggtcgcaggccggcccggcggaagaagaacgaggagacaaaggaaggcgaaagcggcgaaaaaccgatccctccggcgtcctcggcgaatgaattttcgaggcacgatggagccctccccgctttccctactatgcccctgaggggataaggagtcaagaaaaaaggcggcggcggcgtttgacatcatcccccgcttccgataatgtaaaggaaaaagacgaggcgatccgatggtcatcaccaaacgcgaaaaaggcggcgtcgtcatcttggacctggaaggggaaatccgccggtcggatacggccggcgtttccgtgcatcagcacgtcaaggaacagctggaagccggaaaacgcgatcttctcctgaatttcgggaacgtcccgttcatcgacagcttcgggatcggcgagatcttggccagttatatatccacccagaacagcggcggccgcttgaaattgaccgggatctccaagcgtctcttcctggtttttcaagtgacccagttgacgcgcgtcctcgacatcctggacagcgaggagaaagccctggagagctttctgaaaagctgacctggattcccgggaggccccgccgatgaacggccgcttgcgcccggtcctcaaccgtgtttcccccgtccggccgggagaagagcgcctggccggtttcctctgcgcccattttttcttcctgatggccgccatctacgtctccaaggtttccaagacgtcccttttcttgggcctgggcttgacgaagacgtcgcttcccctcgtgtatttcatctcggccgtcctctcgggtcttttcgccgcctggaacacgaaaaaaatccgggcgctggaccggcgggcgtatatcgcctggagccagctttttttcgccgtcgggacggtcgccttctggctgcttttcggtctcggcgggcgccttgtccctgccctttactggttctggttcgaactcttcgtcctggcctccgtctctcagttttgggtcgtggtcgggtcgatctgtgaaccgaggcgggccaagcagctggttggctttttcgtgggcggcggcttggcgggcgggatcgccggctccgtcctggtcgttcttctatccagccgcctgccggcccgccacctgatcctcctcgggcttgtcttttacctgatcgccatgactttcatccgggcggcgctccggtccgcgcccggacgcgaagaagaactcggagcgggccccgtcaattatagcgatggtttccggacgctggcggccagcccctatcttcgccttctttcgggcttgatcatcgtcgccctggccgcctcgacgatgatcgattttcagttcaattgggcggtcaagaacgcttttccgctcgaggcgcgccggaccgacttcctggcggctttctccgtcggcgtgctcgtcgtctcgtggatcttgaattccgttttcgcccatcgggcgatccaggccttgggagtccgggcggcgctgttcgtgacgcccctgatcctggcccttggctcggccgccgtttttatcattcccgcggccggcatcacggcctgggcggtcctggtcaaggggtccgacaaagccttaacccataccttctttcaagcgaccaagcagctcctgtatcttccgctgcccgaggaggtcaaggtcaaggccaagatgacgatcgatatctttgtcagcaaatgcggagaggcgctggccagccttctccaggtcgtcttcgccgttattctggcgttcgacgcggcccggatgagcttcgtgacaatcgggatcatcggtctttggctggtgatcctcgtccggatcggccgcaactacctgccggcgatccgggccaacctcgtcccttcgcggcccgacgccgagcggctcgtccgggaacaagcccgggcggacacggccaagaggcttgtcgaccttttggaaagccgggagcggagctccgtcctctacgcctacaacctgttcgacctcttgaaggcggaacgaatgacgcccgagctgaggcagattctttcggaaaaatcggccgccgtccgggcgtccgccttggatacgctcttggacttggacagcgagatgctcggaccggaatgggcggaaggggaggacccggccgccctcgatgtcatcgttcgggaagtcctggcccttgattcctatcaggacgtcatgcgccggccgttcggcgaagtcgcggcctccgcctcgcccgcccgcgaagtcgaccagatggagctggccaaggttctcggcctgatgcccgccggcgcgcctctgaccgattatctgccgcggttgctgaagcatgaatcccccggcgtcgtccattacgccctggagagcgcggcccgcttgaagaagcgcgactggcttcccctgatcgtcccccatctcggccatcccgccgtccgcgaccgggcggcggaaaccctggaagcttacggcgatcgagccgtgcccgaccttcgggattggatggcggacttccgggccgatcttcacgtccgccgatccgtgcccggcgttttggcctccatcggcacatcccgggcggccgaggcgctggttcgccaattgcgccgtcgggatccggacgtcgccgaggccgtcatcgaagctcttttcaaattccgggaccgccgggccggccaccgtttccgggagcgcgacatcaagcccgagatccttcacttcgtccgggaagcctgccgggcggccgcggccgggacgagcgggaaggacgaaggggaaatccgggcgtcgcccgccgccgggtaccgccagatctttctccttctgggactcctgtatccgccggaggacgtgggccgggcccttcagaattatgccgagggcacgaagtgggccgtggattatgccctggagcttctcgaggccgtcctcccgaaaaagatgaaggacgcggtcctgccggtgctggaggacgcgcccgccgacgtgaaagcccggtcggcccggcggatcctgaaaacattgggatgaggaggaatccatggccacgctttatgtctaccccaaaacggccccgccgttctccgccctcctcgaaaaggaagaaaccgttctgggccgggccttggacgcggatgttcgtcttccggacgcctacatctcgagccgtcatgcccggatccggcggacatcgcgaggctggacggtggaggatgcgggcagcaagaacgggacgatggtcaacggccgccgcatcgtcgaacccgtccttctcgcgccgggcgatgagatctccgtcggggcggtccggatttgtttcgaccggccgtggacggcggccgtcgaaatcaccgattcgcccaatcccgccgtccgggtcagcgcggccgttccttcccgggacatcatcacccggagcacggaagccggcgtcagacggatggagccctccgggccgggaacgcgggccgaccagcttcttctcgtcatcaacgaggtcagccgggctcttcttttccacaagccccttcaggagctcttggaatatgtcatggatctgatcgcctcccacctccccatggaccggggggccttgttcctcaaggagggcgatccggagaaacttgttccccgggccgtccggatcggcaatccccagttgaaaagcgggccgatgcagatcagccgcggcctcgtggaaatggcttcttcccggcggctttcggtcctgacgaccgacgcggccgaggacccgcggttcgccgaccgtcagagcgtcatcgacatggggctgcattcggcgatgtgcgtccccttggagacggagaaggagattttgggcgtcgtctgcgccgagcgcgtttcgagccgggaatcgttcaccgacgaggacctccggctgttgacgctgatggccaatctggccgcggtcaagatcgaaaacgcccgcctggtcgaggacggcctgatccgggaccggatggagcgggagctgcgcttggccgcggaaatccagcggggactcctgccgaaggaatgcccggtctgcggcgatttcgagatcatcgccgaatccacgccgtcactccacgtcggcggcgattatttcgatttcatcccgctggccgacaggcggctgggaacgaccgtggccgacgtcgccggcaagggcgtcagcgcttcgctcctcatggcgtccctccgggcggccctccaatcggaagcccggcccggaatgggtccggccgatctcgccttcaagctcaacaatttcattcatcgcagctccgcccccaatgtgtttatcacgtttttctacggcgagctcgatccatccacgggcgatttccgctacgtcaacgccggtcacaatccgccgcttcttttgaaagcgggcggaaaagagctttccttggaggggacgggcatggccttgggcatgctccctgatagcacctacgaggaaggccgggcgaacttggaggccggggacatcctcgttctctacaccgacggcatttccgaatgccgcagcccggccggcgaggaatttggaacgggccggatcgtccgggcggtccgccgcttggccggccggccggccggggaaatcctgggagcgatcttttccgacctgcgcgaattcaccggcggggccgatcccgacgacgaccggacggtcttaatcatcaagaggccggcggagcgggcgtcctgaacgcccgctttccccgattcgctttttcccccggatttccttatgattacgccttgtttacggatgaatcacgagccgagaggacggccgtttcctaaaaaccacgcggcttcggggaggcggaccgccgggccggccgttgatgaatccgttcggcttgatggaaggcggcttccaaggatgttgatgaagaaggaaagcttgtcgatccgcggggaaaacggatgaaaacgaggatcgtcctcatcgcggccgccggggcggcgcttctcggcgtcttctctctggcgggcgcggacgtcgagtcttcccggcggaacgacgggccccccgtttccgccgcgccggcggaaaccgtcctccgggccgacccggtcttcgacgatctcgcctctttcctggccggctttccctgcgtctcctctccctataaggaattccaggagaccgcggagtaccgggagttcgccgacgccctggaaaagaattgggcggagctggaaatgaaacggctgggtccggtccggcattgggcccgatcggagatcggcgaggcggccgcggccacgacgacgctgttttatcctttcggcggccccgatgccttgacggccgtgattctctttccccaggccgcccggcatcttctgctcggcttggagtttgtcggccggctgcccgtctttacggccgatcaaggcggcgccgccgcccggtacatccaggatctccgggcttcgctcgacgattttttcaagaaaagctatttcatcacccggaacatgaacgacgagctggccggcgataaggtcgacggcgtcctgccgcttttatgcttcttcctgaaacgcagcggcaacgtcatcgcctcgatcacccggctggacatcaccgatcagggcggaatcctggaaggcccctttcccggcgagccgaaaaagcgccgccggccgttcggcgtccgactcgcgtatttcgctgagggagccgacgtcctgaaagagctgtcttatatttcctgcgacttgtccaacggggcgttccgcgagaattccccgctggctttctaccttgggacggtggcctttgagacgaccttccttaaatccgcgtcctatttgatgcattaccgtgatttctcccggatccgcgttctgatcctggaacggagccggttcgtccttcaggacgacaccggaatccccttccggtacttcaaactcggccgctggacggcccgtctttacggcgaatacagcgatccggtcaaggatttcgccaacgtcggccagcccgatttgaagaaagctttcgccgatcccgcgcgggtgaaatccctgcccttccgcctgggctaccactgggggagcgacaagggcttgctgctttatttcatgagaaaaggatgaagacgaagttcagcttgacgacggccaccgccttggtcgtggccaatatggtgggctcgggcgtcttcaccagccttggtttccaggcggccgggatttcctcgggcccggccctcctgcttctctggatcctggggggggcgatcgctctgttcggggcgctgacgtattcggaggcgggcgtcctttttccgcggagcggaggggaataccattttctgacggagatgttccatcccgccttgggttttctggccggctggatttcgttcctcgtgggattcgcggcccccgtggccgccgcggcgatggggctgggccgctacctgacgagcgccttggccgtcccccaaaaaacgggagccggcttgtcctcttcctcgttgatcgccgtcggcgtcgtcgccgtcctgaccgtcctccacagcctggacaagagccttggcgcccggtttcagaacgtcatcacgattttcaagatccttttcattgtcctgatcatcgtcctcggcctggcgatgggcgagccggccggcctgtccttcgccccgacgagccgggcgctccgggatgttctcagcccggccttcgccgtctcgatgttcttcgtgacgttcagctattccggctggaacgccgcggcttatgtcgccggcgagatcgagaatccgcggcggaacctcccccggagcctgatcgccgggaccctgatcgtcagcgtcctctatatccttctgaatttcgtctttctccggaccgtcccgatcgccgagctgtcgggaaagctggaagttggatacgtgttcgccggccgcgtgttcggcgcggccggcggccggttgatgggcgcggtcatcgccttccttcttctttcgagcgtcagcgcgatgatcatcgccgggccgcggatctcccgggtcatcggcgaggattaccgcctgttccggttcctggggaagacgacggccaaggacatcccggcggcggccgtcgtcgtccaggggctgttgtctgttttctacatcgtcacctcgacgttcgaccaagtgatcgttttcatcggattcaccctgaatctcttcacattcatgaccgtgctgggggtgatgctcatgcggcggaagcggccggacctgccgcgtccctaccggacctggggatacccctggacgccggccgcctttctcgtcatccacgtttacatcctggcctacgggttgatctaccggccgagagaatcgctggccggactcgggttgacggccgcaggtctcgtcgtctatgccatcgatcggaaaacgcgccgggtcaagccggattccgtttgatggaggttctcccgccgtgttttttgaagaaccgtcggccggatcaggcgaaaaaaagattccgcggcgggccggagggcgcttcttcgttccgcgccgtcgctcagccgaacagatcggccggggcgtcctggatccgggcgatgtccgtcgcccggccgcgcacgtcgatccccagcgcgcactgaaccgggcaggatgcgcagtcggcgcagggattccgatccacgccgagggaggcgacgaggtcgtaggcttctccgaggttgcgatagccgtaggcgtacatgtagccccgcatcaaggaaggaagcggtaagcgccgggcgcattgggaaaggcaggtctggcatccttggcaatagagccccggctcccccccgccgccgagctccaagtcggctttttccgcgtccgtcaagacgatgtcggtcatagcctggaggttgagggcgagctggtcgaaggtcgtcatgccgggaatcgccgtggtgatatggggattgcccagggcccatttcaaggcggccttcatgttgatcggacgggtttttccccggtcccagtacgcgccggcctgggtcttcatggcgatgatcccgattccgccggccgcggcatcggccacggccgcgtcgagcgcgacccggttggtctgccggaaattgtaggacgtcaggacgacgtcgtggatcttgccctcgatcgccgcccggatcacttcgtgttcgttgccgtgggttgagacgccgatgaagcgggccttgccgctttgcttgatcttgacgagggcgttcatcagaggctcgaacaggacggcctccttcgtcagaacgttatggagatagaggatgtcgacgtattccaccccgaggcgccggaggctgagttcgaatttctcgagaaacggcccggccgtcgtttcggccaagaaattgcccgtccggcggtcctgcggctcgccggggaccttggttgcgatgaaataggactcgcgcgggcggcccttgaggactttcccgatcacgccttcgttcgttccgcgctgatagccgtgggcggtgtccaggtgaacgattcccccgtcgagggcggcctggatcaggttttcgttgttggagttcatcacgcccatcgaaaccaccggaagcgcgacgcccgtttttccgagagggcgggtgatgacgccgggcttggccgcggccggggcggaggatgcttgaacgccggctttcagaacgccgggaacggcgctccaagcgccggctccggcgactccgagcaggctttttttcaagaattcgcggcggtcgaaagatgagcgcttggcgggcatcggcgtcctccttgaaggatgtcgaaaagatgagcggatactataacatgccgcctttttcaggtccagaatacgaatcgcgccgtctgaaatccaatcccggccgggggggtgaaaggagatgattcgatccggcttcggtcaggatttttaatggcaagacatgatcctctcgggcaagatgatgaatggatccagggccatccgccggcgtttttcgggtataatgcccccatgacgatcgatcaaaatcctccttcgattgggcgcaggtgggtgacggccgcccggccttgggcgtttcccgcttcgacgatgccggtgatcttcggaacgagcctggccgtcgtcgccggcggggcgtccttgaacatcctcctgttcggcggggcgttcgccgcgatggtgattctccacgcggcggccaacatgctgagcgatgtcttcgacttccggcacggagtggatacccaagcgacgccggtcagcggagcgatcgtccgcggctggctcaccgagcgccaggtcgcccggggggccgtcgccctgttcgccgccggcatcgccctgggcctggtcttggcatggcggacgagctggatccttttggcgatcggcgcggccggggttctcatcggagcggcgtacaccttgttgaaagcccgggctctcggggatgcggccgtgtttctcaatttcggcgtgttgggggcgctgggcgcctgggtcgtccagaccgggcggttttcctggctgccggtcgcctggagcgttccgatcgccatgcttgtcagcgggattctccacgccaacaactggcgcgacatcgccacggattccggccgccggatccggacctgcgccggaatcctcggcgaccgcggctcgatcgtctactatggattcctcttgttcgggagtcaactcctggtcatcgctttcgccggcttcccgctcgtccttcccggtctgccccggcttccttgcccgtgcctgatcacgctggccgtcctccccgaggccgcgaccctctggcggcgggcccggcgccggcaccggccgaaaaatcccttggacttcgttgtcttggatggggcgacggcccgctataatcttcacttcggccttctctacacggccgggttatggctcggccgtaggctgggatgatccccccaaatggagcgccgcttggccggctcgcttgaacggtccgggtgaatcgtcgatgggaagccggaaagcaagggcggcggccgattttgccccggccggagcggccgtcctcttttttgttcctcttttcattttcaaaggtttcggcccgttggatttctggcaggggatggccggatccttggtcctgctcgtcgttctcggcgcggccctcgaccgggattttgcgtccctgctttgggccgatgttcggaacgaatcgggccgcaagatccttcggggcgtggtttcggcggtttttctttatgccgtcttttgggccggaaacgcggtctcccgggtccttttttcctttgccgaaggcgggatttccgaggtctacggcttcaaggacggagcttcgacgttcaggatcggctttctcctgggcctcatcatcggtccgggggaggagctgttctggcgtggatttctccagcggcgctgggcggcctggtttgggccgggccggggctttctcgccgcgacggtgctttatgcggccgttcatgccggctcgggaaatccgatgctgatttccgcggccgcgatctgcggagttttctggggatttttatatctgcggaccggctcggcgcttctttgcgccgtgagccacactctctgggacttggccgtcttcctcgttttcccgttcgcctgagcttcccttcaatccgggtcgcctcacttcattccaataaatcggaaacaggttctttatctcccgattttcgtcggtggaatccgagagccagcggacctcgcctcgcggcttttccggcggatgagaatcatggaatcgccccgccgtcaaccggcggccccgccgccggttgacggcgacggagcgtcacaacggacggacgggctcgtggatctcgatgatgaatttcccctcgggatgggttttcgggtcgttgagataaagctcgtagcacatccggtcgtccggctcatacccgcttcccggcagccagtcgcgcatcaaggcgttccaggcctcgccgaattcgttcggggagacctcggcccgggcgacggcgaacagtccgccggggacggtcatggcgccgatttctcccccgacgttcgtcccgggagggacggtgatgcaggcgtcggagcggagcttgtcgtttgcggtgatgtccggatcgtcatgataaatgcccagcgtttttgtctccgggaagcggaggaggccgcgcggaccggcccatcgcatcagcttttcgaacgcctgggacattccttggaacggaccgacatgccggacataggcgaccgtcatctccggcgcctccctgacctcgaccttgaatttcgacttgtccatgaaggacctcctgaatgaaatgagagcgtcctcatcatcatccagggcgccgaaaatctcttggcttatcttgccttccgcttgacgattcttgccattcgtttggcgtttcttgcgccaggcctcgcctccgccggcccgccattccgaggcgctcatcccgaagcgctcccggaacgcccgggcgaaaacgtccgagcccgagtagccgtagtccagggcgatttccgtgatggtcgctttcgggtgaaggaggagggccgcggccgccagctcggccctcctccgctggatataagcgttgagcgtctctcccgtcagggcgctgaaaatccggtgaaaatgaaaacgggagaaatgggccgtccgggcgagctcgtcgaggcggaggtcccggcggatgttgaggtcgatgtagtcgaggacccggttgatgcgggcccggtactcggctcgaagcgcttcggtccggtcaagcggcatgcggcgtcctttttcgattcgtcagggaggcgaaacggcctccccgcgctccggaatggtaccatccctccggagagccggacaagcggatccgcctcgctccgtcccaaaaatcagcgaagggagggaggggcgcgcccccatccgccgaacggctgtgctataattccgcctgattccgccgttttcggagagatatcgcatgaagcgtctttttttcattcttggcattttattggcgatcggcccggccgtcttcagtcaagccccggacgatatcgtctcggtcgaagtcgtcgctccggccggaggcttcaccgccggccgcaccgtccaagccgcgctgaaattgaccatccggcctccttttcacatcaactccgaccggcccgcggacgaggacctcatcggaacgaccatcgttttccggtctcaggccggggtgacatacggctggccggcctttccccggccggtcaggaggaaactcagcttctccgaaacgccgctttccgttttcgagggcgtgatcaccgttccgttcgacgtcacggtggccgcggatttcgccggaaaggaatggacgatcgccggtacggtgagctaccaggcctgcgacgaccagacgtgtcttccgccctgggacgttccgttttccgataccgtcagcgtggccttccccccggcggcggctccgtccccgtcgccgccggcggacaaacaggcggcgtcgacggccgaggctccggtccgagcggaagaaccgccggcggccgaagccgccgactctgtttctcctgaagcgaagccggaatccggaccgccggcgcttgaacccgcggccgggccttccggccgggaagtcccgtttgaagggaaagggctcccggtcattttcgcccttgtcttcctgggcgggctgggcctgaccctgactccctgcgtctatcccatcatcccgatcacgatcagctatttcggcggccaatccgaggggaaaaagggcggcgtcttcctccacgcgatcctgtacgttttaggcatggccgtcacgtattcgattctcggggtgatcgcggccttcaccgggggattgttcggcgcggccttgacgtatcctcccgtcctgatcgggatcgccctgatcatgatcgccctgtcgctcagcatgttcggcgtctacgaattccgcatgcccgcttttctcaacacgttggccggaggaagccaaaaaggatatttcggcacggtcctcatgggcttgaccgtcgggatcgtcgccgccccctgcatcgggccgttcgtcctggggcttctcacgtacgtcggcaaccggggcgatgtcttgctcggcttctccttgttcttcgtcctggccctcggcctgggcgtccccttccttatcctgggggtcttttccggcgccctgggccggcttccccgctcgggcgcctggatgatctgggtccggaagattttcgggttcatcctcatcgccatggccgcctatttcctgaagaccctgttcccgaacacgcttttctaccatttcgtcctggccctgatcatgctggtcgccggcctctatctcggctggatcgagccgacgaagacgggcgggaaggcgttttcgtacgtccgggccctgacaggcgtcgtcttcctcgttctcgccctccttttcgccgtccggggcgtggaggaatacgtcggcgggacggcctcggccggcgccgccgccggcctcgtttcggaagccatcgcctggcggccgtacagcgaggaagccctcgcggccgcgtccgcggcgggaaagccggtgttcatcgacgggttcgccgattggtgcatcccctgcaaggagctggaccggatgaccttcagccggccggacgtcgtcgcggcctcccggagcttcgtcatgctcaaggccgacctgaccgccgggggagacgagaaggtgaaggctttttctcagaaatacggcattcgcggcgtccccaccctcctctttctccgtccggacgggacggaaatcgaggagctgcggggaacgggttttgaacccgccgaggcctttctcgcccggatgaggaaagccctggagcggagcggggaaaaggcggccggccggtgaaaatcgaaggcgttcccttcaccgtgaccgactggggctccgtcccggctgtggagcacaagggcgcctcggggacgtcgttctggcggacggttgaagccggcaacctccgggtccggatggtggcttattccccgggcttcgcctccgatcactggtgcgcccgcggccacgctctcaccgtcctggacggggaaatcacggtcgccctgaaggacggccgggaattcgtcctgaccgcgggcatgagcttccaggcggaagacgacgaagcttgtccccacttggcccgctcgggcttcggggcccgggtcctcatcgtcgactagcacgagctctccgtttctccttctcaaggcgttccgccgggacccagtcctgagaacgtcttggccacttcgatgaagtgctggatgacttccggatcgaattgcgacccggagcagcggatgatctccttgacggcgaaatggtgggattcctcgccgcggtacggccgcttcgaggtgatcgcgtcgtaagagtcggccacggtcatgatcctcgcccccaaggggatttccaggcctttcaggccgtccggatatcccttgccgtcgtaccgttcgtggtggcaccgaacgatcttggcgatctgggtcagctcgacgacgggcttcaggatgctttcgccgaaaacgggatgatccttgatcgccttgtattcctcgccggtcagcggcccgggcttgttgaggatgttttccgggatgccgatcttgcccacgtcgtgaaggaggccggccaattcgaggtcgtccagctcgcgttcgccgaagcccatgtggcgggcgatcttcagggagaattccgtaacccgggccgaatggtgcctcgtgtagaaatccttcgcctcgagggccgagacgagcgacttgaccatcgagatgaagagcatccgctgccgttcgacgaggtcgctggtccgcatcttcaggttgcggttggccagggccagctcggcctcaacctgccgcatccggaggtgggaccggatccgggctttgagctcgacggcgttgaacggcttgacgatgtaatcgtcggccccggactccatgcccgcggccagcatttcagaggccgaccgggcggtcaccagaaggacgggcgtgtgcctgaccgcctcatcggacttgatcctccggcagagctcatggccgtccatcccgggcatcatgacgtcgctgaggacgaggtccggtccgcgctcatgaagaatccgcaggccgtcctctccggtcagggcgaagtccaggtcgaattcatccttgagcagcaagtgcatcagcttgagaacctcggggctgtcgtcgatcaccagaagctggtactcgtggcggcgctccgccggcggggtgatcggaaattcgactttttccaagtcgatgagctgcaaatcccggacattggagatgatgtcctggacacggacgccttccggctcgatgtcggtcgcccgtttccggaaggcgacgggctgatcggactggcggcggtccataacctcctcagagaagtgcttggttcccttgaggagctcgacgatgaaccgggacccctcgcccggctcgctttcgacccggatcaatccgccgtggagggagacgacctccttggccaaggccaggccgattcccgtccccgcccgggcggccgatccctccacctgccggtaccggtcgaacacggcctcgagcatgtgactcggaaggccggagccggtgtcctccaccgtgaggagaacggtttccgggcgctcctcgacgtacagggtgacccggccgttttccggggtgaatttcaaggcgttggagagaaggttgagaacgaccttctcgaactggtcgggatcgatcgtcagctcgacttcggtcaagggatgctggaaaaacaggcggatgttcttttggtcggccaggaccttgaccgaggcgaggagggtttcgacgtaatcgttgaattccaaggttttcggccggagccgcatccgcccggcttccagcttgttgagatccaggaggttgttgatgagcttgagcaggcggtacccgttgcggcggatggaatccagcgtttctttctgaaggtcggtgacggaacccatccggcccaggatcatcgggctcagcggggcgatcatcaaggtcaacggcgtccggagctcatggttgacgttggcgaaaaactgcattttcacctggtcgagggttttcagcttttcgtttgattccctcaaccggacggtcgtttcctccagccgggttcgggcggtgatctcccgttcccgcatgatttccatgatgtaggaaccgatcagacccaggatgatgacggacgagaagaaaaacagattggacaccgtcgcccgttcctggaaaccggaggccggcggccggaaaatcgaggggacggcggtgccgagccagatcagggcgtacaaggacgccgaggcggcgaagcgcaggggaacgaggacgacgacgcccatgatgaccaggtataaaccctggacgtaggccgtcgagactccgcccagcatctggatcatgatcgagatcccgccggcgtcgaggaccgtcagggcgatcgcgaccatctcggccccgcggttggatcgcgtccgcctcaggatgagcaacagcaggccatggccggcgagaacggccagacggatcaagaggaacgtgtgaaacatcggcgggacgtacaagcggtcaaggaggatgaacgccgcgaagaggatggcgctgaagaaaatgacccactgggtgcgcccgcgcaggtcgtattcctcgcccagccgctcgaagaggctcttatccttgttcctcatgtcagttcctcggtttggcgacgacgacgtatccctgggggggattcccgaaggaaggcagaatctcgacctgagtccagcccgcttctcccaagagaagctccagcttgccgggatcgaagaaatcgaatgtcccggcttcctccagatccacgagagcctgggcatcgttgagaaacgaccgcatcgattcgaggatccggcttttcggaccggggatggggagcgcgtcctccggggccgcttcgatcttttccaaaagccgggtgaacaagccggacgcgtcggtatccggccgcatgctcgacaggacgaggcgccccccgggggcgatgaggcggcggacttcccggagggtttcgaccgggttgaaaatataggagaggacgaggctcatcaggatcttgtcgaatcgctcttccttgaacggcagaaagaaagcggtttcccggccgccggggaaggccagcttgcggaaagccggatgccccggggcaagaccggcggtccagcgggcggccagattgaagtcgcggatgacgcggccttcggccagctcgaaggtgcttttcagaaagcgctccgtctcgggagtgatttcctcgccccggaggatccggtgaaggcggggagagtaggccgcgtcgatccggagggcggattggaggggcaggttttcgatctgctcggccaagtcctcgaaccgcccgatttcgccggcgaggaacctccggatgggtatcaatcggttcaattcgacgtcgaggcccaggacggacagccggccggcgttcttcagcgagggctcgagggaggtcagcttgtcgaaagcccgggccagcgcctccgggaccaggtcggccagaaccagacgcgagggcagggggcctccgctttggaggatgtgggcgatgaaattccccgtgccgccccccaggtcgaggaaccggtcctccggatcgaaagccaaggccttgcgctgatcctccatgagccggacgtaatcgtccgacaaggccatcgtgtcgaagccgagaagacctttttcccccaccaagtaatgggtccagtaggtgtgcttgtttttcaaaatccggcccgggagacggtccttctccgcccgcctcagatattcgagattcttccgctccggcgggatcgcctcgatcatcgtcccgtgaaggaagcgatggacgagggaggtgaccgtcccgaacagccgcagggcttcctcggagttccgggcgttatgtcccaggggaacggaaaagacttcccgggaagcctcggccttgatgctcatgacgtcgcggacgaactcggccttgacccaattatcgtgttttccgtagatccaggtgaccgggaggttgaggtggcgcatgtcttcccgggcttggtcgagggtcgctaccccggaggcgaccacgtcggccgcgtaatgcctcattttgaccaagttgccgaggatgggaatgaccccgagatcgatgcccagctggtgctgctcgagcaggtcgagcccgcagttgacgcggttcatcaggtcgcggaattccagcgtgcccatgcaggcgatccaataatggacgcgccgccgcacggcgggatcgcggagggcgatccgggcctccaaggcggaaagcgagaacgtcgccaggatcaccggaccggccttgatcgtcggattcatctccagccattccaggaccgttttcaagtccgccgctccctggctgaggctggagtcgaccatttcgaacggcggctcggccgcctcgggatccttgtggctttcgcctttgcaccggattccgtcgtagcggaaaaccgccagccgccggccggcccggcggaaattttcgactagggtcagggccaggccgaacaatgtttccttcgtcttcccgaaagcgggcgggatgatcacgacgggcacgggatttccgtccggcgggtacgatgtattcaagaggccgacgatttcttccccccgctcgttttccaggcggatgacggcgggaggacgatgagaaagctcgcggagaatgtccggcagcccgggatcggccccgcttcccggctcggcggccgcggcgggggggacgtcggtgctgcgccgatgggggtggaccgcctggatgctcaagcggccgatgccgaactgaagcccatagcggaaggccggggatccgtcctcttccgtccggacggcgtggcggatttcgccccgctcttcccggatcaagcggccgttgtcgaagatccggacggtgccgacgggcgtgccgggaagcagggccaagccgccggcatcggcgatgaagctggccccggtatccgagaggtcgacgaccggacccgagatcccggccgaaaatgggggcgggagaaccagttccaggcggagaccgtcttggggcgattccctcttcaaggagcgtttttccgagtagaagaggatccggggatagaagcactcgaggaaatcgccgttctcgccgaggcgccggaccgttgtttcgaaattatacgtggcatatccggattggaaggacatgaagacgggatccccggtcttgaaatggaggttgaggctttttccgctcaggacgcagattctcccggggtcgacgtgttcgagagtgagggtcgccggctgtcggacatgggcgggaagggcggtgatttccgtccgggcccgccgggcaccggcgagcagcccccggattttatccggagaggagaaggcgaccatggccgaggtgtgaagctccggatagcgcagcttgagctcggccaagtccttgggggaaacggtttcggccaggcgggagaagattttccggcgggcctcctcgtcggccgggcggaaggcgatgccgacgcctccctcgccctctccggagcggacgacgattccctcgactttccagcattcgccgtcggcgacgtgaaggacgaatggacgcctcgccccgacgcccaggccggccgccgtttggagaaacatgcctgtttcgctcaggtcgcgcacgacggccggtccgccgccgccctcgatttcgacgcggatgggatttttctcggaaatgggaatgcggacaacggccctcttttccacggccagccgggacaagcgcttccggacctccagacagagagcttccgtttcgaccgggctctcgagaacgaggtcggagggcgagatcaggagcgaccggcgaagggccgcgacctcctccggtccggcgaccacgatcttgaccatccgttccgtgctctggaacgattggagaagggaccggagaaacgcccccggctcggcggagatggaagccgggtcacggaggatcaaacaatcgaccgtctggagcttctccgcccagtaaaaagcctccaacggaccgatcgcggcgatcagatcggcgttcccgttcaacgcttttttgaaggaatgaaggcggccggggcggccgtcgacggcgaggactctcagacggggggatgtcgtagagtctttcggccggatttcaggcatcacgttttccagggcgggggaattgacggggagtcaagtgaatgaaatcggatgaatgagcccctatgtccacaaaacctagggtccaacatgttaatatacactattttgtgtggatttctatgttttgtcaagaggagaatcgcgacgggcgtgatttgctccatgtcaaggagacgggcggggccggcgggaaaaaagggggaaggcccgaaggccttcccccgggggaaagcggtcgcgcgattcagcttttcaaaagaccgcgggctttgagcagggcttcgactttcggctcgcgcccccggaaagccttgtaggaatccatcgcttcccgggtgttgcccttggagaggatgttctcccggaagcttttggccgtcttcggatcaaaaaggctcgtctccttgaatgcctggaacgcgtccttgtccaggacctcgctccagaggtagctgtagtatccggccgaatatccgcccgagaagatatgggcaaaatacggggtccggtaccggacgatgatttcggggatcattccgatctttttgagaagggcgtcctcgaaagcgacggcgtcctggggggcggcctcggccagcgtatgccaggccatgtcgaggtaacaggcggattcgaactcgacggtcgtgaagccctggttgaactgcccggttttttcgatcttatccagaagatccaggggaatcggctcgcctgtccggtagtgcttggcataggtcttgatcacctcgggatcggccgcccagttctccatgatctgggagcagagctcgacgaaatcgcgggggacgttcgtcccgccgatcgactcgtaggtcacgtcggacaagaggtcctggagggcgtggccgaattcatggaaaagcgtcagggcttcctcgaaggtgatcagcgacggctggtcggcggtcggcttggtgaaattgccgacgttgtagacgaccggcgtgacgcgccggccgtcttggaccgactgcatccggatcgcgctcgaccaggccccgccccgcttggacggacgcgggaagtagtccgaatagagaatgccgacgtggcgcccgtcggcttccttgacctcgaagacctcgacgtccggatggtagaccgggatgtcggtccggggcgtgaaggtcagtccccagagcttgccggccgtgtcgaaggcgccccggaggacggccttgagctcgaaatacggccgcaaggcctcgtcgtcgaggtcgtacttggcttttttcagctgatcggcgtagtaccaccagtcccagggctcgagctttccaacgactccgtccttgttcatcaacgcctcgagctcccgggcttccttttccgccatctccaaagccggcgtccaaacctggtcgaggagcttgtagacgccggcgggcgtcttggccatgttcacctcgaggacgtaatcggcgtgggtcgggtagccgagaaggttggcttggatcacccgcagggcggcgatttttgaagcgatggcccggttgtcggccgcgttgccgttggctccccggctgatgaaggccttgaagagcttttcccgcaggtcgcggcgggaggaatattggaaaaagggaatgcaggacggcttgtggagggagaacacccagcggccttcctgtccctgctccttggcggcctcggccgctccggcgatgacgccttccggaagtccggccaagtcctccttcttgtcgagaacgagggtgaagccgttgtcctcggccaggacgttctggccgaacttttggttcagaacggccagctcctcgttgaccttgcggagctcggcttttttcgcctcgtccagggcggctccgctgcggacgaaatgcttgtaggtcaaatcaagcaaccgggcctgctcggggctgaggccgaatccctctttcttctcatagacggctttaacccgctcgaacagcttcgggtcgagggagatgtcgtcggagtgtttggagagaaggggggccagctcggcctcgattttttgaagctcggggttggtgtggttgttggtcagggcgaaaaagacgtaggcgactttcttaagcagcgccccgctgtgttccagggcttcgaccgtgttggcgaaggtcggcggctcgatcgaggaggtgagggcggcgacctcgtttttctgccgggccatcgcttcccggaacgcgggcaggaaatgggcctccttgatcaggtcgaacggcggggtctcaaacggcgtcgtccattcaaccaggaaggggttgacctcggcggcggccgtctgcggcgggcgggcgaggacggcggcgacgatcaccgtggcaagaatgagaacgaacaggaggatctttttcatcggattttttctccttttctcggcatggccgaagggggcgttcatcggccgtcgggcggccggaggatttccaaaaactcagagagaaccatggccgtcgccccccagatcttgtgggggccgacggcgaagaaggggacgagccgcgggccggtctcgaacgtccatgtttcccggcggaggttgtgatcgtcgagaagatcggcgagcggcgcctcgatgatttcatcgacttccccggtttggggcacgaaggccggcgggacgtccgtttcggcgacgaacggatagatgcagtatccgctgggggggatgtacagcggcgtcagggcccccaagaggcggagggtggaggggacgatgccgatttcctccatcgcttcccggacggccgcctcggccggcgtctcgccggtttccacgtggcctcccgggaaagcgatctgccccttgtgatgaacgacgttttgcggccttcggatgaaaacgagatgggtttttccgttccggggataaagaagggcgaggaccgccccgggaagacagtcgcccccggcctcgacataggttttctggccgggcggcggggggaggggcatcatccgaagctgggccggagggcccggaaggggccgtcggagccggtccttcagggatttcaaagcctcgttcatgaaagagtattatacatcagatgggcactccgtttcctccaagcggcggaatccgcccgatggaggaacgcgggcctaggaacctaatcgccgtgaaatacgtcttaatcaatgccttctttcccaaaatagacaggagattccaaaatgagcttccttcccttgactgaaaaggcccgccggctcggcgcttgtcttgcccttgttcttttctcggccgcggctggatccgtttcggcccaaagcctcgatattccatcgaaaaaatggggcctgagcttcggcaattccaaggaattcaccggtttgcggttcaatttccgcgaccgcggggtgatccggatcaccggcgtcaatgtcaccctgtggactccccggacgctcggcgaggaagatgattccaccgtgacgggactgtccttgggattgatccccggggccggccgcatgaggggagtccagctcggcctgctcggagtcgccggcaatcggagcatcgccggagtctcggccggacttttgggcgtgggggccggcgaagacatctccggcttcaatttcggcggcctgggggtgggcgccggcggcagcgtcgcggggatcaatctcggcgggctcggcgtgggagcgggcgaaaatgtcctcgggatcaacatcggggggttgggcgtcggagccggcaagaacgtcaccgggatcaacatcggcggtctgggcgtcggcgccggagaacgcctggccggaatctccatctccggaatcggggccggagcggaatccgtggccggcctggcgatcgccggaatcggcgtgggcggccgccggctgagcggcgtcttcgccgccggggccgtaatcaagctcgtcgatgacggccgcctgcggggcgtcgccgtcagccccttcaaccagctcaaggggacgctgaccggcctttccatcggaatcgtgaattacgcccgccggatcgagaagggaatccagctcggactcgtcaatatcgtccgggagaacaagcccggcctgcgggtcctgcctctcttcaacaccgatttccgctgagggccgttcccccggccgccggacgggggaaggcgcgaaaccgggagcccctacatgttccagcggtaggacaccttgaccatgaagatgttttcgccgggcgccgtgagaaggtcggagaaatcccgccggaggttgaggattccggaattggcataatccgcccggttctgggtccagaccaggtaaatgagcgagccggggaggtattcccagcggaaaacgaccgtgcccctcagggatttcacgttgaagtcgggattgccgaaggtgaacggggaggccggccccgtcccatcgggatcgatggtatatccgccgccggcttcctcgaccgttgagctgttttcgccgtacagattgtattcatacttggccggccgggccagctccttgaaccggctgtaggctccgacggcgatgaagggctggaggtaggcctggagggacagccgcggagtgaacgtccagttgaggcggatctcggccgagacgactctctgttcgagccgggcgaagacataccggtttccgaacgtgggcgtcatcgaggcgtcggcgaagcggtcgacccactgggtttcgttcgtctcggcgagatatgacggcccggccgaaaagctgacgttggccgccggcttccagcggagggagagcccggcgttccacgaacggccgtcccggcctccgtcggtgatgcccccgcttccttcgaggacgactttcttgcgcccgtccgtgctgagcatcaggaacacgttccccatgccgggcgtccaggtcagggggcctccgcgcgtctgccggttgttcagagacccggccccggcgaagagctgggcggaaaaataccagaagttcttgaacaatccctcggcgatgaggattcctcccttgccgacgttgtgcccgccgaaatcccaattggcgaatccgccggcgccgacgaggatctgctggaaaatcttgccgggctcggtgaagttgaggccgggaacgacgctgacgttgatgacgtcggacgttccggcttggtagcccgcgtcattgggattgaatccgggcgaaagcattcccaaggaggaaagccagatgaaccggccgttctgcttggcgaggtggacgcgggtcccccagcccgaaagcgagacggccgccgggtcgacttcgacgtgggccgcatccggcctttgataatagtggatcgaggaattctggattcggaggatgttctcggagctccctccgatccgcgttcccccgatccagccgccgaacacccagtcttttttagcgtcgaggaacgaccatccgtccacggccaggctgaaggcgttccggttgagaaggccttcgagggccgggttatcgaggtcccggacgacgcccgtggccaagagcccgatcccgtggcggccgctgtcgatgtccttctggatccggaagatgccgtaatatgacaacggctccacttcttctctggaacggaggccggacaggtcgatgtcggcgtattcccgcgaggtcagggcgttgatgaacccgacgttccagccgccgatcttgccggtaagcttggccgccccgagaatcgtcgagcggtcgggaagtgaaacatatccttctccggaaggagatccctgcggctcccggccgatccggcggctgtagaaaagcttcggattgggccagttgatattggcgttgaaataaatcccgccccggccgaagtcgttgaaaatggacgcgccctcgatgaaaaacgggcgtttttcctcgtaataggtttcataagccgtcaggttgacggaggccggatcgacctcgacctggccgaaatccggattcaccgtggcgtcgagcgtcaggttgctttttaaaccggccttgagatcgaagccggcgttgccggacgcttttcggccggtttcgaagggatttccctcctcggccgggcggaactgggcctggccggtggcgtacggagtgatttccacgtgaacgccgggggagatgccgcggatgccctccaggcgagcgaatttggaaacgaacgccgtttcgttcttcgggcaccaggcgaaggacgccgtttcgtttttcctccggattttccggcggaagttgacgccccagacgtattcctccatacgggaaaaccggatctggtggaaggggatccttatctccacgttccagccgtcgccgtcgatcgcggctttggattcccagacgccgtcccaagagctgtcgtcggcgatgtcgttattaagggcgaagtccatgatcgagccggaagggttcacgcagaacatgtatcccgtccggcggtcgtaatagggatcgacggcgaagtaaaaccaatccgattccaccatcgaatcccggcggccgaggaggcccgtgattttatccggttccgaatcccggcacttggcggccacgtacaaggcctcatcgtcgtaggcgacccagacttcggtcgtctccgtcgacggttgtccgtcctgcggatcgttctgggtgaagccgttcgctccctcgcccttccaggcgctatcgtcgaggcggccgtcgatcttgaccggttcctccagccggaaggcttggacgatcttctggcccggctccggagcgggaaccggcctttgtttcgccgcggcgaaaacgaccggccaaagggcggccagcacgaaaatccttttgaagtctttattcatcatctccggtctccttgatgatcttcctctccggaagcccgctgccggcattcgccagcccgcgccggctttttcctccggccgggtgtccttcaatgtatacgtcgaaaaagcgcgaaaagttctcttttgcgccggggctcttcagaaacggagaaaaatgcattatgatgggatttcttaaggaggttaaaccatgaagaaagccctcctccttttgacggcggcgctagtctgcgccggcctgctccccggcgtgtccgcggattccccgccctccacccgcgagatgaacctgctctgctggcaggagttcggcgagctcgtcccggcccggatccggaccgtgctgctcccgacgggatccctggaaccgcacggagtcgttcccaacgggaccgacagccttgcccccgaagccatggcccgggatatcgccggacgggtcgacgccctgatcgccccgacgcttccctatggaatgacggccgacatgaaggcgtatcccggcgcggtctcgatttccaaggaggcctacgccgccttcgcccgggagatcctggagaacctggacgacaacggctttcagaacgtcatcatcctcaacggccacgggggaaacacggccgttttaaacgaagtctcgtctcttgtgtccaacgcccgccgggtccggatcctgctggtgaactggtggaccctggccgacgacatcaccaaggacgtgttcaaacaggacggcggccacgccggcaacaacgagacggcctatatccaggcgatcgtcccgaaccacattcatcccgagcgctaccggccggagatggccgcgccgctgccggctccggccggggctttcgccgcccacccggtgacgacgtcgatccttctttatcagaaaggccagggatacccgacattcgatccggcccaggcgaaggattatttccgccgggtcaacgaccgggtggccgagctgatcctggacgccgtcaagaaatgggacgccgccggcgtttacggccgggaccgggacggcggccgatgagcctcctcttctatcaggtcgacgccttcacttcggaggtattccagggcaatccggccggcgtctgcccgctcgaatcctggcttccggacgggctcatgcaaaacatcgccatggaaaataacttggccgaaacggcgttttacgttccaacgggagatcgcttcggaatccgctggttcacgccggccgtggaggtggatctttgcggacatgcgacgctggcggccgcctacgttattttccgttatgaccgctatcccgaaaacgaaatcgccctcgattcgcggagcgggattctgcgcgtccgccgggacggcgatctcctgacgctggattttccggtcgacacgctccggccggccgcggagccggccggcttgagcgaggccctcggagcccgcccccgggaaattttccgggggaagaccgattgcctggcggtgttcgggacacaagccgaaatcgaagcgatgcggccggatttcggaaagctcggccgggtcgaggcccgcggggtgatcgtcacggcccgcgggaccgaggttgatttcatctcccggtttttcggccctcaggtgggcatcgacgaggatcccgtcaccggctcggcccacacgagcctggccccctactgggcggagaagctgggaaagacggaaatggaggcggtccagctttcccggcgcggcggccggctgaaggtgcgcctgcgcggcgaccgggtggacatctccggccgggcccgggcctacctcgagggccggatcgagatggagtgagccgcggcgaaaaggaaggagaatccgtgaacaagaaccccgacccacaacggaaaccggcggactcgaaacccttccgccgggcgatcgtccgaacccccggtccggacgcggccgccggcttgaccacggccggcttgggaaaacccgacctggccctgctcctggcccaacacgccgcgtacatcgaaacgctgcgcggcctcggcctcgaggtcgaggtcctgccggcgtcgccgggctttccggacgcgtatttcgtcgaggacgcggccgtcgtccttccggagatcgccgtgctcacccggccgggggcgccctcccggcgcggcgaaaccgcctccgtcgaatcagccctggcccggcaccgccggctggcccgaatcgaccttccgggaacgcttgagggcggcgatgtcctctgggccggcgggcgctttttcatcgggctctccgtgcggaccaatgaggacggggccctgcagctggggcggatccttgagtcttgcggatattcctggacggccgttccggtcgagaaagggctgcacttgaagtcgttcgtcaacaccctgggcgggcggaccctggtcgtcgcctcccgtttcgagggccgggaatttttccgcagcttcgaccggatcgttctcgaccccggcgacgactacgccgccaacaccctctgggtcaacggcaccctgctcgttccccggggatttccccgggccctcgagaaatacgccggtttgggacttcccctcatcgaggtcgacacaagcgagatgcggaagatggacggcggcctgacctgtctttcgctccggttctgagaaggtgaaaacgccggaggcccggtccggacggcggcgcgccgggacggttttagccgggatgttcctggccctcgctcccccggctctcgcggcgcccccgcttttcgcttcatccgaaggccggatccctctgatcgacctggccggcgaggcgggccgccgaacgatcgtcgaccgtgaatccgggcaatacctcggccatccgacgaccgttctcctggaagacggccgaaccctcctggcggtttatcccaagggccacggccgcgggcccatcgtcgtcaagcggagccgcgacggcggcgcgacctggaacgggcggctggaggttccggacaattgggcgacgagcctggaaacgcccactatccaccgggtcgtcgaggcctccgggaaaaagcggctgattgtctggtcgggcttgtacccggctcggctggccgtctccgaggacgacggggagacgtggtcgcctctgcggccggcgggcgattggggcggcatcgtcgtcatggcatccgtcgtttctttgaaccggcccggcggatacttggggctttttcatgacgacggccgctttttccgccgtgattccggcccgtccgatccggccgtctttacgatctacaagacgttttccaatgacggaggcctgacgtggacggaacccgaggccgtctggagcagtccggctctccatctttgcgagcccggggctctccgttcgcccgacggccgggagctggccgtcctgctccgggaaaattcgcgccgaaagaattcccacgtgatgttttcccgggacgagggagcctcctggtcaaccccggttgagctcccggggtccctgacgggagaccgccattgtccgaaatacgctcccgacgggcgccttttcgtaagcttccgggacatggcgcccgacagtccgacccggggcgactgggttgcctggatcggcgcgtacgacgacctcagaggcggccgggagggacaataccgcgttcgcctgatgaagaatcacaaggacgccgattgcgcctattcgggcgtggaggttctgccggacggcacgattgtcgccacggcgtacggccactggacggaaaacgaagagccgtatatcgtcagcgtccggctgagactcgccgagctggacgcccggctcggtcgttgagccggcggccgttttccgcggcggccgtcagagcgcgtcgatgatggcgttcagcgtcgggctcggccgcatggccgtctcgactttcttccggtccggccggtaatacccgcccatgtcgacgggcttggcctgtgccccgaggagttcggccgcgatcgtggcttcgctttcccccagccgccgggcgatcgtctcgaaccgggcccggagctccggatccttgttctgggcggccaaggcctgggcccagtacaaggccaggtagtagtggctcccccggttgtcgatctgtccgaccttccgagcgggggatttgttgttttccaggaatttggcgatggcctcgtcgagagtttcggccaggaccttggctttcttgttttggaagacgccggccaggtgctcaagcgaggcggcgaacgccgagaattccccgagcgaatcccaccgcaggtagccttccttttggaattgctggacgtgtttgggagcggagccgccggcccccgtttcgaacaatccgcctccgcccagcagggggacgatggacagcatcttggcgctggtcccgatctcgaggatcgggaagaggtcggtgagatagtcccgaaggacgttgcccgtcaccgaaatggtatcaaggcccttgcggatccggtccagcgaatggcgcatcgcctcgaccgggggaagaatccggatgtccaggccggtcgtgtcgtgatccttcaaatagcgctcgaccttagcgatgacttgagcgtcgtgggcccggttgcggtccagccagaagacggccggggcgccggtcgcccgagcccgcttgaccgccagcttgacccagtcgcggatcggaatatccttggcccgggacatcctccagatatcgccggcctcgacctcgtgttctaaaagcgtccggccgcagggtgtgacgacccggacggtcccgtcgaaggggatctcgaaggtcgtcggatgagagccgtattcctccgctttctgggccatgaggccgacgttggggacgcttcccatggtcgccggatcgaacgccccgaatttcttgcaattttcaatgatctccttgtagatcgttgagtagcaccggtcggggatcatcgccatcgtctcgtggagcgttccgtcggggccccacatccggcccgattcgcggacgaccaccggcatggaggcgtcgacgatgatatcattgggaacgtggaggttggtgatgccccggtccgaatcgaccatggccagggccggccgctcggcgtagacggccttgaggtcggcctcgatttccgctcgcttcgcctccgggaggacctggattttcgcgtacacgtcgcccaggccgttgttgacgttcacccccagctccttgagcacggcggcgtgcttgtccagggctttttgataaaaaaccgagacggcgtggccgaacatgatcggatcggacaccttcatcatcgtcgccttcagatggagcgacaggaggagaccctgggccttggcctcctcgattttttcggcgtagaattttcgaagcgctttccagctcatgaaggtcgccgaaagaatttcatccgggagggcggtcaaatcctccttcaggaccttgaccgtcccgtccttgcccgtgagttcgatccggatcggccgttccttttggttgaccgcggatttttcgtggccgtagaaatctccggcggtcatgtggaccacgctggctttggaatccggcttccagggacccagcttgtggggatgcgtcttggagaagtttttgaccgaaagcggcgccctccggtcggagttgccctcgcggaggacgggattcacggcgcttcccaggactttggcataacgggcctggatcactcgttccgcttcgttttgcgggcgttcgggatagtccgggagggcgtagcccttggactggagctcccggatggcgccctggagctggggaatcgaggcgctgatgttcggcagcttgatgatgttggcctcgggccgggccgtcaactcgcccaattgggccaggtgatcttggatccgctgattgtcccgcaggtcatcggggaaattggcgatgatgcgtccggcgagcgagatgtcgcgcgtttcgacttcaacgcccgatcccttggtgaatccctgaatgatcggaagcagggaataggtggccagagccggcgcttcgtccgtctccgtccagatgatcgtctgcttcgccatgatccctccttttccgctttatgttctgttccgcccatgcggaaccgggatgacacggccaaaagaaatgtacgatagcggaattgccgggaggtgtcaatcggcggccggtccgattgacagcccggccgcctgaagatatagtgaagccatgggatccgacggcgggcggaaggcggggccggagacgcgtcctctttctcatcgttccctgtctctgtagaaattccagcggattcgttttccggccgccgcggactgcctgccggcgtcggaccccggttcaaggagaccggagttgaagcggatcgcgaaattttttttcgcctcggccggactcatttgcctggttcttcccctttcggctcaggaaaaaacgttggacgagttgctggctctcgatctcagcgagctgctcgacctgaaagtcgtttccgccttgaaaagcccggaaacgatcgcccgaaccccggccaccgtccgggtgatcacatccgagcaaatccgggacaacggctgtctgacccttgaggatgccctggccgacctccccgggtttcaattccggaacatcctgggcttcaactcttattccttcatccggggagtccccggccagaacaacaagatcctcctgctcgtggacggtctccagatcaacgagctgaactcgggcggattctacggcggaggccagttcaacctggccgaggtggagcgcatcgaggtcatctacggcccggcttcagctttgtacggaaccaacgccctgtccgggatcatcaatatcgtcacccgggatccgcgggccggctcaaggggccgcgtttcggccggcttgggaaccttcggcgcgcggctggccgacgcccgttacgggtattacgataaaaacgcggatttcggattcacggcggcggcgatgctcaagcggaacgagaaagccgatttggccggagcggccggcgatttcaactggaccgaggccatcgagaatttcgaaaacgacgcggccgtccaagcccgcgttcatttcaaggattttgaggccgggtttctcctccaggatgaaaacgcctcgcgggcgacggtggaaaagacggccggagaggatctttccattccctggagcgaccacggcgtcaactggcacatccggttcatcaatgtctgggcccgctattcctacgagaagataaagacttggtccttccgcaacacggcgtattaccggaattcaaccgtcctggacgacaccgtttcggaaatcgagctggcgacttccgattccccgggccggcaattccgttgctaccggcccaacagcctgatcggcaatgaaacccaggttcaatgggcgccggatccgcgctggcgcttctccgccggcctcgtcctggagcgggaacggctggccgagggattttccgtcaccgtgagctcatcggcggacgccctcccggcggttccgctttccccggccatgatgaccaaccgcttgttctccgcgtatgcccagatccaagggaccccggctaaaggccttgatctttttctcggcctccggcacgacgactccagctattacggcgcggtgaacaccccgcggctgggggtgatttacaacggggggaaactgacggccaaggccttgtacatgcgggcgttccgggcgccgaagccgtgggattacgcggccggcgcggggaatcccggcctgcggccggaaaaaatcgattcgtttgaaatcgccggcggctggtccttttccccgttcttgcggctggacgtgtccgtttaccgcaaccgcttgacgaatctcctgagtcgggaggacgaaacgacgaacagccgctggatcaacgccggagccctgacgacggacggcggcgaagccgggctcctcttccgccgcggctcctggagggcctgggcctactacacgtataccgcttccctggacgaaacgggcgaacaggcgccggaaatcgctgcccactgcgccaccttcggcgcggcttatgccttcaccccgcgcttgaccctcagcctgcgaggctgttatttcggggaacggaagaatcccaagatcatcccctccacggggagcgaccggatcgaaggagcgttcgtcgcccgggccgccctctcctggcgtctgccggcgggttttgacatccaactcgtcgtcgataatcttttcgacgccgtttattttcatccttccaacctgccgcccagccgcttccgtcagccgccgcgctcgttccgcctcgccgcggggtattcgttccagtgatgaagacggcgcggttccggatcggatggattctcgcggccgccggagccgtgtttctctccggcccgccggccgtcccggccgggaaaaccctcgtcacggacacgtccgcttcggaagccgcggtcaaggcggtttttctttaccatttcatccgttacctccaatggcccggcgaattcgaccgcgagccctgcccgatcgtcgtgctgggagacagcgcgatttgggagccgctccaggaaatctcggagaagaaaaccaacggctccgttctcctcctggtccggcggtgcgaggagttgaaagacgccggccggctccggattctcttcctgtccgattcctccgcgttcctcctccccgaagccctggaaaagttccgggggacgagcgtcatcgtcgtcggggagaccgagggcctggcccggcgcggggcggcgatcaacttcgttctgcgcgacgaacacgtcaagtttgagatcaacctcgatgcgttgaagcaagcgggcatccaggccggctcccagcttctgcgtctggccctcctggtcgagggggataaggcggccccggggcgatgaaattcaatgacctgtccctggcccggaaaatcatcttcctgcagctcttcgtcgtcttcatcgtcgttttcctgctcagcggattcaacgttctgtcctccgcccggttttaccgcaactccctccggacgaagcttgaatcgatggccaacctcctcggctacaactgcacgtcggcccttctcttccaggacggcgtggatgccgcccgaacgctccgctcgctggaagccgaggcgctcgtaacccacgcctggatcctggatgccggcggccggccgttcgctgcttaccggaggaaggagacggcggcggagccgccgccgcaacggggaggcgactacgaggaaacccagggcgggttcttcgtcttttcacggcgcattcttcaggacgacgagccgatcgggaccgtccttttccggtacgacttgtccgagtaccggatgatccttttccggaacgcgctcgggaccggggccgccctgctggccagcatgctcctggccttgctcttgacggctcgcagccagaggaccctgtcgcggccgatccggcgcctggcggaaaccatccgcctcgtgtcccggacaaaggacctctcgatccgcgtccggggggaggaggcgcggaaagacgagatcggcgttctccaccgcggattcaatagcatgctgtcggagatccaaagccgggatgcggaacgggagcggatgattgccgccctccgggaaagcgaggagaaataccggactctggtcgaaaacgccgaggacgcgatcgtcatcatccaggacgagcgctttgtctatgtcaacccgagcctgggcgccatggccagaggtcaagccggggaatttctcggccggccgttcctcgacgtgatcccggaagaggagcgggagcggttgacgcgctactaccgggaccggatggccgggcgggaaaccccgacgatgtacgaaaccgcgttgatgaacgccggcggcggacggatcccggccgaggtcaccgccacccggatctcctaccaggggcggccggccgatctcgtcatcgtccgcgacatcagcgagcgcaagaaagccgaggaggaaatccgcaagctcaacgaaggcctcgagcgccgggtggaggaacggacccgggaactggccgcggccaacgagcggctgatcgagctggaccggctgaaaagcctgttcctggccagcatgagccacgagctgcggacgccgctcaactccatcctcggattcaccggcttgatcctcatgggaatgtcgggcgacgtgtcgacggagcagagaaaacagttgaccatggtccagagcagcgccacccacctcctggcgctgatcaacgacatcctggatatctccaaaatcgaatcggggcggatggatctgacgatcgagtcgttcccggcggccgacgtcgttcgggaaaccgtgaagagcgtcaccccccaagccgaggccaagggtcttcgggtgagggtcgatgcgccggacggcttgtttctccaaagtgacgtccgccggttcaaacaggtgctgatgaacctgctcggcaacgcgatcaagttcagcctccggggcgacatccgcgttcaagcggacgtccgggaggaatatctcgaggtccgtgtcgccgaccaagggatcggaatccgggcggaggatctcccgaaactgtttgtccccttccagcagatcgacatgacgatgaccaaggcgtacgaggggacgggcttgggactctacctatgcaagaagatcgtgaccgcgctccggggggggatgacggtctccagcgagcccggcagcggcagcgtctttgtcttccgcctgcctctccgatggaaggaggatccgcgatgaagacggttctcatcgtcgaggataatgagaataacctgtacatgatgcgctttatcatcgacaagcttggtcacgcggtcatcgaagcccgggacggggcggccggcgtggccctggccaaggagcggcggcccgacctgatcctgatggatatccagctgccggtgatggacggctacgcggccgcccggaaaatccgggcggacgaggccctggccggcatcccgatcatcgccgtgacgtcctatgccatggtcggggaccgggaaaaagcgctggccgcgggatgcacggcctacgtcgaaaaaccgatccatccggccgcgttcatcggcgttctggaaaaatatttataaatcttcggagagatgatgaagatcctgattgtcgacgatgaagagaaatcccggtatttgctcgcccgccttttctcgggaagcggacacgccgtggaggaagccgccgacgggaaaatcgcgctggagatgctcgaaaaagaagcgtacgacctggtcatctcggatatcctgatgccggtgatggacggctacgcgctttgtcgcgagctccggtccagggagggcctgagggaaacgccgttcgtttttctgacggccacgtatgtcgacgagaaggacgagcggttcgccctccagctgggcgccgaccgtttttatcgcaagcccgttgatccgcggacattcgtccgggagatcgacctcctcctggaggagatccgggatggaaaacagcgccggttggggccggagaccgatgaaaaggagattctcaccctctacaacgagcgcctgatcaacaagctcgaaaaaaaaatcgtcgccttggaaaatgaaatcgccgagcgcaagcgggccgaggacaaggcccgggcggcgatcgaggaaaacgaggttctcctccgcgaggtccaccatcgggtcaagaacaacatgcagctcgtctccagcctgatcaatctctcggcccggggccttaaggatccggcggcgctcgatgtcctccggcagatccggctccgcatccgctcgatctcgatgatccacgagaagctgatgaagtccggcgacctcgtccgggtcgatttcgccgattttctcgacgacatggccattcactttttccagttctacaaggccgatccggaccggatcagcctgaagctggaggtcgtgccggtgatgttgccggtcggcctggccgttccctgcgccctgatcgccggggagctgatgtccaacgccctcaagcacgccttccccggcgggcggcggggaaaaatcctcgtcggcttgaagcctctggagagcggcgagttccttctccgggtcagcgacgacggcgtggggtttccggaaacggccgatatccggaaaatggaaacgctggggatgacgattctcaacgccctggtagcccaaatcggcggccggctcgagatcctccgcgacggcggctcggacttccggatcactttcgcccggcggccgttctgaccgccggaacgccggaccggtctttcgccgggcggcgcctcagcccttctttccgccggcttcccagcccgcggcgacggcgtccagatcttcgacgaaaacgctccggccgtcgaaacgcccgccccgggcgatgacgagaccgggagcccgctggaagagcgttccggcgaaccggccggtttcggtgatttcgatctcctcggtcacggccatctcgccctcgaagtcgcccgaaacgacggctttgcgcgcgcggacgtcggcccggaccttgccgccggcggcgatgatcagctcgttctcggcgatgatgcggccgtggaatgagccgcacaagtgaatgacggccgtcgactgcagaacgccgtccatcgaggcgccctcgctgatgacggccaggcttttctcgaccttgtcttctctggatttttctttggacacggcatcttctccggccggaatcttatgccgggacggccccgaagtcaatccggccgatcgaccgggcagagccggccgcggccggggggggccgcggatctccgccgaatgatcatccgacgacgggagaccttcggcgacgaatttgtttgacagccgcggaccgaaaaaggtaaattccatccgaaaacgatgttccaggcgacttcggtcgagcacagaattgctcccggggcacggcgaccgggggcttcctttccgttcgcggtgttttttttcctgctgattttcctggccctcgttccatccggaccggccgccgctccgccgggcgcggatccggcgatggccttcggattcaagggctacggcctcgaccaaggtctcacgtctccctcgatcacgaccatggtccaggacctggacgggttcctgtgggtggggacggaggacggtctcttccggctcgaagggaagcgtttccgccgcttcggaaccgaggacggtcttcccgccaataatatcgaagccttgtccctcggccgtccccggggcatttgggcgaccacttccaaagggatcgtccggtgggacggccggcgattcctgcgtccgggaggtttcggtttcccgggcttcgacaaccggccgggtctcgccgtccccggcggagcgatcattctgtctcatttcgaggctaagcagcgcttcttcagctccacggatgaaaagagcttcagcgagctgaagggcttgccctggggcggcggggcgaattgcgcctttttcgatgccggccgcaatttcctgctggtgtccctccaggaagggctttgggcctgggatggaaaggcttggaaaagccgcgtccttttcgacgacgccgaaggccacaaggatattcgaatgcttctcgtcgaccgggccggccgcatctggatccgcctgacggaacggctttaccgcctggaatccttcgaggcgcccccggtcgcggtgacggttccggaatccctgtctatggtcaatcattttttcctggtcgaggacgcgttcggccgcgtctggaccaataccgcccggaatctgatctgggtttcggaatccggatcgggagtgctgggcgagcgccagggccttcctcccaccggagcgttcgtcctctatgtggacgtccaaggaacgctctgggcgggtggagacggcgttttcaagcttctgggagattctctttggagctgggccacgcggaaagaaggccttcccgcggatgtcgtttggtcgatctgccgaacccgggacggacgcgtctgggcgggaacggggggcggcctcgctttcggaacccccgaaggctggcgtcttgtccctggaaccggccggtgtcagattctctctctctacgaggacgccgggggaacgctctgggtgggacacgagccgggaggcgggcgaaccaccggactgatgagcgttccgccgggcggaaccgaagcctggaccgttcccgtctttgggattgagacgcgagggccgttttttacgatggcctccgattccaagaattcgttctggatctcggccgccgaggccggtctgttgcgggcctttcccggtcccgccggcgtccgcgtcgagaagttcgccgttcccggctggattgaggagccgttcatcactaagatcgaccccgacggagcgggaggcatctgggtttccagcgaccagggtgccgctcattggaacggccgcgattgggcggtcctccccaagggtaccttgtccgaccaggaaatgatgtcggttttggccctcggctccgaaagcgcctggttcgccctctccagcggcaagcggcttgtccgcgtgaggagggaaggggacgctctccgcttggccgagctgctgccggcgtctcaccctctttctcagtcgctgatcttcgccctggccgccgatccttacggcgtgatctgggccgcgaccgcccgtggattgatgcgctgggaaggaggccgggtcgaacgatatgggcggaacgcgggcttccccggcgaggactgcgcccaaaacgccctctgggtggagccgaacggcgacgtttgggccgggttgagcgtgggcttggttcatggagccatgaatctccgccgtgagccgcagacgcctccgggcgtcgtcctccttgaaagcaaggacggtcagggccgcctcttggacgacgccgatcccggccccacggtctcctggccggcccgaacgatggctttccgttatgctctccgcggctcgcgatggacggagggagtcgggtttcaagtccggcttgtcggaatggaggaggcctggcggaacacggatgtgtccgaggccctgtttcccgggctggatgccggccactaccggttcgaagtccgggcggtgtcgacgacggccgagaccggcgcgccggaaagcttttcttttcggatcctggcgccctggtggcggcgctggtggtcccaattgggcggagccctgatcctggcgggagcggttgttctggcgttccgccggcgcacggcgatccttctccgccggaacgaattcctggaatcgctcgtccaagcccgaacgagcgagctggagaaagcgaatgaagcccttcgggaggccgtcctgatcgatcccctgacggggctctacaaccgccgctacttgaccttgaccatgcccgaggaggaaatccggctgcgccggatgttccgaagctatctccagaaaggcgagagccccttgaaccgcaacgaggacctggtgctcttcctgggagatttggacttcttcaagcggatcaacgacgaattcggtcacgccgcaggcgaccaggtgatcatggaaaccgcccgggtgcttcgaaccgccagccggacggcggacaccctggtccgctggggcggagaggaatttctcctggtggccaagcgtacggatcgaacgaaggcccacttgatcgccgagaagctttgccgggccgtccgcgaccatgtcagcgtcctgcccggcggcgcaacgaccggctgcaaaatcaccatcggcttcgcggctttccccatcctcgaacagaatcccgaggccttcacttgggaagacgccctgcaggtggccgaccaatgcctttatgcggtcaagcgggccggcggggacgggtgggccggcatccatacgccgggaccgctggattccgttgaaatcttgtcgcgcctgaggatggacttggccggcctcgtccgggagggcttcatccgcgtccaaagcagcttcccggaaggctcgattttcaacgggctcggcgctccgccgaaaaaatactgacggaagcggaaaaacagaaaagaatcgccggcgcgcggtctgatccccccggaggccttatattagaaggggaggagaataatgagcgcgcgcgctgttttcctgggtttggccctgatcgccgccctcgctaatgtcgccgccttgatcatgatcatggcggctctcgaccggcgggggcggaagacgaacatgtttatggctcgtcttttcacgggcaggtacctttcggcgtacaaggagacgacaaaaaaggaaatcggaaagccgggtccgctctattccctttggctcgtcgccatcatcctggccctcgtctttgcggtcatcgccgtctttttgcctcaggaataatcctgggttggccgatgaacaagcgacggagttacgggaacggccgcggccgaggtcaggagccggcggccagggcggcgatctcccgggcggcccggcgggcgacggtttccaggtagtgcgcgccgcgccggatcgcgtcctcgagcgagagggcttcggggcggatggcgtaagcggcggcgaacaacccggggacataatccgataacggcccgtcgatcgagccgcaaaaagcgacgcagggtttcttcagctcccgggccagccgggcgatgccgtcggccgtctttccccgtctcgattggaaatccaaccgcccttcccccgtgacgacgagatcggcccggcgggctttctccttaaatccggtcgcctcgatgatcgtctcgactccccggcggatcaccgctccgaggaacgcggccgtcccgaaaccgaggcctccggccgcgcccgctccgggaagatcgcggtattttcttcccagggccgcctcgacggcgtcggcgaaccgccggccggtttcctccagccggccgacggtctcagcgtccgctcctttctgaggggcgaagaccgcggccgccccgtgcggcccgagaagaggattgtcgacgtcggccaggacttcgaaacggacggcctggagacggggattgagcccggcggtctcgaccgttcgcagttcggagagcgccgccggccggggcgggagaatgcgtccctcgccgtcgagaaaccgcgctcccagggcggccgccatccccgccccccagtcgttcgtcgccgagccgccgaggccgatgaggacgttctccggccggtgctccaaggcggcctcgatctggcggccgaggccggaggtatcggaccgcaggatgtcccgcctcccctcgaccagcgtcaggccgctggaacgggccgtttcgatcacggcggttttgcccccgggccgcagaagaaattcggccgagacgggatcgcccagcggaccggggcaggtcacggaaattttccggccgccgccggcgccgtaaaacgcctcgacggtgccgtcgccgccgtcggccgtggggacgacatcgatcgcggccgggacgccgaggcgggcgaatccctctcggagacccgcggccacggccgctccggcttcgattgaagtcagggaacccttgaaaccgtcgatcgcgatcagaatgcgcattttattcttcttcactccccggacggaatggattcgggaacgcagtaggggccttcggggaagacggccagtgttttgccggggccgagggcagtgtccaaggcggattgaacggccgcgcccagccggccgcgggaagccgtccggcccgtcaacgtcaagatcctcatcgtctcctccggcagtccgtcggagaggaaaagcaagccgccggccccgacccgggccagggcccgggcctgcatctgcagctcccattggtccacggtgaagacgccggggcgcttgatgtcggccaggaaatcgtcgaagcggccggcgtactccctcaacaacccggcgtaagcggggcttcccagcccctcggagcagccgccgaaggcgatgaccgtccccccttcccggacggccggaaggcaggagacgaaacccttgacgcactggtaaaacgtcgcgtcgaggggatagccgccgcttcccgtcaagacgacgtcggctggacggcggaccggacgcacggcgcaggtttggacgaaggcgcaggcggcttcgtgggccggttccagggcgccggcaaacgcccggacaaggcggcggccgcggtccacgacgacgttgagagtgaaatcgacgccggcggcccgggcgatcgagagggactcctcatggaggggattgccttcgagaacggcgttggccgcccgcggatcggaaagcatcttttccccgtggaattcgcggatcgtttcgagcgaggacaggcccgggcagacgcttttccggccgccggagaaaccggccatgaaatgcggctcgacaagccccgtcaccagccggaagccggcttcgacgaaccgccggttgagacggatggccgcgccggaggcgctccgcccgggcgccgcggccaggccggggccgtcgccggcttggtgatcctcgatccggcagcggtcgacgatgtccgggccgaacatctcccggcgctcggcggtcgtgctcgggcgatgcatcccggcggcgatcaggatgagaatatcattttggggaactccggccgcggcgatttccccgagaaggggcgccaggaaatcccggtaggggacgggccgggtgacatcggaaacgacgacgacgacctcgccgggccggcgggagcccagcgcctctcgaaggggcggggcgccgagggggcgttggacggcatcgagaacgaggctcgccgccggcgccgccgggacgggatagcgggaaacgaagaggtcggcgtcgtcgggaacacgaaggaggatttcctcccggctggacaaggcccgcacgttcatcggagtgtcttttttacggagaaagctcccggaggccggcctcgagcgcctcgatttgggaacggcattcggccagcttccgcctttccttttcgacgacctcggctggagcccgggcgacgaagccttcgttgccgagcttagcctcgatttttccggcctcctcgatgagcttgtcccgcttggccgtcagctgccggcgttcccggaccggatcgaccaggccgggaacgaaaatctccatgcccccggcgacctggacggccgccgccgccggccggacgacagccggacccgcgtccagggactcgagatgagccaaatgaatcacgaaggaacgaaggcgggccaggaccgcggcgtccttttccgtcgtccggacatgaaccggaagcttcagggcgggtgaaacgccgcggcgggcgcgcatgtcccggatcgcccggacgagatcgaacgccaggccgaaatccgcctcgagcgcgtcgtcctcccattgcgcgttcgggacgggccagcgggcttggagaagaagcggggatggcgggagcggggccgcgagtcctcggaccgggcactgcccgttcagccgttcccagagggcctcggtgatgaatgggacaaagggatggaacaggcggaggacatggtcgaaggccagggccaggacggaccgggccgtcggggccgcgccctcgtccctcatccggggcttgatgatttccaggtaccaatcgcagagctcgccccagaagaattcccgggccgccccgagggcggccgagggattgtaagcctggagctcttcatccacattccggatgaccttggaaagacgggaaaggatccagcggtcctctgcggccaagtcggattcggaaagcggccggaagggatgcccgccgagattctgaaacatgaaccgggcggcgttccacagcttcgtgcaaaaggcccggccggtctcgaagcgctcgctgatgatcttggccgccggcaggtcgggcatggtcccgagaacgtcgaactctttgccggtcctggggtcgatgtacgtgaagatcgagcggccgtgtttggccgcggccagatcgaccagctcgccggtgaagggcgagacggcttggaccgggaggcggatgtcctgggttcccgtctgcatgtcgcagaggacgtagcgcatcgcgtccgtcccgtacttctcgatgatgtcctcgggatcgattccgttgcccttgctcttggacatccgctcgcccttgccgtcctgaatggtggcgtggataaagctggcggtgaagggaacgtcgccccgcaggtaaagccccatgatcatcatccgggcgacccagagggtgatgatgtcgcggctggtgacgaggcaggatccgggatagtaataatccaggcagtcatcgaggccgggctccggcggcgtcaggggccgctggccgggatcgaggacggccgtggccggatcaggccagccgagggtcgagagcggccaaagcgccgagctgaaccatgtgtccaggacgtcgggatcctgaaccaagccggcggcctcgagcttcggggcgtgcagagtttcggcgtcctcgttacggagcgagacgaggatcgagtaattccgggcgggatcgagggcggcgcgcccgccgggctcgaacgaatcgccggcgtcgtcggcgatccggacgcgcatttcctcggccccggcctggggaagacgggccgcgacctcggcgattttcccgccggggaacgttccgtgccagatcgggatccggtggccccaccagagctggcggctgatgcaccagtcgcgcttctcgccgagccaggcgcggtaggttccgccgtagcgatcgtcgtcgggggcgaacgtcaggcggcggccggtcggagacttgtagccgggccgggaggcgtcgatggccgcctgagccagtccggaggcccggaactcgttgggcgtgcccgccccgcagacgatgccgccgtccacgtcgcccatccggacgaaccattgcttgctgagatacggctcgatcggcgtcttggaccggtcggaatggccgacttccatctcccggtcctcgacggattcgagcaggttccgggctttcaggtcggcgacgacccgtcggcgggcgtcgaaacggtcgactccggcgtagggcccggccgaggcgttgagcgtaccgtcggggttgaggatgttgatgatcccgatttcgtccttgtgccgctcccagacgccgtagtcgttgggatcgtgggccggcgtgatcttgacgcagccggtcccgagggccggatcggcccaggcgtcgacgatgagagggagggggcggtcgagaagaggcaggcggaggcggcgcccgtcgcgggccatgtcccgaaggcgcaacagcagggggaggacgccgcggcggcgcgattcgagattctcgagggtttgttcaagctcggcccggtcttttttcggggcggccgcgattttaaccgcggtttcggcgattcggcgctcgagctcggcggccggatcgggatggacggcgacggccgtgtcgccgagcattgtctcagggcgggtcgtggccacgacgacgaattccggttcgccggcccgcggctcgatgaccgggtagcggatgtgccagaaatggccttggactttttcatggacgatttcgtcgtccgagacggccgtctggagctggcagtcccagttgaccaggcggtcgcccctatagatgagcccgtcggcgaagagccgaaagaaagcttcccggacggcccgggcgcagacggcgtccatggtgaagcgctgccgcttccagtcgcaggagcagcccatccgctgctgctggcggatgatccgggcctggtattcgtccttccaagcccagatccgggccaccagggcgtcgcggccgaggtcatggcgggtctttccctcgagctcgaagaggcgcttttccacgacagcctgggtcgcgatgccggcatggtccgtccccggcatccagagggtgttgtcgccggccatccggcgccagcggatgagcaggtcctgcatgacgttgtccatggcgtggcccatgtgcagggccccggtgacgttgggcaggggcatcatgatgacgtaccggcggtcgcggcggtcggggacggcggcgaaggcgtcggccgcaagccagcgctccgtcacccgccgctcgtgcggggacggttcatacaatttcgggatttcatccgccatggtcttgtccttcggatcgatcgaggccctatttttaccatagacggggcgcttcctcaaatttccccttcttccgttttgaaacccccgtcgcggattgatataacatatccatgctgaaaagggcgcggattgttcctttgaatgaagcagaggaactggatatccggtattggaaagaagccgttccggaagaaaagcgggatacgcttcaagccctccgtgaaatgttctatttcataaaaaatgagaatcgaagcggacttcagagaatttttcgtattattaaacaagcataacgtcctctacttgattgtaggggggtatgcgtattctttttatgcggagccgcgttttacgaaagatttgaatattttttctcgacatcatttccaaggccgatttgatacgaaacaagacggccgtgggacggatacaggatctcagcgatatcgacaagctccagaaaatctgaaagatccgcctttgatcctccgttttttttaagagttccgggcggaaatcctcctcccccttggccggagcgggagggagccggactccgaacgcggaccggaaacgctcccgaggccgggtttcctccgagggccttttatccggaaggaaccgtcctcccggccgccgattctccgacgggggatctcaccacctcttgtatttccagaaggccaggaagccggtcatggaaatcgcggccaggcccatgatgatccagaaggccggcagctccttaagtccgaacggcagggtcacgttcatggaaaaaatcgagacgaccagcgtcggcaccatgatcgagatggtgatgatgttcaaggtcttcatcaggacgttgaggttgttgctgacgatggaggcccgggcatccatcaagctggccaagatgttcgagtagacctcggcttggcggtggcactggctgttctcgatgaccaggtcgtcgagcagctccatctcctcctgggtgaatccgaaccggccggcgttgtgccgcatcttctcgatcagcacgccgttggagccgaccgcgttctggtagtaaaccaggctcttctgcagggcgaagaggttgatgaggtatttgttctccatggccttgttgatcttgtgctcgacgtcgtcggccatcatgttgatgatccgcaggtgctccatgaaatggtaaatggcccggtagacgagccggatggtcagctcgcggagagaggtgacccgggccagttgcttcccttcgaagatgaccgtgtcgtcggccgcgaccaggatgaggacgtcgccgaagaagaacgcgcccatggtcgaggctttgaacaggagctggtcgtccccggaatagttcttgggccgcttgaagatgaaggcgatatggttcggctcgcattcgaggcgggactgctcgtcggggtcgagggcggaagctagggtgtgctcgtcgatctgatattcgtccacaagtcgtcgcttttcggattcgtcggggttgagatagagaaggacggcggccttgtcttcggccgtttcgacgattttttggttcacgatctgatagcgcttcagcatcgtccggctcctttccgctccgtctggatgtttgaggctcattatgccccgccgcccggacgaaggcaagaccttcgcgcgcttttcgaccgcgaattcgtcaggagatgtgttcgacggtctcctggtaaacgacgccgcgctcgcgaagggcgtcgagcaggaaggccgtgcactccggccgccggccgatgatttcgggaggcacgattcccttgtccgcgaacaggccgccggccaggaggcggagggcgcacgacgccgtgtagcctgtcgtccgggccatggaatgaatcccggtcgccgggtcgcggcggtcgagcaggtcatacgtgtaccggagggcgtttcccaggcgccggccttccacgatgattttcatcacggtcaggtccgattctccttcccgcagcttccagcgggagaagagaagccgggcggtgacgtcccggggccggacccggacgccgccgacctcgatctcgtcggtgtcgaaaaagcccgaatcccggaatatggccattttttcgacatggccgggataacggagggttttctccttcatgtgggggacccgcatcgttcgggcgagcgtccggagaccgtcggtgttgaaagcctccagcgtcccgacgcccgggaattccagccgctcgagctcggagagggccggcttcacgaccagctcgccgttatggatatagcgggccgggcgggtgtactcctccaggacgtcggccggcgagaacacggccttgtattcataaggccattcccgaatctccggcaggcccccgacgtagatcagaatggattgggtctcctcgagccgggaagcggcgtaaccggccaggatgttcgacatcccgggagcgacgccgcagtcgacgacggcggtgacgccggcggcttccgcctgttcctggagaagaaacggatcctcggggaaaaaggcgatgtcgacgacgcttttccgggcggcgatcacggccccaagcgtctgaaaacccatgaatccgggaaccgcgctcaggacgaggtcgtaattttcgaccaggcgggtcacggttttcggatcggcgaggtcgacccggaccgtccggatgttcggctttccctcgaggcgggcgagggcttcggcgtcccgatcggccgcggtgacttcgaaccgcgcctccgcggccaggtcgagggccgtcggcgctccgacgagtccggctcctaaaacgacgattttcatcggcatgctccttgtgatttcgcgcggcgcttgagaggggcggaaaccccggaaaaagcctggaaagggcggaaggggcgggttacaagccgctgaaccggtcgatataaatggaaaggtgtttcggcacggtcttttcattttatccgatccggccggattttcaagagaatccccggccccgtcaactttttcggccgggcggcgtatttaaaaagagaggcctggaatgaataaatcgaccgttcatttgatttttctttgggccgccgttcttgcggcgggctcgcttctcgcgaacgccgcctccgccggcggccgggccgccgatgagcggctgcttcaatacagcatcgtcggctcgtcctcctgcgaccggacgccgtgtttcaacggggtcatggcgcggatccccgtccagcggtttttgctcgagctggccgagggacccatggcccgggcgaaagccgaagcccgggacctcggcgccgcgggaatcgcggatctcttgaagctccggctggtccggttcgacggcgaccgttatctcctgaatttcgccctcttcacggccgccgatgtcggccgcatccgcgaagtcagcgagcgctatgcgggatcgctggccgaagcgctgctagcccggcgggcggacatcgagaccgccctccgggcttacgacgtcccgggcgtggatcccggctcggtcgcctatttcctcctcggctgcgtttccctggattgggacggcctggccgtgacggatgaaaaaaaataccgcaagacgacggaggaacggttcgacggaagctacgtgcccgccgccgaagagctcggggaaacgtcgttggagaaaatctactggggcagccactacgaagagttcagcggagtccatttcacctcgttcggcgaccatcatgccctgcctcggatgctgttccccgacctgctttggaatgttcccggtctttcctcccgctatcccgaggcggtgaggaatgcccaccgggagctgttgtcggactcgctccgccgcggcggagctaagattggacggatgatgctggccctgcgggagggcccgaaagcggcctgggatctcgcccgggcggcggggacggatgaagacgaatcccgcgtctttctgcgcctgctttccgttctcgaatacgtccgggaaaaggacgggtggtacgaaacccggatccccgtcctgaccggacgcgacgccgtcatgaccgccgagctgcgggcgatcggccggcgggtgatggaacaatggctggccggaaattatgaccgcctcgccgccgacctcgacggcctcagcttcacccgttccggggtgccgttcagcgagggcttcaccatgatctggcactatcttttcggaatcgtcaaccggaagctggtcgaggcgggcctgttcgccgatccctatgagccggggcgcgccttcaagggagccctcccggcggtctgcgacctcgatctctgatcagccagagacgcgtccccttttccgccggcctgatatgcgggtcgagaagcccgcggcttcctcattttctcagggacgccttggagaagagcgcctcgggcatcggggcgtcgaaatcgatcgactcgatgacgaactccgtgccgttcccctctttgaggacgtcgcggaccagggcccgcgtctggatccaacggcccccgatccgccgaacgtcgccgacctcgagcgtcttgagaaggcgcccgctcttgccgtagcgctcctccctcatgacgagaaaccgctcccggtcgacccacacccgccggacgtggtaggccgcgtcggcgacccgggccgtcagcttgaggatccggcaggggcggtcgaggatcgtctccccgccgtcgtcggccgcctcgtagatctcggaccacttcctgttttccatcatgtcctcatacgacaagtccgagcccatgacggcctgccggagcaggtttccggaaatgccgatgatccggtccgtggccggggtgtacgtccagagctggtcgcccagcttcagcatcttgatccccttctcgcgcggaggctccagatactcggtgaaggccttgtcctcgccctcgatccaggaacgggacttgatcgttcgatcgccccgccggccgtggatggtcatggccgagaccatgatcttgctcccgggcacggcattctcgtcgacgttccggagaacggcctccggcgtcaggtccgcctgctccgctcccgcggccgggaccgaaaacggcgcggacaaaacgatcaggatgattccggcgacggccggcggaattttccggggatgggcgcgcttcatgtttcaagctccttgaaaagggacgcggtcgatcgcttgtagatgcctctcccggcgatggccgtcccgatcagggtggagaggaggccggggatgaagccgatgacgtaggcgacgggcgtgacccgggtgtacaggtgggacggcagcatgaccgcggcgtttttcatcagcccggagatattgatcccgtgggcctgcagatagtagctcagggccagcccgagggcggtcccggcgaccgtgccaaggacgccgaccatgacggcctcgcccagcatcgcccggtacacgccgcccttcggctcgcccatcgccagccggacgccgatttcgccgtagcgccggaggctgccgagcaagccggcgttccagaggaccagcgacatggccaggatgaagatggtcaaaatcgctccccgaaccgtgctgaactgatcgagcagggcggccaggtcgctttggtcgcggagcgttttcatgaccggggcgagatcgccgccggagccggcctcggtccggccgttgaacctggcggcgacggcctcgatgagcttccgttcgtaggggccgtttgtccgccagcccaggatttccccggccgcgtcctccatgtcgaggaccgcctgggcgtcggccaggtccatcaccagccccgtccggtccagggcccggacgccgtagcggacgattccgctgaccgtgtaattggccgtggccatggctccgttcatcgtcgagccgatcaacgtcgccgttcccccgggctggagcttgaggcggtcggccaggatttcgccgatcaaaatctcgcctcgcttctccggcagacggccccggacgaccgtgttctccaagcccaggcgccggatctcggcgctccccggcatgaggatgtcggcggccgttcccaggaccgttccctgggctttcgtctctccggcttcatccgggacgtccagaaggccgccgaaacggatccgaggggtccaagccatattgggaaagtccgttcccaattcgctgagaagcgttccgacgccgtccagcgagaggtcgttggggagggaatccggttcggccgcgtagcccttcgtcatgaccttcacctggcccgtcagcagatcggcgttgaaatcgatgatttggtgttccgcgccggtgatgtaacactcgagaaagacggtgagcaaaaccccgatcgccacggtcaggaagggaagcaaagtccgtgaacggtcccggagaagccctttgaacagaaagcggatcatgaccatttccccttcagggcgtcggtcggtttaagggtgacgattttccgcgtcggaaggaagctgacgatggtggtcgcggccagcacgaggagaatcgtgccgaagaccagcccggtgctgtaggcgggatacaacgctttgtcgagggccaagccgaagctgtcggcctgcccggccggcaggacccagccgtgtttggacatgtaaatcaggaggggcaggccgtagaccgccccgaccgcggccgccaggatcgaaaggagcgccccctccagggtgaagagggcgatgacccggccgcgcggcatgcccagggcgatcagcatcccgatctcccggcggcggtgccagatggacaagatctgggtgttgaaaatcgccagcagggccagggccatcagggtgacgtaaaaaatcgaaaagccgagcgatttcgcttgaacgaagctcttgatatccttgaggagaacgtcgtaatcctggaagccccagccgggataggatcgaggcgcggacccgacagggacggtgacgaccgtcgcccggcccggccggccggtcatggcctggagggtctcgagcggcacccagatcagcccggaatcgacggtctggacttgggtttggaagacatcgacgacgacgacgtcggccgcgtcgaacgtcccggaggcgtcccgccagcggacggtcacggtgtcccccttggccaagcccgtgcttttcgccgtccgggcgccgatcaagccggggatttcgccgtcgccgccgagaaggcggtcgaagggcagcttgagaacgtcttggtccgggtcgacccccttgagcagggcggggaacatccggcccttgggatagatcgtcgcggagacgattaggatgggggcggcccggccggccgccgcttcggcggccaaatcggccgggatcgccgccggcgcgtcgtcgatcgtcgccgggtcgtacgggtcataggcgccggcccaatactggccgccgccggcctcctggtcgatggtgaccttggacatttcccggtccattccctcgaacaggctttggccccagatgatggccacgaaggaaaacgagaggaccagggcgttgagccaggttttcgccccgttgccgatgaggttgcggaaggcgagcttggggatgatcatggccgcctcctcacgttgtccgggcctcgtcggcggtcacccggccgtcgacgagggtgattttccggcgcaggtgggcgatgaccttcgcgtcgtgcgtcgaaaacaggaacgtcgtcccgagatcgcggttgatgtcctccatggtgtggaggatgtgatgggaattatccgcgtccaggttggccgtgggctcgtcggccaggacgaggtcgggcttcttgacgacggcccgggcgatggcgacccgctgactctgcccgccggataattgggccggccgcgaatgctcccggtcggacaggccgacccaggccagggcgtcccgcacggccttgcgccgggccgccgccgtcatcccgagaagaagcaggggaaactcgacgttttcatagaccgtgtagaccggcagcaagttgaatgtttggaagatgaagccgatgtggcggttgcggagccgggcggccttcttgtgcgagagcgtctcgattttttcccccaggacctcgacgcttcccgatgtcgggacgtcgagcgacccgacgatgttgaggagggtggtcttgcccgagccgctcggcccgacgagcccggcgaattcgccggcctgaaagacgagattgacatcccggagggcggtgatcggctgttcccccgaagggtagatcttggtcaagttcaccgtccggatcaaaacgctgttctccatgacatcctctccttcagtgattccaggcgaccatgagatagacgccgcggccgccgaagagattcacggcggccggatctccgtaaagcccgtacgaatcgggattccagaaaacgatgacgttcaagctgagccggtcgtatgttctttgccaggtcaggagacggtaccagtcccggcctgtccagtcgcggaaaaccatgacccggaggcggtcgagaagacccagagggtaatcgagggaaagggcgctcagggagcggctcgttccccgctcccagaaccggggggatgattgaaagaggagatgctcggccaggagggtgaggccgttccccaggccgaacgtgttctccaccccgaggttgacggctttttgatggcggaaggggaagacctggaaatcctgcttggtgaaggccgcctcgaaccagaggccggggccgagatcccaatagccgtccagccccaaccggctttccgggacgccggaacgctcgtccgaagcaagaggaagaggcccgcggaaggcgtccaggctccggcggtgaaaggtcacggccagctccccgccgagggcgggaacctgggcccggccgccgcactcgatcgtgccggcccgggtcggaaaggattcccagcccttgcggtcattgttgcccgtcaatccccaggcccagacggaaacgttgctttgaaacgtgtacttcaggaggaggccggtcaccccgtcggtcagttggagcggatcgttggggtcgagccggtcgaaccacatgagaggacggaggaggcgggccgagccgaactcgatcttctggaggccaagccgggcctcgaaccgggccgtcgtgaggcgggcccaaagccggtagagggccaggtcgccttttcgcgagccccagcccgaggcggcgtcgagcgtgagcgaggcgttgaccgacgcctcgatgtcgaaattccaagacgccgagacgggcgttttgagggaaaactgcggaaggtagcggacgcggagagggacgcggcggccgctttcgaagggaatggccagctcgccggagacctggccgcggaaatccgtttcctgggataaaagcggcccggcggaaagacagagggcgccagcgaaaaaaaagacgaccggcgcaagcggagctttccccgaacgcttcatagagggaaggatgggttggaaagggacgtcttgtcaagggctgaatgaatgaaacggattgagcgcgtccgccctcgggagccgcgtcccctattcaaaagttccgcggatgaagcgctcaaacagcccgacggccgcctcgagggggacgctttccgcggcccgttcattgtaggcggatccgccgtcccggacgacgcccgggccgcagacggcgtaaggaaccgggtcggcggcgtgggtcttcgtcgccagcttggtcgcgtgatccggagcgacgaggatccggacgccgggcttgctctccgcccagcccaggatttcgccgacgatgtgccggtcgaattcctcgatggcctgtattttcttcgcgagctcgccctcgtggctggtttcgtcgggcgcctcgacatggagatagacgaaatcctcgccggccaaggcttccttggcggccgcgaccttgcccgcgtaattcgtcccgagatagccggtcgccccatcgacgagccggaccttgaggcccgccagcacgcccagtccgcggacgagatccacggccgagatgaccgatcccctcaatccgaagcgttgctccagcgtcggcagacgcatcgcccggccttggccccagggccagatgtcggtggccggcgtcgcccgcttccggttggccgcgttggccgccaggacgggacgggctttctccatcaggtcgaggatcagctcccggcccggccccttcggcaggtgggaggcccattcccggccggaaatgtcgtgcggcggcgtgcagtccaggcccgccggaaaatcgcggatgatcagcaggtgccggtagctgattcccgggacgaaacggacgcggtccgttcccagggcggcctggagctcctcgatcatggggcgcgattccgcggtcgtgatgtggccggccgaataatcggccatgagcccgtcgcccagggtgacgatgttgcaccggaaagccgtatcgtccgggtccagggcggccccgatgctggcggcttcgatcggcccccgtccctggtagtgggccgcggcgtcgtaccccaggagcgataggttggccacgtcgcttccgggcgggaagccggctggaacggtgaggacgcggccgacgcggccgagggcggcgatccggtccatgttcggcgtggccgccgcttccaagggcgtttttcctccgagggcgggatggggatcgtcggccattccgtcgccgacgaggatgatgtgcttcaccgtcattcccccctcagccccgattccggacgcgttcggcgaagccgatgacggcttcgcgcatctgggaaatcggaagcacgccctcgtggaggacgggccgctcccgcagcccccggacggcccgatgggccggccggccggccagctcgctcaggcggtcgatcgcccggaactcgtccggctcggcttgcccggtgacggcgcccaggacgtcccgggcgaacttgaacgggctggcggtcgaggcgatgatggtcgccggaccgtccgcggggccgacatcgcgggagacggccgaggcgacggcggtgtgagtgtcgatgatgatcccggtctcttcgtggaccgtcttgatttcggcgaagacccggggctcgtcggcccagccggagacgacgaacgcgtcgatttttttctttgtttcggcatcgatctcgaaccggcccgtccggaagcggtcgaggaaccagggtttgatcttctccgcgtcccggccggcgatttcgaacagaaaccgttcgagattggaggagatcaagatgtccatcgagggcgacgacgtccggaaaaattcgcggtgagtgtcgtagactccggtttggaaaaagtccgtcaggatgttgtttttgttggaagcgcagaagagcttgcggacgggaaggcccatggcccgggcataccaggcggccaggatgttgccgaagttgccggtcgggacgcaaatgtcgacctcgtcgcccattttgatttcgccgccggcggcgagcagggcgtaagcccggatgtagtagacgatctggggggccagccggccccagttgatggaattgcccgtcgagagcttgatattcagcccggccaggtagtcgcgcaagttggcgtcgaggaaaagggccttgactccggtttggcagtcgtcgaagttgccccggacggcgaagacccgggtgttccggccgtcggtggtgaccatctggaggcgctgaacctcgctcacgccgccgtccggataaaacacgacgatggaaatgccgtcggcgttcttgtagccctccagggcggccttgccggtgtcgccggacgtggcgaccaggatcagagtgtgggtttgatccccggtcagggatttggccgtggcggtcaagtggggcatcagctggagggcgacatccttgaaagcggccgtcggcccgtggaacagctcgaggaggaagcggcgccggccgagcggccggagggcgacgacgtcgggcgtgtggaagttgtccgggttgtacgcccgccggaggcagccgtcgaggacaggcggctcgaaatccgtaaagtaagcggccatgatccgccgggccgtctcaagatagtcgggggcggtcagcgtgtccgcttccagccgggggatgaactccggaacgaacagcccgccccgggggaccatccccaggaggacggcctcggacgcggaggcgaagggatgattggcgtgagtgccgatgtaacgcatggtcgcctcgagacgcggtagaattagacgtaaggatgttatcattcaggggcgcctcactcaaccccttgcggaggtccacgtcaggggaaacgcttttgctttggaggcgcatttccagcgccggcgatcggatgtccccggacccggggatcaaggagccggaggccgttgaagcttggaaggacatggggagggagggcggcctttaaggaggcttcaccgatcagcggatgaagaactcgacgttgaggaattcgcgccggatcgcggccgccgggcggaatcggcggctcaggtagccgcgaaacgcggcgtaatccttcagcttgaccaggtgatgggcggagacccccgtttccacgaagaccatcttgacgttgaaaaggtcgcagtcctcgacgacttcggcggtcgtgatccggccggcctcgatcatggcttccgagacgtcgaccaagtccggcgggcagggccgccgggcgaggaagttgagaaacgggtcgtcgccgaagacataatccgccggttttgtgttttgccggatgaaggcggccgccgcccgcgtcccctcgtcccgggccaggatctttttcgggctcagggtcgggccgaggcagagcagggtcagggcggccacgaaaccgagggtgatccttcggccgatggttttcccctcagccagggcttcgcctcccgcgccgaagagcaaggccagggggacgaaagcgaaaacggcgtatcggatgaaaaaatcgccggggacgaagatgacggccaggaccgccgcggcggatgtccagagaaggacgcggatccggcggaggcccgcggcgttctcctccgctccggctcgtccggccgaaagcgcggccagggcgccggccgcgagaccgtagttgtggtttccgatcaagtgggcgatacggcggccggcttgaaggatgaaagggacggaggcggcggactccctggcggcttgaaacccgaccacggcgtcgaacgttccgggaacgaagacgagaaaaaaaccgaacggaacggcgaacgaagccgcgaatcccgcggcggccgaggcgacccgggaggccgctgttttccaggttttccgccgccggacggcctcgagaaaaagaaacgccggatatccggcgaaaatcagaacgccgttgatcttggccagggcggacaagccggccatcactccggccagcagggccgcctgggacgcgcgaccgccatccgggccggagctttcggcccgcaaagcgaaaaaaagcgcggccgtgccgaaaaagatcatcgggacgtcgggcatgaaggagcggccgagaaaaaaaacatgcttgttgaagagaaaaacgccggcggcggcaagggcgaagccggtcttcaatttaagaaatcggcgggcggactcgaaaacaaggaaggcggcgccgagcaggaagagcacggagagagcccgggcgggccagacggcgggtccgaagagcttaaaaaccgcggcgcccagataaaagccgagcggcgcctggacaagggagaaatcgcgataggggacttcgccgagcccggtccgccaggcggcgtaaaggtaggtcccctcgtcgtcgttcatcagatccccggaaagattaagaaagctcaagaccagggcggcgccccagaaaaggaaaatcccccaggttgttccgctcgtccgccgcgtcatgatttctcccttatagtggatggcgcggactcaagtcaaattcgaggggaaaaacccgccgtcggcgcgtcttctcgttctcgccgcgcgattcgtcagagagacgatcgaaggttgacaaaaagaaaatcggctcttatgattgaaatctaaagagatcccgatgaccaaggacatggccagacgccgggaagaagggacgaaggcgtcccggcggaaagctctaaccctcattttcgatttcgacggcaccatcgccgacacgctggcggccattgtccgcctggccaacaagtacaatgaagacctggggattcccccgctcgatcgaacggagatcgaggccatgcgcggcatgtcgagccgggaaatcctcaggcggcaccggatcccgctggccaagctgccgtatctccttctgcactatcaaaaggagctcggaagggaaatcgacaagttggggcttttccccggcatccgggaggttctcctggagcttaaagcgctcggcgtgcggttgggcatcctgacgtccaattcgactgaaaacgtcgaaaagttcctccaggcccgcgagctggaggtgttcgatttcatccactccgagaaaaacctgttcgggaaaacgcgcgccctccggcacgtcatgaaggaggaggacgtcgggagggaagaagtcatgtacgtcggcgatgaggcccgggatatcgaggcctgccggaaagcccgcgttccggtcatcgccgtcagctggggcttccagcatcgggaattcctggccgaccatgaccccacttacattgtcgattccccggacgaaattctcgaaatcgtcacggcgtgaagcccgcggccgccgggctctatgtccatttccccttctgccgccggaagtgtccgtactgccatttttacagcctcccggcggagacggccggaatccggccccgggtggaagcctggcggaaaggaatcgccgcggaagcggccttgttccgctccggccggtccgtcgcgggctcggcggttcacgagacgccgctcgtcttcgacacgctctatctgggcgggggaacgccgtccttggccgatcccggcgacgtcgcccgtctcaaggacgacctggccgggcggcttcccttgcagccgcttgaattcaccctggaagccaatccctccggtccggaaaacgaggagaggagcgattcggcccggttccgcggatggatccgggccggcgtcacccgcttaagcgtcggcgcccagtccttcgacgacggcgtcctccgcgttctcggccgcccggcgtccgccgaccggaccgtttcgttcgtccggcgggcccgggacgccggctttgattccctcagcctggacttgatggccggcgtgccgggcgaaacgccgcgttcctgggaccggactctggacgccgtccggcttctccggcccgaccatgtctccctctatttccttgaaaacgtcgaaggcctgccgttggagaaggtcctgcgggagcatcccgtggatgaagacgcggccgtcgacgcctttgagcgcgcggccgatgcgttggcggagacgggcctgcgccggtacgagatttccagtttcgcccttcccggaaaagaatgccgccacaacttcaagtactggcgctatgagccgtttctcgggctggggccgtcggccgcctcccatatcggagccaagcgctggagcaacgcggccggcttcgaggaatggcgggcggggacggcggccggggccgtccccccggccgaaatcgtcgagctggatccggaatcggccgcccgcgaagccctggccgccggcctccgcctcgtcgagggaatcgatctcgagtcgttcgccgggagattcggctttcgtccggacgagcggctccggccggcgatcgaaagcctcgggcgggacgggctgatcgtcctttcgagcgggatcctccgcattccgaaggacaagcttctcatctccaacgcaatcctttcccggcttctctgaccgcggccgcgttccccttgaggagactcacgctcagctcttatttatataatcagaccattccgcgaatctccccttcgatccatcacggcaggggatcacgaacccgggcatcctggacatgttgcggcctgcccctccattcagactcagcccgctttcaatgtttacgtgacatttataatgacggggttgagagatccgcccctaaatgttagagtttcccatcatctgcaagaaaagaggagaaactcgtggacgcatcgacggggaaagcatacgggtaccgctggctggttttggccgcatatgtcttgatcgccggcgtatgcgaggtgctctggatcaccttcgccccggtcaccgggacggcggccgccttctatcacacctccgacctgatgatcgggcttctctccatgagcttcatggtggtttacattcccatgttctatccggccgcctggttgatcgacaagaagggcttccgggcgtcggtcggcctgggggcggtcatgacggcggttttcgggctcgcccggggcattttcgcttcgaatttcaccctggttttcatctcccaggtcggcctggccgccgcccagcctttcatcatcggggcgacgacgacgatcgcttcccggtggttccccgtccgggagcgggcgacggccacgggtctcgggacgctggccctctacctcggtccgctggtcgcgatgatcctgactcccgccctcgtcctccgcgtcggcttcgaagaaatgctctggatttacggcttggccgcggccctggccgccttcgtcttcctctggatcgcccgcgaacatccgcccgttccgcccgaaccgggcgcccccggggagcggatcctggtgttcgaaggcttgaagaccatgttccggcgccgggacgttctgtttttgatgaccatcttttttgtcggcctcggcctgttcaacgccgtctcgacctggatcgaagatatcgtccggccccgcggattcacgatttcccaggccggctggctgggcggcctcatgctcttgggcgggatcatcggggcgatcgtcatgcccgtcctttccgacaagatcgcccgccggaagccattcatcctcatcgccctggccgggttgattccggggctcatcggaatgaccttcaccacgagcctcccggtcctcctggccgccgggttcgtcttcggattctttctcctgagcgcgggaccgatcggttttcagtacgcggccgagatcacccgcccgattccggaaggagcgtccaacacggttctccttctcatgggacaggtttcgggcattcttttcatcctggccatggacgcgttcaaatcgaaggcgacgggatcgatgaccggatcgctggcggccttgaccgtcatgatcatcggttccttcggcctggctctctttctccccgagtccctgaagaagccggccgcctcccggccctgacgtttttgggggagtaaatccgctcggtggtccggagaacgcgggcccggctcgcgacccgctgggaaaagacggccagcttgttcaagaatccgggaacgcagaccattcttttattcttgaacgcccggagcgcccggcgggcggcccgctccggcggcatcaggagggagctgtccatccggaagtgccggtccaggccggacctggaaatcatctcggtcgcgattccgccgggggcgaacgtacagatcacgacgccttgtccccggtattccgcgctcagcccctcgctgaacgattggacggcatgcttggtcgcggcgtagacgttctggtagggaagggagatgagcccgcccaggctcgtgacgttcaagatcgccccttcccccttcgccaggaaatattcgagaaaaagagccgtggtctccatgaccgtgagacagttgacttggatgagctcgcgataggcggcgaagggccggtcgagcgtctttccatagaagctgaggccggcgttgttgatcagggcgtagacggttccggtggccgccgccttgtcgaaaaggattttcgccccgccgggcgcgccgagatcaaccgggacgggataaacccgggaggggcaggcggattcgatgtccgctttgagggacgccagccggtcggcccggcagtcggccgcgatcaggcgggctttttcaacgaccgccagccgccgggccagggcgcggccgagccccgaggcggccccggtgacgacgacgagcttatcggcgaacgataaccggcccattcctcttcatcgtacgccagcggccggagagattcaatccggtttgaaccaagggcggaaaagcggatgtttggtccgaaccccgaaaagggggaggatttggccggcgatcagctcagcgttcctttgctcatgaacaaagaacgccgtcgccgctcccgataaatcccgagcggatttcgtaatgggccaccttggattccatctcgagaagaaaatccttgtcctcgtcgaagtcgtaaacggccagctccgggttttcgccggcgaattttcggacggcgtccatcgaatcccaaaaggacaggagaaggaaatccgtcgtttcgggggacgtcttctggaggacgagcacgccccggtttccctcatgggatttgtaccagggaacgccggttttcatcatgtattcgtaataagcgtcttttcgaggtgttttgacggcgccgtgccagattcttgcgatcatgcgtattcctccagaagggaatccgcgctcgaggcggagttggccaaggcggcctggatgttgcgcggcaggatttcgctgtattccagaagaccaagccgttcgagccggccgcgcaggtccgcggggatcttctccggccgccttccttcgagaagaaggcgcgtttcttcctcggaaaacttatcccccgcctgggaccagtttcggaccgtcttgttctccgggcagaccagctggcaatgcaggcagccgacgacggcgtgatgccaggaggaatccgtccactgcggaaacggatcggatctttcgttcaaaaacgtcaagcagcgatgggcgcggagcaggaaatcctcttcctggatcgcgcccgtcgggcagaggcgccggcaggcccgacatcgggagcacgtgtccatcagccgggccggcccccaggaatcttcttcccagggaagatccgtcccgaatgccatcagccggtgaaagctgcccaggcctttcacgtaacaaacgttgttccggccataaacccccaggccgctccgggcggccaacagcttcaagggaagagatgtccggatcagccggcagccggcgcgtttcaggcattttttcagaagccgttccgccttctcgttgacgccgtactggtaggttggaggcacgaccagggtgacgggtttgacgggcaggtggaagatgaggcggataatcggttggggcgcggcgacgacgatcagggtgcggatttcgggctcggcgtcattaaaggaagaccggatatccaggagacgctcccgataaaactcctcggcgaattcgccccgccggtgccgctcctcgatttcggctttcagctcaggcgcatgatcggccgagacggtccgggcgcggaatccatgacaggccaattcctcgagaagaccattcatcgaattgccctccggccattttcccggcccggcggggaagccgatttccccggccggccgtcggacccgagcgagaacggccccgggatcgttgagctcgtgtccggcgagttcccaaagcgtcgtttggggctcgccggcggccggcgggtccggcatcccatgctgaccatcacggttccctggacgatcatcgccgcggccatgatccggcaggcgatgattccgaaaagttcgcctctttgggccgggaaacgaggcgtttcgctgtcgagttcaaaacccttcatgaataatcctccctcgggcgcggcgatttcccaaatgcccgaattcggcctaagccggattcgagaacgttagacaatcgaacgagggctggagttacaaaaccggaaatgggtatcagacgggtttccgccggtttcttcgtggagccgatgatcgaaacggccgccccgccgacggcgtcccggccgcggagctttcgggcgcgggaacttccttcaattttttgatgatccaacgggtcgtttgaagccgctcgcattccccgcgggcatccgggaaaccggccgaaatccgatcggcgtcaagctcgaggatctcctcgcagacgcacaagtaatcgtccgtgaacgcccggcaccggtccttcatcaaccggttttgaaaaagctttctcgcccgatgaacccgcgttttcgcctgccccggcttgccgccgatgatcgcggcgatgtcctcgtagctgaaggaatgcagatcccgcagaaccagggcttcgcgatagaggcggggaagatggtggcggagggtgtggacgacgcaccactggagttcgcttttgatgaccagccgttccgggttgccgtcgccggcgggaacgacgatccggtcgagacaaagcgaagcgtgccgcttccgcttccggtagtcattccgaaagacgttcaaggcgattttcgtcagccatgttcggaaactcgaccggcggttgaaaccggacagcttgggcagagcccggcagaaggtttcctgcgtcaaatcgtcggccgtggccggatcctccgtcaattgatgcaggaaattaaaaagataccgccgctcccttttaataagctcgtttacggcttcccgatcgcccgcttgggcctcccggatcaggccggcgtcgctttccatccgccgggaggaagacgtgcctttcgtctctgcggatccgggggaaagcggtcttcggcggccgtcattcaccgtttttcttccggaatccgatgatcggcgggcggatcatttccgctcccatcgatgatgacgggaagatcaggacgggagcggaatccgcgaggcgaacgcctccactttgtcccgccagccttcctccagcggccctttcatgccggtcaccaggatcttatcctcggcgactttgaccagccccttcccctcgaggattttattcatgatcgggcggacgcgctgccacttggcggtctcctcctcggtgggcattcgcccgtttttgtccggccggggcgcgccctcggtggtgagaagggcgtacttcgttcccggcgtcagccggatctttttcagaaaacggcgggcgcatcctcggggcttgccgatgcgtcccggcgagctgaacagatacaggtcggccggcggcagttttttcggtttcgcttcccgaatgtgacggatgttgacctcgactccccgggaggccatccgctccttgaattcccccgcgaccaagattccgttgccgaacttcgaagcgtgaaaatactcgatgatcatggctcctccccctttttgatcaggcgtctccggcggccttcttggcgttcctcgtcttggtcaggcaggcgacgaggatgttcatggggaaatctccttcccggctaccctttaaatgccctgaaaaacagtaatgatgaggatatctttattcaaaaaaacaagatctgtcaaggatttttaacgatcgttttaatgcggtctcccttggccggatccggcggaaagacgtcctggatcgaaaaatccacccagatcagcatctccgtgttcggcacggcggccaggatccggtcgccgatctccttgacggggtccttcatcgggccccaccacggcttgtcggtccggtagccgtattggaagccgaccggcgccggggcgaacgatttgccccactcggcgaattcggcgatcatcgcgtcggcggaatcgaagatctggctgtcgtcgacgaacaggatgccgtcgcgcgcggccgggggcatgacgtcctggcggaaatgcttgaggaacatgcggtaggaaggatcgtgggaccgggcctccgccagccaggcctcggccatctcatcggtcaccggatcgccggcgtcgggattgttggagcggtgccattcgacgtcgacgccgacgccgacgacgcacttgtgatggccgtagcgctcgagcatcacgtgaaagacctcttcgatgggcgcccagccgggctcggtctggagccagacgcggtagcccagctcgtcgaagagcttgaggacgggctcgctgatgtcctcggacatcccggtgatgagggggtcggttcccggcggaaccgggaacgacatctcggtgccgcggcccttcagccggctgacgatccagatggcctccggtttcgccccggggaacttggcggcgatctcggttccggtgcgggcccagtaccccggaccgggatcgtccggccggccgtaggtggagctccggatgcccgcccccttgaactgatccgttctttccgccggcaagattccgcaaatcaaggcggcaaagaggaccgtcaccccgatcgccgcccacggcgatgcgccgcggccgttcgctcttgtttcggttttcatcgtcatggtccttttcctcccggaatcgattcgctgacttcgaagatatcaccggaaagaggcggattcaagcgcctgaactagttcagcgcctcgttcccaaatgctttaatgcttgtatgaaggcccttagaattcgcgatggcaattcaggctccgttttttcgaagcgccaggggttcagccgggtcaacgcatcttcttaaagaccgcgtcctggacgggaggcccgccggggggccgggaataaggcggggacgcttcccgggagaagcatccggggatataaaaaaggggcggttcccgaaggaaccgcccctttccgcgagaccggcgagttcgctcttctcagctcacagctcgaaccgggcgccgattctaaagatccgcgggtcttgaatcgccgacatctgctcaaacgggtaatagggattgctggagtccgtgaaaaccgccgtcgctttgttgacgttgaacaaattgaagacttccccgaacaggccgatggtgattttcccgagcttgaattctttctcggctctcaaatcgcagatgaacagagccggcaagccccgggaaccgagcgtctcggcgtaaatcgtctcgtcccactggcgaagggttaacaggccgattctccgggcgctgatggtccgagtataccgttggcccgacaaaaacctcgtgtacgtgccgagattgattccgaaggggattttcaccgtcgccgagaccttcaactggtgccgtctctcataagggaaccgtccctcggcgttagtatgggcgttcggattctgatacaatcccgtcccccaggccgaggtggcgctgaaatcggtggccaccaggcccgacgacttggcgtacgtgtaggaagcgtgcacctgccaattattggaatatctcttgtcgagcgtcacttccacgccggagtaattcgttttagcgttgggcggattgatgagataaattcgagacacgtcggcttggggcagcctgttgtagaacgtcacggaggcgccgttgtacggatccaccgcggtgacgggctcatagccgatccagtccatttctccgttcgccaggagcttgtcgaggtccagcgcgttggagtccgcgtcgtcgatgatgttcttttccttcttggcgatgtacctgacaccgacggaccagtccgggaacagctcccgttcgacgccgagggtgaattcattcgtgtacggggacttcagatcatagtccttgtatccgtattgaggggcgagctccttccccgcgtattggacccagtcgacggcgtacaacgaataatccggattgatataagccccgaaatacgtccaggcgttgggatttccgcggccggcccacgtgttgatattgccccgggtgtatttcgcaaagctccctttcaggaacgtcttgccgtcgccgaaaatgtcataggaaaagccgatccggggggaaaggttcacccagttatagaccgtcatcgtctctttgatgctccggtcgactttaagggccccctcgaaaggcaactggtaatagtcctcgtcctcgttctgcggcggccacaggccttggttgatgtcgaatctcaagccgagattcaccgtcaggttctttatcggattccaggtgtcgttgacgtagaatccatagtcgcgcaggacgttcacccaccggatgtcatcatagaaataggcatagtaggggtctccgttgttggtactgatgaaagaccacatcgtcccgggcacctcgtgcatcgtgcattcacggatttcgatggcccttctaaacgaaaccccgaatttcaattcgtgggatccggcgaaatcctcgaggaacgtcgtgccgttggcttccacggaaacgtgccttctcggattgtcgtcatcccatccggcgcttccggaattccggtatgtcgcatattcccagaaggcgggagtctgcgttttggcaaaccggaacaatccggatatccaggccgaagctctcacgttcaggaagacgttggagctgaagaaatgggtgtaaagagcgttgatgatgtgggtatgcgtcgagatatccatcgtcgtcgcctccgtgtcatacatggaggcatatccgttcttgttgaggctgtcggaatacccgtaggaaatgacgaacttgttgtcttgattcggctggaaggtcagcttgagataaggatacggcctcgtatcgccgacggggacttgtttgccgggagtatcgtaagggaaaccggccacgtaagaacggctttggaaaaaactgacgttggcgaaaaaccaaagcttgtccctgatgatcgggccgccgaggctgaggcccggctcgatttcataatcgaagccgctgatttgtccctcgaggggcgttccattcgtgttgttggattggaaatttttcccccggtaaaacagatccactttgccgtggaattcgtttccgccggacttgctgacgacgttgacgacggctcctctgacctggccgtattcggccgacaatccgccgctttgaatcgagacttcttcggcaatgttcaggctgaagtcattggccaacatgccgatcgtcgagtccgtgacgttgacgccgtcgacggaataggcgttgtcccggaccgtggagccgtgggccgtgcccgccgtcactccaggcgtcatgttgaacaacgtgtcgaggtccctggacgccggaatgttcgccacgaaattcgtgtcgagagtcgacgtcttggtcgtgctttgcctgtcgacagtcggggagaggccgacgacgacgacttcctcgccgatcgcggcttcggccatatcgacatcgatggccgacgtaatgcccgcattcacaatgatgtctttcctgaccgtcgtgttgaatcccgtgatttcgcatttaatttcgtatgtcccgggattcaatgagggaaacctggcgacgccgctggggttggtcacccggtccattctcgccacgaccatgtccggagacgtgatggtcaccgtaacgccgccaagcggaacgccgtctttatcgacgaccgtgacggtgatttgtcccgtttggccgatctggccgaatccgaacgaaacggcaagaaaggccagggcaaggacagcgaaacactttttcatctcaacctccttgaaaaatatggcattagagatttttgtgttgcctttagaaaaccggtagcctttcgtggctgtttttaacggtcttgtcattaagaaactcaatgtcgagtttttccgagggagaaattcctccaaaatttagggccaaaagaacgacctctttcggccgaacaggccggccttgactccatttggggcccctcttcagacaatactaacaagtttttcctgcttcgatatatcacgtagatatattacacgcaatatatagcatatattgtgccaaataccagaaatgcttaataaatattaattaatttaatatcaataagataataaagatgaaaaagttaaaatgataaatgcggattcaaaaatttgtataatattcaaaattttgaatatcgtccggctgctcggtggcctcacgaaccgatgacttttgatgtcggaagatgcttccgtcagcgtataagcgtatagatcttgaagagatcccccaagatccggcggagagggatcgtcttttatttgatcgtctcgagaattttcctcacggaatcggcttgaggatcgtccggcgatagggctagaaattttttcagatgctccgcggcggaagacatctcgccctggttgagaaaagcatagcccaatttcagctcataaaggccgaaatccggcttcagctgaatcgcgagctggtaatagcggatggcctcgtccacgcgctggttgctgaaaagaagctcggccagattaaaggggacggccggatcaacgggcggcgtcaattcgatggccttcaggtaataggcgcaggtttgatcgaaaagaccttgatcctgataggtctcggccatggccacgtaaatatccgccaatctcgcctcgacttgggcggcggccggatccgcgttcaaagcttcctcgactttttgatattcggcgatcgcctccggatactgtttgagcttggccagggttttagccagattgacccgggcgaggtagaggtcggggtgactctcgacgaattccttgaacaaggacatggcttcctcgtattggcccgcctcgaaaaaatcggacgctttccggatcgtttcgcgatccgccggattgtccagtccctgaatggggcgttgctcgatttttttcaggacgatgtcctgatccggattgcggttcgctccagagagaaaaacctgggcccggccggtctcgtaaccctccttggaaaaggtgaaatcgaaaacgtccttggagaatcccatcatcgcccatttacccttttgattgctgagggtttctctttgaaaatgatagctggtcgatttcatgaggattttcacatcggccagggggcgattctcttcgtccgtgacggtccccctgacccttcccgttccctggccttcttgcccggaaagggaagaaacgcctgccgcggcgaggacgaccgtaaacagcaccgccagggttcttttcatgatggtcaccttcattccaaagcgtttttctgaagattccatgttatcaaattgggttcccgttctcaaacgagggcggcgcccgttgaggaaagagcgtggagtgtgttattttgttttcatgaaaaaccgtccgcgcggcctcggtccggcgctcgttctggtcatgttcggattccgttttccggcgccggcggttgccgtttccccgcaggcggatgcctcaaaaccggcggcggtctaccgggaatggatcgacctggtctcctacatcatcactccgacggaaaaggacgtctttttccgtttgaccagcgaccgggaacggaattccttcatcaacctcttctggaatctgcgggacccgtccaaggggaccccacaaaatgaatacaaagaggagcatctcaaacggttccagcacgcgaaccggtacttcatcggatcctcgcggcccggctggaaaacggaccggggaaaatattacattcttctgggaccgccactgaataaagttgatgttttgaccaacggattgcggcccgtggaaatctgggaatacatgggcgatccggatcagggattgccgacgatgttccggatcgtgttttacaagcgctccgaggccgacgactaccggctctacgttcccgccgtcgacggtccatacgcgctgctgtccaatccggaagcccaaatcgaccccgccgataacgcggccattctctccaaaatccaggagatcgattcgacggttgcggaaatcgccctgaatctgattcccgggaatcagtcccgcatgttcagcccttccctccaggaccagatcctgctggcgcggatcggcgatctgccgactttaaacatcaattcttcctatgccacgaacttcctgagtttcaagggattcgtcgaaaccagcgccaccacgaattatgtcgaaatgaccagcgacgtggtcatccttaaggatccgcgcctgcccttgaatttcgtccatctggctctgcagcccgggcgtctctccgtcgagcgtctcgcggacggccggtattatttcaatttcaatctggtcgtcaccctgaaaaaggacgaccgcttcatcctccagtacgataaagacttccccgtttacatgacccaggccgagctggacgggctcttctcccagggagtcatcatcgccgaccgcttccctgtcgtcgaaggcgaatacaagctcatggcgatcctccgcaattccgtcaatgatgaaatcggcttcatggagcgatcgatcaaaatcgtcgaagggaatccggcccttccccggatctccgatccgctcatctcctacggtcaaggcgctgagcaaaccgacggctatgcccccttcaggatcatgggccggagcgtgaagatcgagcccaaacaggtctttggactcaaagacgtcatcacgccgtatttcctggtcgaacgccgggaggctaaaggggaccttcggatcaggatcgaagtcgaaagcttgaaccccgaaaagccttttttcaaggagtacgccgtccttctcccttcagacgacccctacttctttttcccgaaaaccctggaccctctccccaccggagactacgctttgagagggaagatcatgggaccggacgatacggtcctccacgtccggcagaaaatttttcaaatcgcgcctcatgccgagattcctcatgctcctgtcgtctccaagatcgtcaaagacaaggacgcgtcttattactatgttctcctggcgaaggaatacgacgaaatcggctcggcgtcccaggccgatgccgcgtatcgaaccgccctggaccggcagccggtgccggccgatgccgtcaaagcctatgccgcctttctctggaagcagggccgatatgacgatctcctggccgcggtcgaagccctcgagtcccggccggaggaagctttttcctatttcagcttgaaaggacgcgcgctttaccgcaaacaggaatatcacgccgccgtcgaaaaccttcttgaagcgaacaagagatacgacagcgacgtcgacacgttgaatgccctgggcctgtctatgatccggacgggagcaaaagaggaagccgtcaaagttttaacggcctcgctcaggcttcgggcggagcagccggaaatccgagagattcttctccagttggaaaagaagtaacaggatttcttttcggaaaggcctccgcgggcgatatcaacaaagccgtttcaggatggtttggatatcactgccccgcgttcacgacggcgatccacgaagataaagcttgcaaaagaagacaacgtcgatgaaaaaaatgggcgatagaggattcgaacctccgactcctaccgtgtgaaggtagtactctagccactgagttaatcgcccagcgggtcatattttcggccaatcgccctcgaaagtcaatttcccctgatccgggccgtttccgctattttcccccgggccgcctcgtttccctccgctcccttcgccgcgattttgcctcattttctcctgatcccggcccttcttccgtccccggtggaacgttgacatccttccttaatccctttataaatatcgtaggaatttgcttaatggccgtcaggcgctgtccttattgcaaggcaatcatcgacgagtcgcagaaatactgcaataactgcggaacccagcttcttttctccgacgaggagggcgaggagcccatcaagggggagaaaatcgtcgacgaggactttcccgaaacgggcggcctcgatgagcctcccgagctcatcgacgagccgagggacgaggttgatctcgacgcggagccgggcgaggagcggcgggaaatcgaccttgaaaaggtcatcgagggagaagaggaaatcgaggacgaggcggccgccgaggatcaatctttcgttgatttgcgggaagccgaacccgaggaaagcctcccccgagcggttcccgggaagacgcctgtcatcaagctggagacggacgcgacgggcggtttttccgagaacgaaatcaagttccccctgaaattcgaaacgggcgagcttgagatccccatgccctcccatccgtcgttcctttcgaaaaaatcggcctcggccaaggagaagagcgtcgacctctcccggattccgccgggccggagggaccacgacaccaaattcgaaatcgcccggctgatcgccgattttgagcagcggcggcgcaattatacggccgagctcgggatcgaggcggccgaggccttcccccggattccgtcgggacggagggggcgcgacgcgaaatccgaaatcacccgcttgatcgccgatttcgagaagcggtggcgcgacttcaccacggagatcgggacggaggcggccggcggcccctcccggattccctcgggcgggaaggaccgcgacacggaaatcgaaatcacccgcctgatcgccgacttcgagcggcagtggcgcgacgtttcatcggagatcgggacggaggcggcggatgccctttcccggattccctcgggcgggaaggatcgggactcgaaaatcgaaatcacccgcctgatcgccgatttcgaacggcagtggcgcgactttaccttggagctcaggacgaaagccgccggcgccgctttccgggttctcccgggcgggcgggatcgcgacgcgaaatccgaaatcaccggactgatcgccgattttgagaagcggtggcgggactatgctgccgagcgcggggccgaggcggccgatgaccgggcttcaaggggaggagaagccgccgaggagccggtcgtccctccaaggagggcggaagtcggcgctccgccggccggcggacagatcgaaaaggaagtcgaagcgccccgggcggagccggcgggggattccgccgcggaatacgaattcggctgtccggacgaagcctcggctcccccggccgaggagacgccggaggaggagccgtcttcaaccgatgaccgtctgccgttcctggccggaagcttgaaaaaagcgatcgccgaggggctgaccgccggcttggaggcggatgacggcacgcggcaccccgtttttaccacgagggatcttgaagaggaaatcggaccgccgaagccgccgagtccgcctctcgtggaaaaggatctcatcatcgaggagcgaagcgtcgaagacgtcgccgcggaagcggcggaggacgccggtcttgtccccggggaagcagccgtcgccgaggcggaaaccgccggcgaaaagccggccgagatgtccgggtttcttcagaccggggaggaggccctccgttcgggcccggtacgggaaacggccgagccggactgggaatcgggcaagacttcagtcgccctggaaacgttttttcctccggcgcctgagggaaagccggaggaaaaactcttcgatacggaagaggcattcgcgccgctttcgacgatagggttgccggagtcggtgccttccgtctcgccgcccctgtcttttgaaatcccggtctctgaggacgagatcgagcgggagctcgaggcgatcgctccgcgccgacagcccgaaattccggaaaatcgtcgtccggaatcccccgccgttgaggtcgaggaagaatcccggggcggatcctttctcgaggaagcgggagagaaggaatccgaacaggcccccgccgtcccggaaatcggggaagcgaaggcgcccgcgcgcgcgccggtcgtccggctgggatttttccggcggatcaaagcgacgattttcgacctgctggtcgtcgggcttttctgggtggtcgcgaccgtcctggccgcccatttcatgtcgacgccggttctcgacctgatcgccacggccgccggaccgctggcgatcctctacgccgtcctactcggggtgtatcttttcctcttccttttgtttttgggagagacgcccggagggcggctggtgacgccccggaattaagcgccgggggcccgctcttcgccgaaccggaattccgtcccgagaaaccgttccctggccttcgggttcgcggccagccgggcgggtgtgtccatcaccaggatctccccgtcgtcgatgaggtaagcccggtcgacgatctggaacgtgtcccggacgttgtggtccgagaggatgatcccgatgccccgctccttcaggcggaggagcgttttttggatctcgcggatggtcagcggatcgattccggtgaacggctcgtcgagaagaaggaacttcggctggagaaggagggcccggcagatctcgagccggcggcgctctccgccggacaggctgtcggccccttgggcggccagcggggagaggttgaattcctcgagaagcgcggccgccgtcgcctcccgctcggcccgcgacaacggctgcagttccaggccgagccggagattgtcgatgaccgaggctttgagaaaaacggagttctcctggggaaggtaggtcaatcccgcccgcgccctccggtccgtcgggagagaggtcatgttttcgccgtccagatagacggcccccgcgtcggggcgaagcaggccgacgatcatctggaagaaggtcgtttttcccgctccgttgcggcccagcaggccgacgatctcgccggactcgaaaaccgcgtccacgcctttgaccacgatccgccggccgtaccgcttgaccaggcggcgggcttcgaggcgggacatcggtcagagcccgagggtgagccgctccgccagggcggcggggagctcggcttggaggatttttttctgggcctcggcgatctcgtactccacccggtggaaacggacctggaggcgctccgtgtcgtagatagcgaacgcggcccggggattgcggtcgcgcggctggcccaccgatcccggattgatgagataggagaagcccttttcgatcttcagcaggttgacggggccggaaaggaaccggccggcgacctgatctccatgcttggagtagatgacggggaaatgggtgtggccgaaaaacgacagggggaacggaaggtattcaaacgcttcgatcgcgtcatattccccgaagatgtagaaatcctcgtcgaagggggcgccgtggcagatttcgattttgtcgatcgtcagcggacccttcgggaggcgggcgaggaattccaggtttttcttgagaatccgggacttggtccattggatcgcggccgcggcgatgggattgaacgtctccatcgagtcctggccggcgaccgccttgtcgtggttcccccggatgacggtgagcggcttgagcgcctggatcttctggatggtttcgttgggcgaggccccgtagccgacaagatcgccgaggcaaatgtattggtcgatccggtgacgcttggcgtatttcaagacggcggtcagggcttcgaggttgccgtggacgtcgctgaagatcagggcgcgcatgcggcgtctccgcggccccgctcgaacgaagcctgaagggtctgggcgtggtaggagctgcggacaagcgggccggcctcgacgccggggaatccttcggccgaggccagggttttgagaccggcgaattcctcgggcgggtagtagcggaccaccggggcgtgggcgggagacggccgaagatactggccgatggtcaggaggtcgcaaccggcttggcggaggtcgcggaaggttttcagcaaatcgtcccgcgtttcgccgagcccgatcatcaggcccgacttcgtcgtaaatccgcgttccttggcccggcgcaggacctcgagcgatcggcggtatccagacgccggacggccgatcgccgggtagagggactcggtcgtttcgaggttgtggttgaggatttcgggggaaacggccaaaacgatgtccagggcgttcgggttcccgccgaaatcgggaatcaaggcctcgacccggatcccgggaatccgccgccgaagagcggcgatggtcgcggcgaaatgggcggccccgccgtccggaaggtcgtcgcgcgtgaccgaggtgacgacggcgtaagtcagcccgaggagggaggccgcctcggcgatccgttcgggctcggagatctcgggcgcctccgggcgtcccttcgtcaccgcgcagaaggcgcaagcccgggtgcagacgttcccgaggatgaggaacgtggccgtcttctgggcccagcactcgctgatgttcggacagcgggcgctccggcagatggtgtggaggccgcgcttgtcaagcagggcggagacggcgaagtaagcctcatcgtccggaagcctgaccttgagccaggccggcttcggggacgccggggggcggggaggatctgaaaccgtcaatattcgagatctttgtcgcgtttcatgcgacggcgcatccgtttccgagccatcgcctctttcatgcgtttgcgttctccgggcttgtaatagacggagtgcttcttgatttccttgatgatcgcttcctgctgcactttccgcttgaaacgcttgagggcgctctcgatcggttcgccttcatcgataactacgaaggccactggggattcacctcctcccgtctcgggaaagtccaagattataccggtccgcgaggaaaagtcaataaaatcggatataatgagtccgcttccatgttgttttcgatcgacgagcgcttgtcccggatccccggccttgtccacggcttcgggcggggggatctcaccgaggaaagcctccggacgtttgccctcggacgggggttacggcttgtccttctcgatcaaattcactcggatattattcatatcattgaagaagcgccggccggccgcttgccgggcgacgccctggcgacgaatgcccccggcctgcttttggccgtcaagacggccgattgtctccctgtgctcctggcggacttccggctccgggtcgtggccgcggttcacgcgggctggcgggggacgcgccttcggatcgtcgagaaaaccgttcgggcgatggccggccggttcgggacggacccggcggacgtcatcgccgccctgggtcccggcatcggggcctcgtgctacgaggtcggggaggaggtccgctcggagtttctttcggccgggctgccgggctccgtcttcgcccccgccggccgtccgggcaagcattttctggatttggcggaggccaacgcctcgcttttgcgcgcggccggtgtttccgagatcgcgcccgccggcgattccggatgcacccattgcgacccgaggatgcattccttccgccgcgaccgcgacgcgtcccgccggatgttttccttcatcggcctttcttcctgatcacaaaagattctccgccgttttcccggcgacggtcctcttcggaaatcgtcaaaccattaagacaactcgtttgatcatgccgcggatcgccttttgtccgccgcctcttccgaagcgggaagaaaaaagggggtcatatccaggaaatgaaaatcgccggcggcgagggaggccgggacggctgaggcggtcgacggaggagggcgcgattcgctccgaagaggcggacggttgttgagagaacctcggggttcccgccgacgccgcgatttttcgttaggatccgccggatccggaacgcgggaatcgaagtcgacgggcccgaggacgtgaaagcgtctcgatcaaattgatcgttattatcactccccccgtgcagttgaatcgcttctttcttttaggtatgatggccgctgcatcgagatcggtaacgatcaggaaaaagcaccatgaaccaaccctttgccgatgtcattctcccggaacttcgtctttataaaaaaggcaaggtccgcgacgtctatgaactcgacgacaagctcctgatcgtcgccaccgaccggatttcggccttcgacttcgttctgccgtcgttgattccggacaagggccgggttctgacccagctttcccgcttctggttcgaatatacgtcgctcgtctgtcccaatcacatgatcgcggccgacgtcgccgcctttccccccgcccttgccgaatacgcggatcttctcgacaagcgggcgatgctcgtccgcaagacgaaggttctcccggtcgaatgcgtcgtccggggctacctggccggatcgggctggaaggaataccgggcgtcgggcaaggtctgcggaatcaagctttccgacggtctgcgggaatcggatcagcttccggagccgctgttcaccccctcgaccaaggccgaggtcggccacgacgaaaacatttccttcaaggaaatggagaaaatcaccgggtccgtcctggccaagaagatccgcaaggtcagcctggaactctacaacaaggcgacgctccgcgctctttccaagggcatcatcatcgccgacacgaaattcgagttcggcttggacggcgacgatctcgtgctcatcgacgagatcttcactccggattcctcgcggttttggccgctggcctcctacgagccgggccggggccagccgtcgctggacaagcagttcgttcgcgattacctggagacgaccggttgggacaagacgtccgatccgccggttctcccggccgatatcatcgctaagacgtcccaaaaatacctggagatctaccgccttctttcggagaaaaccgacctgtgaaatccggttttgtcgaccttcacatccactcggaccggtcgagcgacggtgatttttcgccggacgcgctggcccggatggccgccgacaccggattcgtcgcgatcgccatcgccgatcacgacaacgtcgccgcttatcccgacgccctcgaggcggggcgccgggaaggcgtggaaatcatcccgaacatggaagtcacggcgatgtacgacgaccgggagtttcactgccagctcccgttcctcgcctgggacagcccccgcgtcgccgcgatcgtgaagcgagtcgccgaactgcgctgggaggaagcccgccggaggatcgccaacctccggtcgctggggatcgggatctcctgggaggaagtgacggcggcgtccccggacgtggctcccctcggcgtgaccatcgcccgcattctcctcgataagccggaatcgcgccgcgactcccggctgcgcagatattatgatgagggcggacggccgctgcctccgtcgtttttttaccgggattttttcctcgacggcgcgccggcttacgttccgaagcggcacatcccgcttctcgaggtcgtggacgaagccgcccggatcggagcggtcgccgttttgtcccacccgggggcctatttccagagaacgacgcatgaggacctggtcgtgctgaaggacgccggcctggccggcctcgaggtctacacgtcctatcacgacgccggccaagtccggttttatctcgaagaagcaaaagcgttcgacttggtcccgacagccgggtcggattttcacggccgggtgaaaccgcatgtctcgttcggctccatccgggaggggggatacgagatggtcgaggcgctccgggaaaggagaccgtcgagatgatcggatggttggatatcgtccttgcggtcatcatcatcgcggccgtcgtcatcggcttgatcaaggggctgctccgggaactcatcggcctggccgcggtcgtcggcggattcatcttggcggcctaccactaccagaaggcggccgacctgctgggcgggctcgtccgcggccccttggccgctcgatttttaggatttctcctcattttcgtgcttgtcgtcctggccggggcgctcgttacgttcctcgtctcgaagctgatgaaggggacgctccgggttcttgatcacctgatgggcggcgtattcggctgcctggaagggattttgatcggaggggtcctggtctttgccctcctcgtgtttccggtcgaccggacggcggtgtccgagtcgaggctggcgccgtattgctatgggctgacgaaagcagccgccgccctgattcccgcggagctcaaaaacgcggctcggagcgcataccagacgatttttaaaaccgagaagagccatggacaagaaatttgacgagatgacgatccatcagaagatggagatcctgattaaggatatggtcgagaaggaagtccggtaccgcgacgccctgaaggaatttcagaaaatctatctcgaaacggcccttcggaaatacagggggaacaagacgttgatggccaaatcgttgggcctccaccggaatacgctccacaataaagcaaaaaccttgaaaatcaagaaaatttagcagccaacgctcaagtctgctaattttttcatttttcctcttgacaacgaccattccgagttgtaaattagcagtctcattttgagattgctaatttacacttttcaaggaggtttttgatgaagatttccccgttgtacgaccgcgttcttctgaagcggatcgaggaaaaggaagtcaagagaggcggcatcattatcccggattcggccaaggaaaagccccaagaggcggaagtcatcgccgtcggcaaggggcggacgaccgatgaaggcaaagtgattcccctcacggtgaaggccggcgacaaggttctcatcggcaagtatgccggaaccgaagtgacgatcgacggcgaagagcacatcatcctgcgcgaagaagagatcctggcggtcctcgcctgattcggcgcaaatccaaggagaacacacatggccaaacaaattttaatgggcgacgaagcccggcattcgatgctcaagggcgtcaacaccctgagcaacctggtcaaggcgaccctcggcccccggggcaagaacgtcgtcatcgacaagaagttcggctcccccacaagcaccaaggacggcgtgaccgtggccaaggaagtcgagatcaaggacgcttatgagaacatgggcgcccagttggtgaaggaagtggcgtccaagacgtcggatgtggccggcgacggcaccacgaccgccaccgtcttggcccagtccatctacggcgagggcctccgttacgtcacggccggggccaacccgaccctgatcaagaagggcatcgaccgggccgtcgaagccgtcgtcgccgagctgaagaagatcagccgcgaggtctccggcgatatgatcgcccaggtcggagccatttccgccaacaacgacgaatccatcggcaagatcatcgccgaggcgatggacaaggtcggcaaggacggcgtcatcaccgtcgaggaagccaagagcatggaaacggccctggacatcgtcgaggggatgcagttcgaccgcggctacctgtccccctacttcatcaccgatcccgaccggatggagtgcgtcctcgagaacgccttgattcttcttcacgagaagaaaatctccaacctccgcgagctcctgccgctgctcgaaagcgtcgcccgcgtcggcaaaccgctcgttgtcatcgccgaggaagtcgagggcgaagccctggccaccctcgtcgtcaacaagctcaagggcaccttcatgtgcgccgccgtcaaggcccccggcttcggcgaccgccgcaaagccatgctcgaggacatcgccattctgacgggcggccgggtcatcaccgaggacatcggcgtcaagctcgaaaaggtcgacatcgcctggctcggcgaagcgaagaaggtcgtcatcgacaaggataacaccacgatcgtcgagggcaagggcaaggcggccgacatccaggcccggatcaagcagatccgcacccagatcgacgacaccacctccgattacgaccgggagaagctccaggagcggctggccaagatggtcggcggcgtcgccctgatcaaggtcggcgcggccaccgagaccgagctcaaggagaagaagtcccgggtcgaggacgccatgcacgccaccaaggcggccgtcgaggaaggcatcgttcccggcggcggcgtggccctgctccggtcccagaaggccctcgacaatctcaagctggaaggcgatctcaagatcggcacagacatcatcaagcgggccatcgaggagcccctccgccagatcgcgaacaacgccgggctcgagggctcggtcgtcgtcgagaaggtccgcgaggccaagcccgacttcggcttcaacgccctgtccgagaagtacgaggatatgatcaaggcgggcatcctcgatccgacgaaggtcgtccggatcgccctgcagaacgcggcctcgatcgccggcctgatgctgacgaccgccggcctgatcaccgagatgccggaagaggacaagaaacccgcgtatccgactcctcccggcggcgacatgtactaaggctttttcaggggagcggggcctccgcccctttcccggaaaacgacccggggagcggccgaacggccgctccccttttttttacgccccgcccgctctttctgctatgataaggcccgtggaaaatcaggcgtcccccggccggaagcggtccaagaccggacgagggggggcattccgcctgaaaatcatcgatcgttatttcctccgggaaatcctgtctcccttcgccctcggactcctcgtctacagcttcgtcctgatggccaaccagattctccagtatcccgagctgttcatctcccagggagtctctttcggcgattcgaccaagctcctcctgtatctcgttccggccatcctggccttcaccattccgatggccgtcatcatgggctttttggccgggctcggccggatgtcctcggattcggaatccacggccctgaaagtcctgggcgtcagccatgcccggatgacccggccgctgtttttgttcgccctgtgcggctgggcggccacatccgtcctgaccctctatgtgaccccgaagttcaattacctctggctgcagacgaccgtcaaggccgccctcgacaaggcccagatccgggtcaatccccgggaattcaacgccaccatccccgggctagccctctacctggatgacatcgaacgcggaggggactggagaaaagcgttcatttccttcaacgccggcccgctggaatcccgggtcgtcctggcggaccgcggccggctgaattattatccggactccaaacgggcgaccgtcgaactgttcggcgccgtccagcactcgagcctcggcgacaagccggagtactatgagcgggtcgattcggcccacatggagcaggaaatcgacttttcggggctggccaacgccttcagctccgagaagcgggcccgggagcagaatatcctcgagctgcgggccggccttgccgccgcccgggcggagctggacgatctcctgaaggagaaggcttccctggccggccgcggccttccgccgagaaatcccctcgtcctcaagaatgagatcgccgtccggcacaagaattccaacatccggtccctgcgggtggaaagccacaaacgcttcgccctcccgttcgtctgcttgattttcgtctttctcggcctgcccctgggactctcgacgaggaaaggcggccggacgagcggcttcacgatcagccttgtgatcattctggcatattacgtcttcctcacgttcggagaacgcttggccctcgacggccgcgtagaaccatggctgggggtatggggaggaaacatcgtcttcggcgcggccagcctgatcctttttattcgctcagcccgcgagcggccgcttctcatcaaatgggttcagcgcccgctgccggcccttatggccggcgcccccgctccggcggctgcgcgcgaggagaaggagtcctcccgcctccgcgggctgatccgggggctgctcctccgccttcctttcccgaacatcctggaccgctatttcttccgccggtatctctggatcggcggcctgatccttgtcagtgtcgtctcgatcttctgcatcgtgacgtttttcgaccgtttggacaatgtctattcccacgagaagccggtcctgatgctggtgaattacatttcccaccgcctcccggaattcttccagctgggcctgccgatgaccaccctgatggccacccttctcacccttggccttttccacaagttcaacgagatcacggcgatgaaggcctgcggcgtgagcgtcttccggatgtttatcccggctttcgtcctggcggcggccatcggcggcctgtcgttcttcatccaggaaaacgtcctgccgggggaaagccagaaagcggccaaagtctggaacgaaatcaacgatgtctctccgccgtcggccgaaacgcagggtttcgcctggaaggccaaccgggcccgggaccgttttttcaaatacgattacgtgaatccggccgacatgaccttccgaaaggtctggattttcgagatcgaccacgcccgctggaccctgaaaaggcggatgttcgcggccggggctcgcctgatcgacaagaccctggtcctggagaacggctggctccgggaatttcccggtgccggcggctcccgtccgcccgacccggtctttttcgacgccgaggccatcgacgtccccgagggccgggccctctttttaagcgtctccaaggatccgtcggcgatgaaattcgcggagctcggccgttatatcgaggaagtggagcagacgggcttcaacaccactcgtctgaaggtggaccgggcttcgaagatctcgtttcccttcgtcgccgtcatcatgaccctgctcggcatcccgttcgccttcgccatgggcaagcgcggcgcccttgtcgggatcggcgtcagcctggggatcgccctcgttttctggacgaccatcggcatcttcaagagtctggggggcgtgggaatcctgcccgtctttttagccgcctgggggccggccttgatgttcgggctcttggggctttatttgatgcttcgactgaaaacttgacggcttccgccggccggcgggagggaaaaggcgggctcgaccggccccttacatccggtattttccgaaatcctcggggggaagcgtctcgagccaccggcgcaggttctccgggttttcgagcgacggatccagggtgaggctctgggcccggaggacgacgtcttcctcgacgtaaatcggggcgtcggtcctgagagccaaggcgatcgcgtccgaaggccgggagtcgatgaccaggtcctcgccgccgcggcggcaccggatgaccgcgtagaatgtgttgttccggatgtcgctgatcgtcacccgttcgacggccacggacagccgttcgagaaggttggtcatcaggtcgtgggtcatgggccggggcgtggcgatgttctcgattttaagagcgatggcgttggcttcgaagaccccgatccagatgggaaggatgcgctcgctcgtcgggtcctggaggacgacgatgggcatcttggatatggggtcgatgaccagacccttgatccgcattttgatcgccaacgatgactcctagattaaaaatataaaatccgggagctcggaagtcaaggaacggcgccgatttttctcaaagggagcggtcgaaaatccttattcttccgtacgttccgtcgtaccccggcgaaaccgtcacccggctccggcggacccgctcgattccggcggcgagacgaccgggcgcggcccgcccgatctcggccggagggacttccgtcagaattcgatgctcgtttccaaactcccggatcagggagaagtaaagcgcccggcccggacgcccgcccggcctaaagcccgcggcttcggcgatgatctcctccaaggggaccaagtgaagcgccgggaccaggctcgccgccgccttcggccgctccgggcggtcggccagctcgccgacccggcggccgacgccgggcgtcaggattttgccgcagacggggcagggattcatccgcttcggcgattcctccggacggaggacgaccccgcatttccggtgaccgtcggcgtaatacttcccttcctccgggaaaagctcgacggtatagaggaaccggcgcgggtcgccgccgcgaatcgcctccgccaggcccgcgtaactgaattccgtctcaaaggcgttggcttcgcggccgagcttggccggggaatgggcgtcggaattggatacggccgtgaaccggtccagggcggagacgcggcggatcatccgcggatcggccgaaaggcccgtctcgagggcggcgatgaacggggtcatgtcgccgaagcattcctcgacggaatcgaagcccgatcgggagccgaaaagcgaaaaccagggcgtccagacgtgggcgggaatgacgagacatccgggatcgacgtcggctacgatccggcagaaggaagcggcatcaagcccgaggatgggccggccgttggaccggatattcccgatccggcccaggcgccggttgaggcgttcaaccgccgcgagaccgggggcgagcacaacgagatggatttttcggacccggccgccctgggaataaatgaagctcaattccgcggagaggatgaagtggacgtcgccgggtgccggcctgaagccgtcgggaaggccgccggctggcggctttgcttttttcagccggaaaaagccgtttccggcgggctcgagctcccgccggatccggcggctccattccgggtgggtgaagtcccccgtcccgacgagggcgaggcccttgattttcgcccaggcggccagggtgtcgaaggtcatgtccccggaggtggccagggaaaacggtgaatgaacgtgcaggtcggcgaggaaacgcatgccgccgtccagtgtaaaaaacaagccggccgatggcaagggcggccggcccggatttttttcgccccgaatcgcgccggaacggattattcgaccgtgaactcgatttttttctcgcctttgaggccggacatcttgtcgagcatccgaatgatcaggacatagcgaccgcgggagagatcctccttcttgtattccaccttgtcgcccgtccggacttcaaacgtttgtttgaggggaagaggcaggctgatcagcggcgattggaacgtttgggtgtcgaagcggagggccgtttcgatgagcgaagccttggcgatgacgtcgccggccgcatttttgaaatcgaccgtcgcattttcgatgagcggatcgtctttctgaacgagacggaatgaggccgtcccggccgggctgagcggttcgggctcgatccggcagccggcgtggctgatgtatttattttcccggtcgaagaaattgacgacggcttcgacgccggacagggcttccccggtcatgttcttcaattcgcccttcgcttcgatcgagccgccctcgggcgttctctcccaactccagtcctttaagaaaagcggcgttttagccccgtcgatatcggattcgcgggtcagtttgtccacttgaaagtcgacttggagattgcacttaccggcgtcgtcgggacgcaccccgaaaacataaaagaagaaatcgagcggttgaccgaccttgatggtcttcgacaggcagggggtgatccgggcgacggaccaagctaaaagcccccggtgaatgacgggcggcggctcgggcgactcaacccgctcgaagtttttcatcacgagaatggtggatgtatccagccggtcggtgaatccggccggatcagggatcgaaaatcggctatactggatgcctacccgggcgccatcggccgagacaagggccgtcgcggccaggtaatcccccgccagaagcggatagccgaacgcgtaccagtcggaggcctcgggatcgtatccgtccgggtcgacttcgaaagccgccggcatgtcgttttcgttgacgattttgccggcccggccgttttcgatgaggtagagccggacatagacatggccctcggcctggagcttgggagttcccgggagcggggcgtatcccagatccgcgttcttgatgttcatcacgagataggcatagacggcctgctgcgggccgggcatgatgatcggttccctgaacgtgaaggggatgtccgttcgagtcggctggctctcggccaggccggcttccatcgcctttcttatgtccttgggaatgacgtccttggcggcgattccggacgcggcggcgaggccgaacaggagaccggcgcagagaacagcagcgatatgttttttcatcgggatcgtttctcctctgaaggaatttatcatttgtcttcctaattttatctgcaatgttcatgccaagcggaattccagagatcgcttcaccgccagctgcgttaggcgtttcctattgtaaatattcgttacatcgccggacggccggagatctccgggaggaaacccgccggaccggcaaatatatcaggattccggatgcggatgcaaatccgcgcattgaatcatctcatgcgcagacgaaatccctgaaagagaggacggctgctgaaggagatggataaaggatcgcggccacagcaccgccggcctgaatgggccgattattttcttcgataggcatggacggcgcgttgatgatccctcaatgtccggctgaagacatggcctctttcgcggtcggcgacgaaaaaaagataatccgccgcggccggggccaaggcggcctcgatggaggcttcgcccggattgcagatcgggcccggcggcaggccggcataccggtaggtgttgtagggggaatcgaactgcaagtccttcttcagcagccgcccgttgtacttcccctcgcgcttaagggcgtaaatgaccgtcggatcgcattcaagcttcatcccgatccggaggcggttatggaagacggccgagaccagcggcttttcctcgggccggccggtttctttttcgatcagcgaagccaggatgacgacttgtcgcggagtcatcccgatctccgccgcccggatcctctcttccggtccgaagacgtttttgaattgagcgaccatgctcgaaagaatttcggcggcggccgctcctttggggaagtgataggtttccgggaagaggtatccttccagatcggccgcgcccgggtcaagcagggcgatttcggcggtgttccggaaccccgcttcgaaggcgtccctggcgccgaacgaggcggcgagaaagacatcgaacgtttcgccggcggtgagcccttcggccacggtgaccggatgaagatagagttttccccgcaggagggttaccagcgtctccttcgtcccccggccggccgggagggcgaattcgcccgccttgatggtctccttcccatgatgcaaccggtagaggacgacgaagggctcggatttccggatcaggccccgggcctccagcgatcgggcgacggagcggacgctctgtcccggaacgatctcgaagaggacggtctcccgtccggcgccgtccggcggccggctttcccaggcgagccaggcgcttccgccgagaactccgatcatccccgcgacgaggacgatctcaagccacaggcgaatccggcgcatcgttggcctgtccgtcgagaaacgcctggaggatgaggacggcggcgatctggttgacgacggatcgccgtttttcgatccggacgctctgggcctgcatgatcccggtggcctggcgggtcgtcaagcgctcgtcccagaggacgaccggacaaccggtgttctgctcaagccagcgggcgaagacctgggttttttcggcccgggtaccggaggtgccgtccatccgaagaggcagaccgaggacgatccgctcgatcccgtgggtttggacaagaccgcggaagaaggcggcgttctcggcttttttatccttgagggtgtaggtttccaagggctgggcgatcatcccgagggggtcgctcagggccaggccgatatgccggtcgccgtagtcgacgccgagaatcctcatcgggaatcgtagtccagacagcgtttcttgcggcggtgccgttcgagggccaggccgatgagccggtcggccaaggcccggaacggaaggccggaggcggcccaaagccggggatacatgctgatcgccgtgaaaccgggaatcgtgttgatctcgttgacgtagagccgctgggatttcttgtcccggaaaaagtccacccgggccatgccggagcattcgcaggcttggaacgcggccacggccagccgccgggcccgggcggcgacggcctcgggcaggacggccgggatcacgaaccgggtttcgttctcgagatatttttcgacgtagttgtaaaactcgttattggggccggggatgatctcggccaggagggaggcttcgggattgtcgttgcccaggaccgcgcactcgaattcccggcagtcgagcccctgctcgaccaggatcttccggtcgtagcggaaggcctcgtccatggccgggaccaactcctcccagcttttcaccttggtgatgccgacgctcgagccgagattggccggcttgacgaacagcggcggcttcaatccggcccggatccgccggacgacggccgcgggcgagcgggcggcctccggctccgtgacgacttcaagcggaacgacgggaatcccccgggaccggaacaattccttcatgacccccttatccatccccatggacgagccgagcgtcccggatccgacgaaaggaacatcggctagctcgaggagcccctggatcgttccatcctcccctcccggcccgtggaggaccggccagtaaacgtcggcccgcagcggcttcgcccgcccgctcctgtcccaagggagaaaggaatgaaacggcccgcggttgagccgggaagcggacaggtggggggaggagacttcgctccagagcccgtttttgtcgataaagatgcagcggcgccggtagcgggagcgggcgaggttgtcaaagacgttccgggcggacgtgatcgaaacctcgtgttccgcggaacgtccgccgaagaagagggcgacggttaagggagatttcatgggcagtccgcccccatcttaaaaaaaagcgaggcgtttgtctacgaggcgggattcagagggtgttcttgaatgagcggctcggattgaacttgattctctttttttggggaatctggatcgtcgtcccggttttcgggttccgtcccttgcgggcttcgcggaccttgatctcgaagctcccaaaaccggaaagattgatctttttcccctctttcagagaatcccgcatccctcggaggagtgaagcaaatgctttctgagcctgggccagggtgatccccccgtcgcgggacatccgggccaagatttccttcttgcccataggggcacctcctctcttgctttccgttgattgaatcatacgcacggaaatgccggattgtcaagcgattccgaaagtccgccggggcgcgttgacagccccaaaagccgccgttataatgaagataagttgacaggggcgcgagcccggaaaggtcggatcatgatgcgatttcatcgattcacggcggcggccgcggttggaatttttatcggggggatcgccggacccgggcttgggccggcccaggacgtcctcgagaaaaacgcggcggtccccaagctgatcagtccggtggatttggattgttccccctttatcatggaaacggccccgcagctccggatctctgttcccctccagggcggcgagcggacgctgctggccgacggggatcaattcctcgtcgatccggttcccggcgttgaatccttcgccgagggatccctatggtccattctggagtggggaccgaaagtccggggggaaagaacctccggcccgctcggaaacgccgtcttcctacgcggccgggcgcgggttcttcggatggaggccggtcgggcggtgatggaagtcgtcaagtcctgcggagcggtcacgaccggattgctcctcgttccctacatcaagggggacatcctgacgggagcggaatcgagctacgacattcccttccgggaggagggcgttccggccggccgggtcgtcttcatcgaaagcggctggtcggatatcgtcgctcggggacactgggtgctggtcgacatcggaacggaccagggactcgctcccggcaggcagatgacgttctaccgggaggaagcggataaaacgccgcggccgatcggcaactccgtcgtcgtttggacggggccccggtgggcgacgctcaagatcctcaattccaaggattcgatcctgagcggcgatctcgtccagccgaagcccgattgacaggttttcgagtttctgttagtttatcgccgtgttgcccggcttttcctcgccgggaaaccgacgttgcgcgggcgtagttcagtggtagaacgtctgcttgccatgcagaaggccgtgggttcaagtcccatcgcccgctccatccgccgttaccgggcctcgtgacaacggcgcggtacccaagtggcaagggagaggtctgcaaaacctcgattcgccggttcgaatccggcccgcgcctttctttcccgctccttttccattgacaccatctgccgatctgcatatgatggattccgcgatctgaacggaaaggaggagtcatgaacctgatggcacgagtgcaaggcatttgtcttaaacccaaggaggagtggattaaaattcagggcgaatcgacgcccgtcaaaaccctcttcctgcaatatgtcatccccctggccgcgattcccgccgcagcccagtttatcggttacggcctgatcggagtccgagtgccctttttcgggaatctccgccttccgttcgggacggcgatcgtccgggctctcctgacgtttgttctgaccgcggcggctgcgtatgtggccgggttgatcatcaacgccctggcgccgtcctttgcttcgaaacagaacatggaagcggcgatgaagctcgccgtatatgccctgactccgtcctggatcgcgggcgtgttgtacatcatccccgcgctcagcatccttgtcggcctggccggtctctacggcttgtatatcctttacctcggattccaagcgccgatgatggagacgcccaaagaaaaagtcatgtcttattttctcgtcagcttggtggtcatggtcgtcctctggctcgttatcggcctgatcatcggcagcgtgttcgccttgggggcggccccggctttataagccggcttcgagctcacggacgatggccgcgaacgccgcggccggagaggccgcctgtgtgatcggcctcccgatgacaagataatccgacccgcgggccaccgcttcggccggcgtcatcacccgtttctgatcctgagcggaggcgccggccgggcggatgcccggtgtgacgatcagaaattccggtccggtttccttccggacgatctcgatttccttggccgaacagacgaccccggagagccccgcggccctggccagggcggccaggcggagaacctgggccgacgtgtccggtgccatgccgacggaggccaggtcctcgttttgcaggctggtcagaatcgtcacgcccagaagaaccggtcggggaaatccccgcttgtccgcttcctcgaccgccgtttccgcggcccgggccatcatcgatttgcctcccgaggcgtgaatcgtcatcatccgggcgccgttgcggacgccgatccgggccgcctccccgacggtgttggggatgtcgtgaagcttgagatcgagaaagatgcccttgcccagcgcctggatctcccggagaagagccggcccttcggcggtgaaaagctccagtccgatcttgaacagggaggcttgtcccaattgatcaacgagagccatggcctgggccttgttttccacgtccagggcggtgatgatgcgttgagacggggcgagggctggggtcatggggaatctcctcggagtcgttttcgcccggctattatatccgttccgcgtccggggaatccatcgggagatgaattgcgccggggcggccggatttccgtgaaaagaccgggctcagaggccggtcttgagcgtcccgacgatgtccgcggcccgggccaggcctcgggcgtcgcaatagtccccgatttcgcggacgatccgggcggcggacgccggatcgacgaaattcgccgttccgacctggacggcccgggccccaaccagcatgaactccagggcgtcgcgcccggtgcagatgccgcccatcccgatgaccggtatttttaccgccctggcggcttgataggtcatgcggagggcgaccggtttgatcgccggaccgctcagcccgccgagaacgttgcccagcttcggcttccgggtgtccaggtccacggccatggccaggagggtgttgatcagggagatgccgtccgccccgccgtcctcggccgcccgggcgatggaggcgatgtcggttacgttgggggacagcttggcgatcaccggccggcgactgcgccgcttggccccggcgacgatctcgcgggtcgcccgaggatccatggccggacaagccccgttccgcttgacgttggggcaggaaatgttcagctcgtaggcggcgatcccctcgtggccgtcgagaaactcgatgacccggtaatactcctcgtcgccggacccgcagacattgacgatgaccgcggtgtcgcggcggcgcagctcgggcaggacgtcggcggcgaaccgttcgactccaacgccctgcaggccgatggcgttgatcaggcccgaagcggtctcgaccagacgcggcgggggattgccttcccgcggcccgaaataaagccccttgacgacgattccgccgacggccgcaagatccaggaagggcaggaattccgtcccgtagccgaacgtccccgaggccgtgagcacggggttccgaagccggagaaagccgaggtcggtgctgagatcggccatgatcaggcttcctcccagaggatctcgtccgctccgaagaccgggccgtcctcgcagatcttgcgccattgtccgccgtcatccttcttgatgcggtggacgcagccccagcaggccccgaatccgcagcccatgaccgcttccagcgacaactgggcgggaagaccgagcccgagagccatccgcccggtccgcttcatcatcgcgtcgggtccgcaagcgaacagcccgtcggggcggccgccttcgagagcccgttccaaaagcgcggtgacgaagccggcgaagccgaacgatccgtcgtcggtcgcgcagtcgagggggattccggcggattcgaatttctcccggagggggatttcggccgaagtttttccgccgtagaagacccgaacccccgctccccgcgaaatcaaggtccgggccaggtaatagagcggggcgacgccccggcccccgccgatgagccaggcggttcggccggtcccgaagccgtccatccggaatccccgtcccaggggacccaggcaatcgatggtttcgccttcttttttttcggccaggagggcggttccgcgtccggcgacccggaaaaaaagctcgatccagacgtcgccggcgtcgtggaggctgagcggccggcggagaagagggtcgaagccgtcggaggtccggatcatgaggaatcgcccgggggaagccccggcggctaaatccggggattcgagacgcagaagatgaaaatccccccagctccgttttccgatgatgcgggccgcgggttcacgcctcatgccggagacaaaatatcagaacgtccgggtgcggtcaatcgccggttcctcaggccggggatccccgggcaggcgcgtccgcggatgaattcatttcggaatttctttgggaggcggccgcatgcccctggaagccggggccgggagagggcgaagccattggaaaagggaggcggctccgttttcggaaccggcttcccgagcaggagatgatcctcgggaacgcaaggaacggaacctcgtcgaaaggaagaggaccggtcgatcagcgcggatggaaagccgcccggtcttctattccaagctgtccagcagctctttgaaccggggcaggccgcggagggggtcgagattgctgtcgtgctcgtaccaggctttctgggtcatccggccgacgccgatcgacttttcgaggcaggacatggcctcttcgtaatcgccggccagcgaatagatgcatcccaggttgtagaggagcatggaatcgtcgggggcgagggcccgggcccggcgggcccattccaggccccgttccttttccccgagggcgacgaggccgttggcgcccatgtaaagcgcccgggagtcgtccgggtgcagctcgagacgggattcggccagctcgattccgcgcaggcgcgacttgcgggcgtcttccggccggccgacttcctcgtagatctgggccatgagcaggggggactggtaatcgtcgggccggacgcggcaggcttgttcatacaggcggatggccttttcatactccccctgggcgaagctgtggcgggcgtaatagtaccagccctcgaacaggccgggctccagggcgacggctttttcgaaatggtcgaccgcctcctcgccccggccgccgagggacagggccagggcgtaggacgcctgggcttggccggattcggcgtccagctcgacggcccggcgggcggcctcctcggcctggcggcggaccgattccttcctttccgagtatagaaagatgtacgaccagcaatcggccaggccggcgaaggccgaggcgaagctgtcatcgagctccgtggcccgggtgaaaagctgaaatgcgaactcgatgtcctgcttggtgtaccggttgtagaatccgcgtccgcgaagatagtaatcgtaggcctggacgtgccgggtggagatttttcccaaggcccctttttcccgggggctgagggtgacctggagggctcggacgacgttccgggcgatctcctcctggatggcgaagatatccccgtgctcccggtcgaagatctccgaccagagctggaagccgtggagggtgtccagcaattgggccgagatccggagccggctgccgtcttttcgaacgctgccctcgagcagggtaccgacattgagacgccggccgatctcccgggggtctacggatccgcccgcgaactgaaacgaggctgagcgcgaggccacccggagttgcttcacccggccgagggcgatgatgatctcctcggcgattccctcgcagaagtaggcctggtccttctccgggctcatgtcgacggggggaaggacggcgatcgaagggatctcttcgccctgccggccggcgctttcgcggcggagcgcttccagagaatcccggaggcttcgagcggaggcgatccgggaccgggcgtccttttcgagcaacccgccgaaaatccggtcgattgaggccggaaggcgcggattggccttgaccgccgagcggggctcgtccctcaagatcgaggagatcaggtcggccgccgtgttcccgctgaacggaaggatgcccgtggccagctcgaagaggacgacgccgaaggaaaagagatcggtccggtgatcgacggcttctccgcggatctgctcgggcgacatgtagcaaagcgtcccggtgatgcccgtttccgccgtctcggtgtccgcctcgcccccggccgtcaggggaggaaggaccggctcgagaacccgggccagcccgaagtcgaggattttgagcttcccgtccggctcgatcatgacgtttccgggcttgagatcgcggtggatgatgccgcggtcgtgggcggcggcgatcgcctcggtcagggggaaggcgacggccaggagacggtcgaactcaatcccgccgggaacgatgagcttggtcaacggcgtcccctcgacgagctccatggtgtagaagagggcgtcttcgaattcctcgatggaataaatcgtgacgatattagggtggcgcagggcggcgaccgcccgggcttcgcgctccaggagggatctgcgctcgggcgacagagacgggccttcggacaggaacttgacggcgacgtcgcggtcgagacgcaagtcgcgggctttccagacgactcccatcccgccttcgccgattttctcggccaggcggtaatgccccagaacagcgtccggcgccagattcatggcggaaaacagtttaactccagcgagccggcctccgcaagagaccgttttttgggcggatcctttgacagaatggggggatttgggccataatcacctcttccatttcctacgatttcccggtaaaggagttcgccatggatatctctcgacggggccaaacggtccaggcctcacccatccgtaagttcaagccttatgccgacgcggcgatcgccgacggcgttaaaattttctttctcaatatcggcgaccccgacatcccgacgcccaagccgattctggacgccgtccggagcttcaacgaccccattctgggttatgggccggcccagggattcctggagctgaggcaagccatcgccggctatttcaaggattacgggatcagcctcaaggccgacaacgtcctcatcactctcggcggctcggaggctatcctcatggccttcgccacggtcgccgatcccggcgacgaaatcatcattccggagccgttctacacgaattacaacggttatgcctcgctggccgccctcaaggtcgtccccctgacgctcaaggtcgaggacggattccgcctcccgccggcggaggaattcgaggccaagatcacgcctcggacccgggcgatcgtcctgtgctcgcccaacaacccgaccggcaccgtctacaccgccgaggagctcggccgggtcgtcaagctggcggtcaagcacaatctgttcatcatcggcgacgaggtctacaaggaattcgtctacaacggccggcggcatatcagcctgctggaatttgaggaggcccgggaccgggtcatcgtcgtcgactcgatttccaagcggttcagctgctgcggcgcccgggtcggagcggccatcacccggaacgatcaggtgtacgcggcgatgctcaagttcgcccaagcccggctgtgcccgccgacgatcgaacaacgggcggccatcgccgcctacaagatgggcatgggctacttcgagcccgtccggcgggaatacgagcggcggcgcgacgtccttttcgaagggttgtcggccattcccggagtcgtcgtccgcaagccggagggggcgttttacatgagcgtccgcgttcccgtccgggacacggagaaattcgtcatctggatgctgaccgacttccgcctggacggccagacggtcatggtcgccccggaatcgggcttttacggcacgccggggaaaggaaaggacgagatccgggcggcgtatgtccttaatgaggatgacctccgccgggctttggtcgtcttccgggccggcctggaaaagtacaaggccacggtcgagaaatagggcttttcccgccgaaacacgggtttgaccgcgcttcgggatttattgtatatttccgcgactatattcccgcgatttgcaaggagactgccatgagccgtaaatacgtctacttcttcggcgccggtggggccgaaggcgacatgaaaatgaagaacatcctcggcggcaagggggctaacctggccgagatggccgggctgggcctgcccgttccgccgggcttcaccgtttcgacggaagtctgcgatctcttctacaagaaccgcaaaaggattccggccgatgtccgggcccagatcgataaaaacctcaagaagctggaaaaagcggccggtcaaaccctcggggattccaagaatcccctcctcgtttccatccgctcgggggcccgggcctcgatgccgggaatgatggacaccatcctcaacctggggttgaacgagaagacggtcgcggccctcatcgccaagaccggcaatccccggttcgcctacgactgctaccgccgcttcatccaaatgtatggagacgtcgtcttggggctcaagcccgtccggaaggaggacgtcgaccccttcgagaagatcatcgaggaaaagaaggcggagcgcggcctgacagccgacatggacttgacggccgacgacttgaaggacctgtgtgtccggttcaaggccgcgattctgaaaaacaccggtctcgaattccccgaggatccccgcgaacagctctggggcgcgatcggggcggtcttcgattcctggatgaacgaccgggccatcgcctaccggaagatgtacgacatccccgaggcctggggcacggccgtcaacgtccagctcatggtcttcgggaacatggggcccgactccgggacgggcgtggccttcacccgcgacgcggcgaccggggcgaacgtcttctacggggaatacctgatgaatgcccagggagaggatgtcgtggccggaattcggacccccctgcccatcgtcatgctgaagaaggacgacgccaagtcgtacgctcagctcgaaaagttccgtcatgtcctggagaagcattatgccgacatgatggacatcgagttcacgatccagcagggcaagctttacatgctccagtgccgggtgggcaagcgcaccgccttcgccgcgatcaagatcgccgtggacatggtcggggaaaagctcatctccgagaaggaagccctgtcccggatcgaaccggatcagctgaatcagctgcttcggccgattttcgacccggccgaaaaaacggccgcgatcaaggccggccgccttctgacgaaggggctcaacgccggacccggggcggcctccggccggatcgttttcaattccgtcgacgctgaggcctgggccggccgcggggagaaggtcatcctgacccggatcgaaacctcgcccgaggacatcaagggcatgaacgcggccgaggggatcctcacggcccggggcggcatgacctcccacgccgcccttgtcgcccgccagatggggcgggtctgcgtggccggctgcggcgagttggagatcgactacgcggcccagacggtcaccgtcaagggccggaagctccgcgaaggcgactggatctcgatcgacggcacgaccggcgaggtcctcgagggccgggtccaaaccaagccttcggaggttcttcaggtcctgatccagaaatccctcaatcccaaggacgcccccgtctaccagaccttcgccaaggtgatgtcctgggccgacaaggtccggatcctcaagatccggaccaacgccgaccagcccgaccaagcggccaatgccgtggcctttggggcggaaggcatcggtctctgccggaccgagcatatgttcttcggcgaaggaaagatcgagccgatgcgggagatgatcctggccgacacgatcgccgagcggaaggccgccctggcccgtcttcttccccttcagcggcgggatttcgccggcattttcgaggtcatgaagggcctcccggtgaccatccggacgatcgacccgccgctccacgaatttctgccccaagccgaaaaagaccagcgggccctggccgcggagatgggcattccctatgagaagatcaagacccgggtcgattcgctccacgaattcaatccgatgctgggattccgcggatgccgcctcggcgttgtctatccggagatcaccgagatgcaggcccgggcgatattcgaagcggccgccgacaccaagaaaaagggcatccccgtcgagcccgaggtgatgatccccctggtcggcaacgtcaaggagctggctgaccaggaaggggtcgtccgggacgcggccgaggccgtgatgaaggaaaaagcggtcaagttcaaatatcatgtcgggacgatgatcgagatcccgcgcggagccctgaccgcggacgaaatcgcctcggtggccgaattcttcagcttcgggacgaacgacctgacccaaacgaccctgggagtcagccgcgacgacgccggccgtttcctgatcccttacgtcgaaaagggcatctacgccaaggacccgttcgaggtcattgaccaggacggcgtgggacagctgatgcggatcgccgtggagaaagggcgggcggcccgccccgggatcaagctcggcatctgcggcgagcacggcggcgagccttcgagcgtcgagttctgccaccagatcgggctgaattacgtgagctgctcgcccttccgggtgccgatcgcccgcttggcggcggcccgggcggccttgaagggcgctccggaaggaaaggcctccgccggagtcaagaagccggcttcaactgcgaaaaaggcgataaaaacatcccgacggcgctgagcggtcggagcccttggccggacggccgcgtccgggaggaggttgcgtgaaaaacgcgcggattcgtctttttatttttctggccgtcgttacggctgcctttttcgccgggcctcgcccggcgtccggccgggacatccccgcgattctcggcttgaaggaccgggccgcggtccgcgaccggtggctcggcctccgcctggaaaccgttcttcccgaggtcatgcgccgggaaaagatcgacatgtggctcgtgatctgtgccgaggacaatgaagatccggtttatctgaccctggttccggccgactcctactccgcccgccggacgaccatgctcgtctttttcgaccggggcaagaacggaatcgagcgcttgacggtcgggcgctacgggatcggcaagctgtacccggcctcctgggatccggagaagatcgatcagtggagccggctggccgaaatcgtcaaggagcggaatccgtcccggatcggaatcaacgaatccgacgtcttcgccttcgccgacgggctctcggcctcgcacaaggcccggctcgtccgggcgctcggacccgatctttcgaggcggctcgtctccgccgagcgcttggccgtcggctggctcgagcgccggacgcccgacgagctggacgtctacgaccacatcgccgccgtcgcccacgcgatcatcgccgaagtcttttcccgggacgcggtcacgccgggcgtgacgacggtttcagacgtcgtctggaggctccgagagcgggtctcgtccctcggtctcgagacgtggttccagccgtccgtcgagatccagcggccgggggagtccctggacggcgaggccgatgtcatccatcggggcgacttgcttcattgcgatttcggcatccggtatctcggtttgtgcaccgacacgcagcagcacgcctatgtcctcaggccgggggaggaggacgctccggccggcctgaaagcggctttggctcaaggaaatctcctccaggacatcctgcttgaggaattcaaggaaggccgcgcgggaaacgagatcctcgcttcggctctccggaaagccaaggcggccggactccggccgagcatttatactcatcccctcgggtatcacggccacgccgccggcccgacgatcgggctgtgggacaagcagaacggcgttcccggggacggcgattaccccctgttcgccgacacggtttattcgatcgaactcaacatcacggccgcggtccccgaatggggcgggacggacgtccggatcgccctcgagcaggacgccgtcttcggccggacgggatcgcgcttcctggatgtccggcagaccgcctttcacctgatccggtgacgaggcgggccgggagctcagccccggctttgcggcaggatctcgatccagtagccgtccgggtcctcgatgaaataaatccccatcgtcggattttcgtagcagacgacgcccatctccttgtgcttccggaacgcgccgtcgtagtcgtccgtccggaaggccaggtggatttcgttgtctcccaggtcgtatttttccgtccggtcccgaagccaggtcaactcaaggcggtgggcgctccggccgtcgccgagatagacgatgagaaagctcccgtccttggcggcgatccggcggacttccgcaagcccgagggcttccttgtagaaggccaggctccggtccaagtcgaaaacgttgacgttgttgtgagcgaaggtgaaggtcatcggaaatcacgggtcgtccggaggacgagctcgcggatcaggcggccgtaagcccgctcgggatcccgggcgtcgaacatcacctgcccgtttttcaggacgctgagatcggcgatgtccatccggacccgggccgagtccatccagaacgtcgtcccgtcatgggtgtccatcagccgggcggacatgaaggcgtccatgtcgacggaagcccggatcgaaccgagaagaatggctcccagttccacccgcggccgggccttggagacgtcgaggatcccggtcagcacggcatcgacgttgtagcggctccggagatcggccaggatttccggcgtgggaacgggcgacctcgatccgcgcaaaaccgtcgccgccgggccgagatcgatgatcctggttccgggctgggaccggagcaggacttcgagaaaaacctggttggcgtactcgtcgatgtttccctcggcccgggtgtcgaagccgatgaaaccgatggttccgaagcgatcgaggttgatccgcggggccatgacgcatccggccgaggcgatcgcgataagggccggggcgaggaaggcgggaagtcgtttcatccggcgctctcctttctggaaagtacgcccattataaagccgggaggcggtttcggcaacgtcccggcgcgggccggatgagaacacagcggaaccggacggttattgcagtttttcccggccttcgaacgtgcggtagggcgagagcagggccaggatttcccggtccttggccggcagatcgttgcggacgatgcgggccagaagctctcccagaccgggaccgagcatgaatccctgcccgcacatcccctccgccagcagcagtcccttgacttcccgggcccagccgacgaggggaaagccgtcgggcgtcatcgggtagacgttgcgccatgtccgccggacgcgcaggttctgaagccgggggatcagattgaccatccggtgggcgaccatgggcaggaacgtgctggtttcgcgcttttccaggccccagatgctgggattcggggtgatgcagaacatgatctggccggtggcgtgctggtagaaataataattgaccgagctgtcggtcgggcggatgtcgacgatcatcggatggaggaacggggcgaccggctcggtcacggctccctcgtgggcgtctggtttgaccggaaggtcgagaccggccatgcgcccgacctcgtccgcccagccgccggccgcgttgaccacgatctcggcggcatattcgcccttgttcgtccggactccgcggacggctccattttccataatcaggccggtgacggtttcgccgaagcggaacatcgcccccgctttttttgccgcccgccagaaggcatgagccgaaaggaggggagaggcgctcccgtcgtcgggcgaatacgttccgccgatcaggccctcgggattgagatcggggacgatttcaagcatcgccttccggtcgagccaatcgatgttcaggccgaacgccttctgggtgaccagaagctccttgagagccttttcctcctggcggcggtaggcgacgaacatgtatccgcacttgcgccattcgatgtcgtcgccgcggcgatcccgccaggtcgagaaaatctcaagcgagcgcaggcagaggcggattttggccgggtcggagtgggtcgcccggattccgccgatggcccccttgttcgatccttggccgacgctgggcatccggtcgatgacgaggacgcggaggccgctttcggccatggccagggcggccggcgttccgacgctgcccgagccgatgatgatgacgtccgcggaggacttaatagcggccacgatcgcctccttcccggaccggccccggctcgctgccggcgaaggttcccagcgggacctccatgaacagcggccgcttcgactggtcgatgatctccttttccggaacgccctcctcccggaataagcggtggatgagagccgtgcaagtcttggccccgcaggcgcccatccccgcccggcttaccgccttgatggcgctgatgtcacggaatccctcccggatgagggcccggatctctccggccgcaacccgctcgcagcggcagacgatgacgtcgtcggccgtccgctcgacgacgcggtccaggggcttgccggcggccggatcctggacgcggatgccggcgatcctcttggcgacggccgccggagcccggaccttgaccagaaccgttcggtcgttggctttgatcgaacggacgccgacgacctcgacctcccccaggtcggcggcctcggtgtccaggatgcggacccggtcgccgacgtcgatcccatccttgagaaattcatacgggatcgtgacggtcggagaggcgggatccttgcggtaatcgacgagaacgatggccaggccgggacagatcgtgacgcatttttcgcagccggtgcaggcccgggccgggtcgagggcttcaaaggccggcaggccgcggatgtcgcccgaatggatgtggatcaagtcgcgcggacagaccgtcgtgcacggatcgcagggaatttcctggacgcagtgaaggaccggaaaaacgcccgtctccccttcgggcggagcctcgggaacggttttccccggccgggacttcaagatatcggccgttgcgtaccagtccggggagatcccgccgtcgttccggcccatggccttgaggatttccaggccgcggatctttcccgagaaaatcgcggccgaagcctcggcgatctcctcggcgtcgccggccgcgtagacgggcaggccgaactcccgggccttgtcgtagaactcatcgaccgggtcgaggccgatggcgatcagaagcgtgtcgcaggcgaaggatttctccgagccgggaacagccttccaatccttgtcgagggcggcgatcgtcacggactggacgccgtccgtcccgttggcgctcacgacggtgtgggaggtgtaaatcgggacgccgaagcgccggagcttgtccttgtggaccttgtagccgctgcattcagggagggcttcgaccagcccgacgacggggatgccggcctgcagggcgtggtatccggcgatcaggccgacgttcccgccgccgacgatgaacaggcggccggcggagcggaccaggtcccggttgacgagcgtctggaaggcgccggcgccgtaaacgccgggaagggtgttgccggggaaggccagggatttttcccgggctcccgaggcgacgagaaggacttccggattcacctggacgtagcgcttcccatccctgaggatgccgactttcttgtcgctgtagacggccagagcggtgctctgaagccagatccggacactgggataagtccggagctcgttttcgagcttggcggcgatgtcgatgccgcgggttccggcgaacactgcgttataggagccgaagaaccggtgggtctggaggacaagcttgccgccgaggcggtgcttgtcgtcgatgagaagagcggaaacgccgcgcttgccgaattcgatcgcggccgacaagccggccgggccgccgccgatgatgagaacggggacggagatttcctcgatgggagaaaggcggaccgggcttgaaacaggcgggaggacgggaagcccgtccaccggttcgagcttcaagccgggacggaccagctccatgcaagccttgaccggcaggccgtcggccaggacgaggcactgggcgcactggccgttggcgcaaaaaatgccctgcggagcccgatccttgggatggtagctgaagacgcgctcgccgttggcgaaaagggcggcggcgatggtttctccggcccgggcggaaattggacggcctttccaggtcatggcgactttttccgcggggcttggagtgaggatggggtgacgatcgatgcgaaaatcgctcacgttatctccttaatctccctggcgccagattcaggcggaattagtgtttattatatcacatttcagacatctaaggggctctcgccggcgttaaaaagaaagagcggagtaccaaagaaaaaatatcaggtcatttcagtcgattgtgcctcggggctgacgcgttcgtccatgatttcgtcgaaagccgtccttgtatccgcgggtcgagagggatgacctatccgaaaaagcggggagaaaagggtttctctcagggggaatccctatgatatgctttgccttccgccatgggccttcttgaagttcttttcggccgccgttttcccttcaagttcgtgtaccacgaggaatactggatgctgaataccgggaaacatatcttcccggtgaggaaataccggatggtccatgagcggctcgccgccttgggcgcccgaagggaaaacttcctcaagcccgagccggcttccttcgaggatcttcagctcgttcattcgctgaaatatctccgcaagcttcagaccggaagcctgtcgaaggacgagatccaggcgctggaattgccgttttccgccgagctgatctcctttttccggttgaacgtcggcggcacggttctggcggccgagcgggcgctcgacgacgggctttgcatccatctcggcggaggattccatcatgctttcgccgaccacggcgagggattctgccttctcaacgacacggcggtcgccgttgagaagctccagcgggagggccgggtcggccgggtgatgatcgtcgactgcgacgtccaccagggcaacgggacggccgcgatcttcgaaaagcgggaggacgttttcacgttctccatccatcaaatggacatctacccttcggaaaaaatgaccgggaccctggatgtcgggctgtggtcgggagacggagaccgggcctatttggaagcggtgcggcgccacttcccgaagatctacgaggaattcccgccggacatcgttttctacctggccggggctgatccgctggccggcgatcagctgggcggcctggccgtgacgaaagccgggttgctgagccgcgaccggatcatcatggagggggctcttctgcggaaaatccccctcgtgattctgctggccggaggctactcccgggatccggccgagacgaccgatgcccatgtcaacaccgtccggacggcggccgtcatgaaacgccgggcggcccgcctgatcgcccagcgcgaggcggaaaagctcgaccgccccgtttaccggccgtgaaaaacgggccgggcggaccgctcagacgccggcgtttgccttcagagtcgcggcccaagcccgggctttttccaattcgccctcgaaaagcgggccttcttttcctttgacgtaaaagggctgcggttccgaaatcatctccgctccggcgtcggccaagaccttggcgattttgccggccgcgtccccgtggatgaacaatttgacccgggtgtcgaaggcggcggctttaacgcccttgagctgttcctttttcaaggcggcaagaaaggcctgcgttctctccgacggcttccagccgagaatcgggctgccgacaacgaccagcccgaggccggaaaaatgctccggcccggcgtcggaaactgaaacggccggcgcgcccaggatttccgcgaccgtttccgcgatttttcgggtgttcccgtgattcgagtcgtaaatgacgagagattccatgaatttaatcctccaggggtgcagtctgtatcctcaaaaatttcggaataatattctgtgaagcgggccgctacggctccttgaccgcgcccttgacggcgatctccttgtgagctcccttggtcgtgtggaggcggaaaccgtccacctccggcggccaggcttcggccaggatatagaccgtgatgtattccgaataggacggcttgaaatcgccgaccatgtggaatacgagccggggctcctcgcccggcggagcggaccgggcgatccgttcggtgaatggaaggacggtttcggctcccgtcgattcccggcgcaggacgaggcctccgtcctccttcagggagaggacgtattcccccgccggaaagcttgttccggcggccttgaagggaaacgaaatgacgtaccggtcggcggccagggcgttcagcgttccgagagccaggatgacggcggccgcggccgccgcgcggcggagttgagatttcatgagcgttctccctttgccgggcgcgcgggcgtcagccggcggactccatggggaaggccggggccgtccccccctcgggcgggatcccgttcttgatcgcgtcctccatgccctcaatgaacgtatcgatctcctcgagcgtcgtgtagatgttcggcgagacgcggagagcctggtagtcgaacacttggttgggcggggcgccgccgaccagcggaacggcgacgatccggtacttcgatttcaggaaggcggcgagattccgcatatcgaggccctcgacgttgaccgcggccacgccccaggcttcgggcggttccctgagattcgtcaggatacggacgcgcggatgggctttgagggcggcggcccagcggagagtcaagtagcgcagccgggcggccttgcgctcgccgccgacggcttggtggaaggctagggcttcgccgagggcggcccggatgccccagggatgggtcccgatggcttcgaatttgcggatgtcgccgtcctgctgttcaggcgcggcctgcagcggccaaaatttcgggatcatctcccggcggacgtaaaggcagccgttgccgatgggggccatcagccacttgtgaaggctgacgccgtaggcgtcgcactccagatccctcagcttgaaggggaattgccccaaggcgtgggctccgtcgacgatcgtcacgatcccccgcgaccgggccaagcgggccagccgctggacggggaaaagctgggccgtcaggttggtgatgtggcagaaatggaagaccttcgtccggggggtgatcgcttcctcgaacagccggtagagctggtcctgcgtcgccgggacgggaaactgcagccgggtgaccttgatcccctcgcgccgcatccgctgatcccaggtcgtcagcatccgggggtaatcctgctcggtcgtgatcacctcgtcgccggcttcgaggtcgaggccgttctggacgatctgcagggattcgctggctccgcgggtcagggccagctcgtccgtggcgcagccgaattccgcggccatccgccgacggatcgtctcgacgttctcggcgaccatcgcctggtaatggacggggagcatgttgatcatttccaggtagcggaactcggattcgaggaccacgcggggacagggagcggtgaagccgttgttcagattgatcagggtccggtccagcttgtaggccagttggacttccctccagtagaattcatcggcggcgatctcctcgggcgtccggccggcggtcgaccgggccgcggcttcgatcctttcgagcccgccggcgttgaccgcggcggcggttatccccacggctccgcacagacgcaaaaacgaccgccggtcccagatttgagatttcatgaaacggctcctcctttgcgggatgacttattatattcgcaattcccattctccggtcaagcggaaaaccctttgatttccggcgccttcatgagagaatacgcgcccggcggaagccggacatccgtccgcggcggcgaggccgcctcgagacttgcggcgccgggctccctgacaaggtcagataatcctcccgggccgggaggacggaggtccctggttttatcggccggcgaaaatgctgaaggaggttctttgatgttcgaaccgcggatttataaagaacgccgaaaacggctgctccgggcggtcggatcgggcctgggcttgttcctgggcaacgaggaaagcccgatgaattatcccgataacacgtttcgcttccgtcaagacagcacgtttctctattatttcgggctggaccggcccggcctggcggcggtgatggacttcgatgaggggacggcgaccgtctgcggcgacgactatacggtcgatgatattgtttggcgaggccctcagccggccatccgggagatgagccgccgggccggcgtcgatcggaccgggacggcggacgagctggccgggcggctgaaggacgcccgccgggccgggcgccggattcatttcctgccgccgtaccgggccgaaaacgccctcaagctgaaacgatggctcggcctgaacccggaccgggccgcggccgcggcttcggtcgatttgatccgggcggtcgtcgagcaacgggcggtcaaggggcccgaggaaatcgccgagctcgaccgggcggcggacatctccacggacatgcacgtggcggcgatgcggatggtccggccgggggtcgccgaagcggagatcgcggccgaggtccaccgcgtcgccctcgccgccgggggcgacatctctttccccatcatcgcctccgttcgcggggaaacgcttcacaaccatgaccacggcaaccggttgaaaaggggcgacttgtttctcctcgacgccggagccgagacggctcttcattacgccggggatctgtccagcaccgtcccggcctccgggacgttcaccggccgccagcgcgagatctacgacatcaccctggccgcacatgaagcggccgccggagcgcttcgtccgggcgtcaaccacctcgatgtccacctcttggcgtgccggaccatcgcctggggtctcaaggaggcgggcttgatgaagggcgacccggaagacgccgtccaggccggggcccacgccttgttttttccctgcggcgtcggccacatgatgggcctcgacgtccacgacatggaggacttgggcgaggtctatgtcggctacgaaggccgtccgaagtacacccagttcgggctgaaatccctccggctggcccggccgcacaagccgggcttcgtcgtgaccatcgagccggggatttatttcatcccgcagctgatcgaccagtggcgggccgagggcaagttcaccgatttcatcgtttacgacaaggtcgagaaataccggacgttcggcggcatccgcaacgaggaggatttcgtcatcactccccggggaagccggcgtttgggcaaagccaagcccaaaacgacggccgaagtcgaggcggtcctggccgcggcgaggaaatgaggccggcggccgtcctcccgccggtcaatcgacggttttcaaaccggctttcttccgctcgtattgttccttgatccaggcgtaggtcttggccagtccggcccgcagcgggatatccggctcccaaccgaggattttcttgatgaacgtgttgtcggagttccggccgccgacgccttggggcgcggttaggtcataggtccgcttcacggcgacaccggcgattttttcgatgatcgagacgagttcgttgacgctgacgagttccgaggtgcccaggttgatgggcgtggcgatcagctcctcgcagtgggtgatcttgtcgatccccgtgacacagtcgtcgatgtactggtagctccgggtccgggtgccgtcgccccaaatcttgatctcgttcgttccgtcatcgatcgccttgatgatcttccggcagagagccgccggggccttttcccgcccgccgtcccacgtcccccacgggccgtagacgttgtggaaccgggcgatgaacgtcttgaatccgcgctcggcccaatactcctggcagaacatctcggagatgagcttttcccagccgtagccgcgctcggccatcgccggataggcgtcggattccttgagggccgtgatcttgggattcttctggagatcggtgttgtagacgcaagccgaggaggaaaagaagtaccgggccgcgccggcccgataggccgattcgatcatgtgggcgttgatgagaacggaccgcaggcactcgatccggaaccgctcgataaatcccattccgcccatgtcggcggccagctggtagacctcgtccatcccctcgaccgcccggcggcagttcttctcgtggctcaggtcgaggcaaaggcactccaccccgggcgttttccggtaccagtcggacagcggctttttgtccacggctcggatgttcgcaaagcccttgtccttgaaatagcggaccagcgatccgccgatgaaaccgccggcgccggcgacgaggatgcgggtgtcgggggccgcggcggcaagcgttgaagtcttttccgtctggggcatgatcgacctccaaaggatcgaattgcccccaatttatgccaggatccccggtccgtcaagcctttgctcgatgacgcgtcggacccggtccatccagccggcgatgtcccggcgcgaggagccgtcggcggcgacggccggctcgaggtagcaatcgatgcgcccgggccgcagccgcttgctccccttgcgcatgatccggtacgctcccgtttgaacgatcggcaggatgtccaggcccgcttccgcggccaggagaaatccgccgcgcttgaagggcccgaggttgccgtccagcgtccgcgtgccctcgggaaagacaatgaaggaaaaatccttccgggtccggatgaattcggccgcccgggccaggctttcccgtgctttccggggatgggagcggtcgagcgggatctggccgatccgccggagcatcgggccgtagaggggccagcggaaatgccgctcctcctcgacagtccgggcccggcccggaaaccgggcgtagaaaaccagcggatccaggaggctgacgtggttcatcatgacgaggtattgccgggccgggtcgaagttttcccgcccgtggaggcggacccggacgccggcgcaaaagaggacgacccggcagccggttttaatgacgggttccagggcgcggccccgggtgaacagggccgtcagaagaatcgccaggcagctgaggacgaacacgggaaaagcgagggtccagagaaaaatggagcggagcgtttcgaacaacggcttcatccgagaaaggtcaactccccgggaagcagcttgattcggagcggcgtccgtccgaggacctcgccgtcggccatcacgtggagatccggcgtcccggagaccgtcatgttcacgccctggatgatgtccactttgggatgggcggcgtgcgctccggaaaaaacgcccttgaagatttggatcatttccctccggtcgacgtttcggaagagcaccaagtcggctttcccatccgacgtttcggcgtgcggggcgattttcatcttcccgccggtgtacttggagttggaaacgaccagggcgctgtcgggcacggtccatttccggccgtcgacttcgaggtcgatcgtgttgtgcatgcctctggccagacgaatcaggacggccaggctatagccgaaggcgtgaagaaacttcagccagtcgttggtcagcttcaggatgtcggtgatcaacccgacgccgatcaggttgagggaataccgccgttccggccggccgttccgctggtaatcgaattccaggaggtcgaccttgacccggcggccggcggcgatgcggcggagggcttcctcgggggtttgaatcccgaattccaggagaaatgaattcccggtccccgaggggatgatcccgatctcgggaaggaacggcgggcggccctggaggtacatgccgttgacgacttcgaacggcgttccatcgccgccgaggcagagaacccggccgtagcgatcgcgcacggcttcgcggccgaattggaaggcctggcccgggaattccgagacgcggacctcgagtcccggaaacgcctcgcggagggcgggctccattcggccgaagacttttcgtccccgcccatggccggaaaccgggttgacgacaagcagggtccggtcctttttttccacggaaccgcttataccatgcctccgtttccttttcaaacggggagggcgcggccgaggggcgggaaccggctagccgccccccggccgccatatcaccccccatctcaccggatctgatgattgtcagaatcggcgccgatggactatagtaacaatcggagaattgccgaaaaaggatatccgagggctttacatgattcggggaagagaatgtcctgggggctgtcccgcccggattcggcgggctggaggattcaccctgctggagaccctggtcaccctggcgatcatcggcatcttgaccgtcattttttaccccagcgtcaagaattcgttcgagatgcggagcttcgacaacgcctcccgcgatattctgacaaccctccaggtggccaagtggcaggccgtcaacaccaagtatttccaccgggtccgttttgaaagcgattcggccggctggacgtaccggatcgagatcgagaagccctatggaacatggaccctgaaacaggggcagcaggtgaagcgcattccctcggagttcggtgtcaccctgacccttccggccgatctttccattgttttcgacgggaccggattcgtctccggcttcgacaccgccaagaatcagatctccctttcctcctcgcggctggcgctcctgggcgagccccattaccgcaccatccgcttctatgccagcgggtcgacgcaattcatcaagggatccacggggtgactcatgcttaaactcgtccggcggcggaaaacggcggagggggaaaagggcttttccctgatcgaggccctgatcgggatctcgatcatcggaatcgccatgctcggcctgggccaggcctttcttctcagcgtcaacaacaaccggagggcgggggagatcagccacgccacgttcctcgctcagcagcagctcgactatcttcgaaccttgaccgcggccgaactgagcgtgttcccctcgaccgcccagggggaatccgccgaccaagccctcgacccgaacggcgacggctacgccgatttccgaagaatcacgcagatcacgaccggcgggacgggctacgcggtcaaaattctcgtcttccccgcgacggccgtcggcaagacgtccgcggccttgctggccgctccgttttcctacaacgtccgggccatcctccattcaatcatcatccggtgagcaccgccatgaaaaaacatcgctccgctttttcgcgacgcgtccggggattcaccctgatcgagcttttgatcggcagcgccatcatgctcgtcgtcgtcgtggccgccctgtcggtctactcccggagcaacaagatttcggccgatcagcagcaattcatcgagatgcaaacggacgtccgggcggccatgtattttgtctcccgggacgcccggatgagcgggaccggcctgaccgaggctttggccggctacgccctggagggggtggacaatgagacgacggggacgacggagacgcccgaccggctgaaaatcctgggaaatctcgaaaatcccttgatcctgaacatccaatcgtattccggatcggcggtcaacatcagcatggatgattattctctggagaaatatccctatccggacagcttctatgtcggaaaggtcgccttgatcgtccctaacgccggctcgtcgtgccagggcgcggccgtccgggtcatctcccatgttactcataacacggacgggacgaacgaaaaggtcaatttttcgcccgggcaggctcccgggatcaatccccccggcggcctttcagacgtgtgctcgagcgaagacttcatcggcgggtcgctcatgttctgcgacctgcgcgaatactggctcgacgtcaccgggaatgtcaccggcttgacggccgggacgaacgggtacatcggcggcggccagggcggcgtcctctatatgaccctcaacggcgcccatttccccatcgcccagaatatcgaaacgatccaattccagtacaacggcgacttcgacggcgattcccagggcctcttggacggattcaaggattgggatacgacctggacgcgggagcagatctcgcggatccgccaggttcggatcctcatcctcggccggacgccgaatcccttcgcctccgtcggccgaaacacggggacgtcggccggtctctatacccggccggcagtggccaacacgccggcggctacggcccccgattggcggaagcgtttcctcttggaatcgaccgcgaacatccggaacctttccgtgaatctcttcaacacgggcttgcgatgaacagggggaagatgaggcaccggaaccgggagcggggggcggggctcttcatcgtcatcctcatcgtcgccggcctggccgccctgggcatgactctgctgacgctgacgtcgatggggccgaagatgtcgggggggctgcggtcccaggaggaggctttcaacgcggccgaggccggattcaacgccgcccaggccgtgatcaagcagtatttcggcgacggatcctggttgaacttcgagggccacaccctgactcagccgtcgaacatcgaccgccctctcatcggaaccaacatcaatcccaactatttccgccgcgtgcccgacgaggagctccttctgtccctggacccgggaaaagacggggtgcccgattacggccccctcctgttcttcaaccagacgttcgccgcgaccgaaaccggggcgaccgaccctcgcctgtcctacacggcgttcctgatcaacgacgaagccgccgggggagccgccgatccgaatgacgtcctcctggtcgtcatcggtgtcgtccgttccggatcgcggatcctggcgacgacccggctggagattgtcttggcctatgtcgccggcgcttagggggagaatcgacatgaacaaacgccttcgcctcggagccgcggccgcggcctccttccttctcgttttcctgcttcagagccgcccggccggcggtcaggcctgcgtcgaaaattccgggacggtctcggagactttccaaaccggaacgaacctcgacctgccccagtgctcggccaagctttggtacgccgatgacgcaaatccccgggacatcatgaccctcaacaagctcggggcgaacttcgccgtcagccagccggcaagcgtccccggctggatcagcgtcatcgccgcgggcgatttcaacctggacggctggatcgattacatcgggtcgagcagcgagtactccaacgccctgctcttcgtccgcaacgacggagtcaacggcaatatcgggaccttcgtcgccgacctctggatcgacggctcgaccgggaattccagcgggatcccgacgcagggcgtcggcggggcggccatcgagtcgggataccacggctcgatgacggccggcgattacgacggcgacggagacctcgactttttctacgtcacatccgtctttaattcgccctacaccctcgtccatgtctggctttttgaaaaccgtctcattcataacggcgtcaacaccggcgttctggagttcgtccggaccgacttgacgtcggcctggcggccgcttctcaaaaccctgggctggtcgtcgacggggatcgtttccctggacctcgacggcgacggcgacgtcgacatggcctacgggaacaccgagggcaaggtcttcaagatcacgaacaccggctccggcaagatcaacgcctcgacgtttatcgtcgattacgtcatggtcgagacgggctggaccgggctgggcgtcagcacgatctcgatcgccgaattcgacgagtcgccgggcctggacatgatcgtcggcagctgcgattaccccgagctgaagtactatcgcggggacggcctggggggattcgagtggctggccgacttcacggaccccacccaggatctctacaacaacatgtacgacggcgcggccacgatcagcttatgcgacgatttcgacggcgacggggacatcgacctgatcatcgggacggacaactggtgctggaacggcgtgcgcggctaccccggccaatcgggcatcgcgaccggctacgggggcaagtgctattatttcaagaacggcgggaacgccgatttcaccgtcagcctggtcttcgacgggcaggtgaaaacccccaaggtctacgacttcgactgcggcatgatcctcgattacaacaacgacggccagatggatttcctcatggccgacggcaaccacaccgactactattacgtctttctcaactccatcgccgacgtctacaacctgaagggcgtcggtctctcgacgaacctgacgccgtccctgccgggaactcagtacgccatcacccgggcccgcttcacgatcatcgaccaaggcgtcatcggctcctcggccaccggactgaccgtcacatattacctgtccaacgacgacggtttttcctgggagtattacggccaattctcgggctccgcgatcgccaatgtcacgaaccaagcctggcacgacttccataccttcggctccaagctccgctggaaggctgttctgaccgcccccgacgacgcgatctccggcttcggcgagtcctcttacgaaacgccgtccgtcgaccggctggcgattgaatacgtctacgtcgagcggcgggagtattcccggtcgtcggccgcggccgcggccatcatctccggaacccgccggaagctcatcatctcctcctccttcatgttccccggatacgagggacagctccgggcttacgatgtgaccgacatcggcttggccagcacgggcggatcaaccctccagacgatttccacggccgatccgctcagcccgacggggcggaatgtcgcggccggcggatccatcctgtgggacgccggccagcttctggcggcgcgcgaggcgtccgaccggacgatcttcacggcgtacaaaccctcgggcacgctcacccggatcgatttcaccgaggggaacgtcaacgtcctcaaatcgcttctctccgaccccaacggcgacaacgccggcttgatccgcttcgtccgcggcgaagaccggacctggaagctgggcgacatcctccattcgagcccggtcttgatgggaccgccgtcgggggacgccgtggccctgggatcgtcttacagcgattttgccgaggccaatgcctctcggacgccggtcatcttcatcggggccaacgacgggatgctccactgtttcgatctggcttcgggcgacgagctctggggattcatccccttcaatctcatccccaagctgaagaacatgtcggtgagggacgccaacggagcccggctgtacaaccacgattatttcgtcgacggaacgccgaccgtgggcgatgcctatatcaacgggcggtggcggacggtcctgatgtgcggccagggagcgggaaagggcagcaccggggccggcggcctgaattattatttcgccctggacgtcaccgatccgaacgatccccttcccttgtgggaggcgaaggattcggcgaccatgggcgagacgtggtcggtcccggccttcggccaggtcgtgtcgggaacgacgccgcactgggtggcgttcgtcggctccgggtacgacaacgatacggcccggatcatcggcaaccggttctacgtcatccggctcgacacgggagcgatcctcaagaccctgaccgtcgcgaccgacgtcaacacgagcctgagcaacaaatgcccgaaaccctacccgaacatccaggtcaccgttcccggttcgcccacggccgtggacatcaaccgggacgggcggacggactatgtgtatttcggagacctggacgggcgtctctatcgtgtgcccttcaccagcacgaacgccaacaactgggcgctgcagaccatctacaccgaccggatgtcctacccgatcatcaccaagccggccgtttttccggacccggcttcgggcggccttcctttgaagatcctcttcgggacgggaggcgacgaccgggcgccgggcgaccggacctatgccttcatcggcctcaccgacacgggctccaaggcgagcgtggagtggtatatcgggaacaaggatgagctggggctggccgcctcgcttcagacgggggagatggcgaccggggagaagatttggtccgaccccgtcatctcggacaggatcgtctatttcagctccctgatgggcagcatcgaaaacgtcaatccatgcctcaaccttgccgagaccggccgtttgtatgcccgttatgtccagacggcggccgggtgcgtcatcggcgaatcgggactcaaatcggccggcgggtcgtcgatcgaaagcctccagctggccagcaaggcccggcgggccgtcacggtcggggagcttcaggccgggggcgggtcgtcgtccaagaaggaagtctacatccaggagtacgattccacgatcgagcggctggagcagccggtcgggtcgaacctccgggttgtctcttggcgcgaaatctacaagatcatccggtaaggcgccgcctccgcctctcccggtccggccggaacgaaatcaagcctcgatctccgcgtagcgccgggcggcgattctcagcaggaaagcgaagctcaggccggccagtacggccagaacgacggccagcccgccgatgacccccgtgcccccgaggccttccccgtacagggccgtcacggccaggattaggacgatcaacagccccgcgtcggcgaaaaaggcgatcaaaacattgaagttctgcttgatggctttttgcggattcgtccatttcaagagcggccggaggagatcgatgatcattccgatcgaggtcaggacggccgcggcggccagggcgagaggcatcgccaggagaacgcagccgggcttcgccccgatgacggcgacggcggccccggccgcgaccaggatgcccaggccggcgacggcgaaggagtggaggaatttggctttgacctggtcggccggcgaaaccgggatgaccttcgacaaccagaattgggcgccttcccgggagaaggccgaggacgccgtgccgttcaggcagccgcaaatcgtcatgaacagggccgagccgaggatcaccgccgacggattcgacgaggccaggagaaggatgatctggaacgcgtcgccgcctgaaccgccgccgcccgccctggcgaagataatgaaaatgaccgggatgaggacgaccgagagaacgccgttgagaagaaaaatcggcgtccggttcatgatccgcagctcccggaggaagatcgcccgcaccggccggcggcccgaggacacacgggccgaaagagcttcccgcgagaggcgccgttttcgggcggagatctcgccgaggccgaggagtccccggtagaaaagcgcccgggcggcgaggaagagggccgcgaacagcccgaccgagactcccgcataaagcaggaatgagccgagcccggatgctccggcttccgggacaagcgcccgcgtcgcccagacgctcggcggaaacgacgctccgattttgcggacgatccctccctcggaaaaaaaggcgatcagcgcctgccggcccgggccggaggcgggcaggccccgcagccagaactgcaggccaagggccccggccatcatgaccaagcttccgccgatcatcagggcgtcctttttccgcccgacgttgacgaaacgcatcatcccgacgacgaggagggaaacgacggccaggggaatgacggggaggaaaagatagacgagaaccgcgccggtccaatagcggaggccggcccgggaatgaaggccgtaggcggcgagcacggggatgacgatgggtgaggccgtcaggtattcgttcacgacgacgacggagaacttggaaaggaggacttgggccggcgtgacgggcagggggacgaggagatccaggtcccgggcgaaatagaacgccgagaggacgtagtaaaagccgaagacgaggatcaggaattggcccgagaggaatgcgaacgtgagaagggccgcctgctggccgaggggagcgaggaggccgtagaggaagcgaatgcccttgagatagtaaagcagaacggggctcaatccggcgatccccatgaggatcagaatgatcagccagtagtcgcgcttgttttcgagaagggttttcggccggaggagggataagccgaagttgacccggaggccgacccggacgagacggaagaagtttttcattccgccgtgagctccagaaagattttttccagggactggccctcgcgctcgatcgcccgaagctcctcgagcgttccatgggcgatcagccgtccgcggtcgatgatgccgatccggtcgcagagcttctcggcgacttccatgatgtgagtcgagaaaaagagggtgccgccgccggcgcaatgggcccgcatcatttctttcatgtggtgggccgagcgggcgtccaggccgaccatcggctcgtccaggatcatcacccgcggggccggcagcagggcggcgatcaggatgatcttctgtttcatcccgtgggagaagctctggatcggattggccacggccgcggagaggtcgaaaatctccagccatttctcgatgcgccggaggcgttcggctttcggcacgccgtagacgtcgccgatgaagttcaggtactccaggcccgtcaggcgctcgtagacggccggcgtgtccgggacgtacgtcgtcaccgacttggccgcgatcgggtccttccggatgtcgatcccgtcgacccggatggtcccggcatccggcaggagaagaccgacgatcaacttgatggtcgtcgtcttgccggctccgttcggcccgaggaaaccgaagatctcccccggctggacggttagggtgagatcgtcgacggctttcacccggccgctgttatagctttttgacacgccctgaagctcgatcattgaatccctcctccggatatgatagagaaaggagccgccttgctcaaccccttccgtgcgtcaaggggggtgaggcgtcccctctattgttgtaaaataaaatccaggttgataactatgatgcgccgctcggccgccgcccgcccggtgatcgtgatgctggcggcttgtcttttcctcgtcccggccgggcccgcccggccgtccggatcggagctgtcccccgcccaccggaaatggctcgaggaggatgtcgacggcatcctatcgtcccgcgagcgggacgttttcctccggctcgaatccgaccggcagcgggaccttttcatcgccgccttctggaagcgccgcgatcccgttccggcgaccccggaaaacgaattcaaggccgaacacgagcgccggcttgctgacgccgacgcgcgtttcggccggacggcggctcggcccggccggaaaaccgaccgcgggcgcatgttcgtcctcctcggcgagccggacgacatcgtccgatattccggcaaggacggcctccgcgaggccgaggtctggttctaccggaacaaggagaacgcgggatcggcgggcttgccgccgtcgttcaacttggtcttttttcaagaagggtctgtcggcgacttcaagatctacagcccattccaggacggaccggcggctctcctctccgatttccggggggatcccggggattatgagaaggcttatcgggccttgtccgctctcgacgcgggcttggccgcggtctccgtttccctgattcccggcgaagcgtccggttttccggggcgtccgtccccgtcctccgacattcttctccaaagaatcgcggcttccggcgccggccggatcgacgatgaatacgcggcaaagttcctcgaatacaaggatatcgtcgaggtcgaatacagcgccaattacctggacagccgggggacgatgatcgtccggcgcgagccttccggaaccgcctttgtccattacgccctcgagccggcccgtctttccctcgctgccgccggccgggaatacgccgctacgctccgcctcaacggagccgtttcgctggaggacggccgggttatttccaccttcgaaaaaatcgtttccgtccggatggacgaagagcggaaaaacacgctgagccgcgtgccgttcatgatccaggatctcttccccttgatcccgggaatcttcaaggtctccctgctgctcaggaatgaggcttccaaggaattttgcacgttcgagcggacggtggtcgtccccgaatccggctccggacccggtctcaccgccccgcttctcggctatcgggcccgatcgtcggacgtggaaccctcgaatctcaagccgttccggttcggctcaacccaggtttattttcaatccggccgaaccctcgcccgttcggacgacctggtcctggctttccaagttctcggcctcgacggcccggtcagaagccgggcccgccttcggttctccatcacccgggacgacgttgcaatcgaggaatgggagcgggatctttccggcttttccggcgtttcggacattgttgaatcgaggccggcctccggcttgagcccggccttctacgccgcccgggtccggcttttcatcgacgggcgggaagcggccgccgggggcggggatttcgccgtcacgccgctggaagcggtcccccggccgtggattcacgccaagctgatgccggccgacggcgatccggcttacgacggactcctgggacggcagctcgaggccgccggccgggcggccgaggcgcggccgttcctggaaaaagccgcggccggggggacggccgggccggagatcgccttggcccttgcccgggtttatgatcgggccggcgaatacgcggccgccgctttcatcctcgatccctatctcgcggcgggagcggagacggcgtatgatatctggatcctggccgccgagacgcggctgcggggcggggatttcgccggcgcggtcggcgttctggaccgggcgatgacattgttcgggattcatccccggcttctgaacctcgtcggggacggttatctcggcctgaaccgccgggttgaggcccgggcggcttgggagaagtcgctggccctgaatcccggccagcccgagcttcggaaaaagctggaagctctcgccgcccgccgcccggagatggagcccattgacttaaaacagacggagtcctatagttgagcggcgccggaggcgtgaaatttcacatgctgaggggaaagaacgcgtgaagacgaaaccgttgctcaacctcaaatcgttgaaggaacaggtctatgagtttttgcgggaggcaatgcgccgcggcgaaatccttcccggctcggtcatcgacatggaggagacctccctccgcctgggggtcagcaaaactcctctccgcgacgcccttctccagctggagatggaaggatttgtgacgattttgccgcggcggaaggtcgtggtcaacgtccttcgcttggaggacatcaagaattactatgagatcatcggggcgttggaaagcacggccttgcggcaggcgttcggcctcctggggaagcccgagttggaggagatggctcgtctcaacgcggaaatgaaggaggcgatcggaagggacgacttcgacctctattatgaacggaacctctcctttcatgatatgtttctctcccggtgcggcaacgacggcctcctgaagatcgtcaacaacctgaaaaggcggttgtacgattttccccgccagcaaggattcgtcaaggagtgggaggtggcctcgatcggggagcacgaagcctttctcgagctgttacaagccgggaaaaaggatgaggcggccgcccacatccgggacgtccactggtcctacggctaccaggagaattatatcgccaaatattaccgccgggcgtcggagatctgcaaaggctgaatcccgcccgttggtggaacgatttgcatttcccggacgttcaaaataagattccggacaggagtcgatcatgaaaaaagtccccgtcctcccggcgatcgccgcgtgggccgccctggccctgaccgtcctcggatcggccggctgcgcgctttaccagatggagcgggagctgccggagaaatacgccgagtttctcagcgaagtccgctacttgatcactaatgccgagaggaaaacgttcctgtccacgcccgattccgggaaggacgcgttcatcgaggatttctgggcccggcgcgatccggatcccgatacgtccgacaacgaagtccggtccgagtattacgcccggatcgcccaggccaatgaaatgttccggagggacgccgtcaagggctggctgacggaccggggccggatttatgtcctctacggccctcccgatgagaagagggttccgatgcttgccgagacctcggggagaaactgcctggaaatctggtactacaagggattcccgatccagtttctcgacgaaatgtgcacggggaatttccgtcaagtgacgttcgacctggcgccgctcaaggaattaagcctcaaccagccgcccgcgccgctcgggccggacggcagccggccgggggaaccgggaagacgtccggcccagccggtcagccgtacccgcggagcccgggcggtcctcgatttttccgcggagctccggtccacggtccgccgggcggaccggatggaaggcatgctccggctcgaaatccccttccggctgatctggttcaaatccgaggggggaagattcctcacgacctttacggttttcgtccgggtccgggatgaggagaaaaagacggtttgggagaaaaccttctcggccgaggcgaattacgacgaaacggaaatccacaagcgggacggggatgttcatgtcatcgagatcccgatctacgtcatccaggaggacgccctggcccgtctcgccgccgggacgccgacggtcgaggtgaagctgaccaaccaaacgggatcggaggacgtcgagaaatccgtcgagtggaaatgaccgcctttaaatcccgaacttgatccccacccggaactggcggactccgtaaagattcaccatctgctcgtcctgcgtgaccgtgtaacgcgccggcgtcttgcgttcgtcgaggatgccggctcggtcctgggaaatcgtctgcgtgttccggccggtcgtgttgaagacgtccaccatcagggtcagcgaggcgccctttttcagggtgaatcgtttctccaggtggagatcgaggcaggcgacgcccggcgcccggtttgtcccccagggctcggcgtacaccgtgaccgagggttcccgcgttccataacccatgtaaccggcggggaaatacaccgtcagggtccgggcccacggggcgccggaatagtactgaaagaaggcgctgaaggtaaggccgaaggggaacaggtaggttcccgagagccggaactggacgggccggtcaaaggccagcggcccctcggtgttgatcagggcgttgggatcgttgaatagaaacgtccggttgatccggccgggaagggcgtaatcggccgttccccgaagcgaactgagggtgaaggatccctgcagctgccagttgtcggccatcctcttttccagcgtcagcgtcgcccccaggtatttccggtaggcgtcctcgggattggccgcgacccagacgggagccggccggtcggcccggaggccgtaaacggtgagggaggcgtcgtcggccgtgccgaatagggcgtcggcgcccggatcggtgaccgtcatcggcagccagatccgcccgatcgcatccgtcgccagcggatcggatccgttgaccgaatcgatgttttcgacgaggcgggtcgttttacgataggtgagcttgagccccaaccgcaggttcgaggcgggaccgtactccagcccggccgtgaattcgtcggtccggggagccttgacgccgtcgtaataaacggaatcgagattctgcaggcgccaggacagaagggtgtagtcatccgtgcccggcatatccatcagccggttggagttgaaatcgtgccagatcaaggtgagcgtctgcggctcgaggaactggtcctcgtcgtagcccgagatccacaagggctcatgagagcgggcgaaagagaatttcagggcggcccggccgttcccgagcaggtcgacgatgagaccggcccgcggggagagggtgaaaaatgaaaccgaggtgcgctccagggtggtgatggaggagagcggagatgtcaccccggcctcgtcgatgaggccgtcgatcgccttcatgaaatccttcaaatccagggcggtgttgaaaaacgcaggagcataggccgggctcgtcaggttccgcccttgaaggggaagggagagaatctgaaagtcagcccgaatcccgacgttgagggccaggcgttttcgggtcagcgtgtcctggacataagctccgagcttgcgggtcatctccgagacgtcccaggacgcggcggccgccggcgccggaagaacttccaggcggccgagcgacaggccgtcgtaataataagggtttttcgtcttgtaatcgaaccaatacgtattgaacggattggcccgataccagtcgttatgcgtctcggcttgatcgtaggaaaatccgattttcaggtcgtgatccgccccgaagacgtcttccttgaaatgcgtcaaggcggcggaaacgccgaacgcctcgcttttttccgttccctcgcgggccggggcgccccaccacacatcctggaccgcgtcataaacggccgccgctccggtcgatccccgggaggccaaggtgaagccgtggtgaatgtaatgggcttggaactcagccgccgtgttctggcggatggaaaaacggatattgtgggtggtgacgaggacgttctcggggctccgctcgggaacgcggtcggaggaagtcccggcggaaaccgagaccgtgtcgtagggttcggtgaagttgttgaagagaaggagtccggaataggagacctcgttcgtcggccggacatggatcttggcgtacccgctccattccttgcgggccaggtcgaaggccgggctgtcggtgaatccaagagcggccatccgcgtttccggagagtacggattggagaccgtcgaggtcagccttcggccggccagaaacatccaggcccggtcgtccatgaacgatccgctgagatggaaggacagatcccggtagctttcgtatcggtcgggcgtggccggccggagcgagccggcggaggacgcgtcgagatcttgggccagggctgctcccgtggaataataggacagcccgccgtgaaagtcgttgccgccgtctttgccgacgatctggaggtaggccccgtccgtcgccggaagggaggccggaagtcccgtcgtcgcgtattcgatttcctcgacggcgtcgtcgaccgggtggatcagtggcagtcccgaaacggggtcgttcaacatcgcgccttcccagaggacgatctggctccggggcgcggcgccctcaacggcgacgagacggcggtcccgggcgacatcggccaccgccccggggaccaaggtccacggaaggaaatgatcgcggggcaggggaagccgggccagggtgtccgagcccagggctgaggagcttttgacgttcctcgtgtccgcgcgctgatcgcccggcgggacggtgacttcctcgtccacggccgtttcctccaggagggcatggatctgcatcgtccgtccggactggactcgaagccccctctggatctgcatcttaaagccgggcatctcgacccggatttcgtacaggcccggggcgagaagaggaaagaagaactggccggtggccgaggtgacgctgctgttcatgcccatcagagacgggcccatgagggacacggaagctcccggaagcggattgccgtccaggtcggtgacccggccgaacatcgtcccggtttcctgtaccgtgggaccggccgccgcggccgccgcccccagggcgaggaagagcattcctgtcgcaaagattcgttttgtcatcggatctcgcctttcgtgattctgcaagagcccaattttaaagaacatcctctttgaatgcaaatccggcggatccggcgctccggtccgccatctctgatacgagagaacgggcgtttttgatgctttcttttgcgaaaaagaggccgtgttttgaaataagaccgcttccgcccggatgaccgccggtcttaggtcttgcggccgaggacggaatactgcggcggagcgaacaacagagcgttgaggcgatcgacgttgcgattgaagacggccgcggcctcgtccgcggggggaatatggccgagcttttccgcctccagcccgagaccgaaccggaccgccgcggaagaaaagccggcggcttccagaaggaactgaagggcttgggggtggaccggggtccggtgggtgaaatcgaggaaatagatgtggacaagggcgaagacggacagggggttgacggtttccaggagaatccgtccctccgggcggagcttggcataggacagctcgaccagccggcgaagcgaggccggcggcaggtgttcgatgacctgggaggagaagatcccgtctagggaggcgtcgggccgggcggccaggcattcgagaagatcgcctttctcgacggacaagcccttgtcccggcagagcgcgatcatctcgacgttgaggtcgacgccctcggcttggaagccccgggcggtcaaaagctcgaggaactccccccgcccgcacccgaggtcgagaatccgcccgcccggcggaaagtcgtcgagataggcgatctgctgcttccggatttcctcctcggccccgcggaagcggttttcgaaccgcaggtagcgcccctcctcgagcggttcgatcagcggggcgatcaaggcgggcgtggacagattcttgtcttggacggcggccagcagccgatggagctcgtcctggagggaggcgaatgttttaagaaggacggcggcgtcctcggcggcgatcgcgaggcggtcgacccgccactccatgctcttgaaaatcatcccgacgtggttgttgccctcggcgtcccacagcttgtcgcggatgtcggaaaggacgtccagggcctcggcctgccgggcggccacctcggccagggctttcaaggcggcggcggcttcggccacggcggaccggatctctccggacgattcggccggggcggaaagccgccggaccaacggatccaggctttcggatatgcggcggagctcggcgagcgtccgccggaaatcatcctcggccgcgcgccgccgcgcggccagcatctcgatcgtccggagcatcggaaaggcggatcagtcggccggcgggattttgtctttcgactcgtccttcccggcttcttttccctttcccgagacggagctcttgaaattccggatgctttcgccgagcgatttgccgagatcgggcagctttttcgccccgaagatgatgatgacgatcaacaggacgatcagcaactcttgcggtccgaccgtgccgaacagaaacatgccggcctccttgaatgacgctatgaaagtactcgagagagctcgaaaagtcaatgaaacgcgtcttcgtcagtcccggcggggtcgcgcgtttgacatcgatccctcccggtgagacgatacgccgtcatgatccggacgctcattccattccccaggagatcccgatgattccccggcgagaatttttaaagatcggcggcttgactctctccctcccggccttcgtccgcggattgttcgcctccccggcgggggccggcgacgaggtcgggaatcttaccgccggggtccggccgctcgacccggcggactatgaagagcggcgggaacgcgccgcccggcggatggctgacggcgggctggatgccgttttcttgtccgggggggcgaacctggcttatttcacctcggtgagctggtggacgagcgagcggaccttcggagcgatgttgaataaaaaaggcgccccgatctgggtctgcccggccttcgaattggaccgggccaaggaaacgattccctccggacaagagatccggacctggaaggaacatgagagcccgtacgccttgatcggaggaattctgaaggacctcggcggccggcgcctcggcctctctccgaacaccgccgccttccaggtgtacggcttgaatcgagacgcttcctggatcgagccggccgacgcggcatcggtgacggagggctgccggggaaccaaatcggccaaggaaatcgcttatatggatctggccgcccggatcaccaagctcgcctaccggaaagccttcggccggttgtcggagggcatgactccccgcgacctggcgggtctgatcggagaagcccacgccgcgatgggagcgaccggaggcggcggcccccaattcggcccggggacgtcctttccccacggctcgcgggcgccgaggacactgaccgacgggatggccgtcatggtcgacggaggctgcagcgtggaaggataccgctccgatgtcacccggacgatcgtcttcggcaaaccctcggataaaatgatccggatctgggacatcgtgaaaaaggctcaaaccgcggccttccgggcttgccggccgggggccgcctgcgaggacgtcgacgcggccgcccgcaaggtcatcgaggacgccgggttcggcccggactacgcgtatttcgcccaccgcctcggccacggcatcggcctggaaggccacgagtatccctacctggtccggggaaataaactccggatcgagccggggatgacgttcagcaacgagcccggaatctatatcgccggggaattcggcatccggcacgaggacagcatggtcgccacggaggacggcgcccgctgcctgggcgggatggaagccttggcgatcgaccggccgttcgcggacgaataaggggcttccggcggccgagcccgcgtccggaacagccggaatctccgggttccttcccccccgacgggacataaggcccggcggcttggaatccccggtctcattgacctaacgccgtttttttgcgaagatgaatgtttcccatgaactccatacgcaacttctccatcatcgcccacgtcgaccacggcaaatccaccctggccgaccgctttctcgaagtgaccggggcggtcgccgcccgccatctgcgagcccagacgctcgacaccatggagctggagcgggagcgggggatcaccatcaaggcccggaccgcccggctggaatacacggccgccgacggccggccgtacgtcttgaacctcatcgacaccccgggtcacgtcgatttttcctatgaggtctctcgcagcctggccgcctgcgagggcgcccttctcgtcatcgacgcctcccagggcgtggaagcccaaacgctggcgaatacctacctggccgtgcaaaacgaccttcacttgatcccggtcatcaataaaatcgacctcgtctcggccgacccggagtccgccctcgaccagctcgagcatatcgtcggcttgagccgggatgaagctcttctcaccagcgccaagaccggcaaaaatgtgaaggagatcctcgaagcggtcgtcgcccggattcctccgccgaaaggggatccggacgctccgctcaaggccctgctgtttgattcctggtacgacaactaccggggcgtcgtcgtcctcgtccgggtcgtcgacggaacgatccggaccggggacgcgatcatgctgatgggcctgcaagccgattacgaagttgaggaaatcggttatctcacgccggatccggtgaagcgggaggccctgtcgccgggcgaagtggggtatctgatcgccggcatcaagacgatgagccacgcccggatcggcgacacgatcacccacacgcaccgcccggcctcagccgccctgtccggattcaaggaagcgaagccgacggttttttgcgggctctttcctgcggccgagacccgcgtcgaggacctccgcgaggccctcgagaagctgcgcctcaacgatgcctcgtttttttacgagccggagtcctcgcaagccctgggccagggttaccggtgcggattcctcgggcttctccatcgggagatcgtccaggaacgcctggaacgggagttcggcctgaccctcctgacgaccgctcccagcgtcagctaccgggtgaaggtccggtccggcgaaaccctcgacatccggacgccgtcccagctgccccggccccaggacatcgtctccatttccgaaccggtcatcgaggccatgatcctcacgcccgaccgataccttggggcgatcctggcccttctcgaggggcggcggggcgagcagaagaagctcgaattcatcagtccccatcgcgtcctcctccaataccttctcccgctcaacgaggtcgtcttcgatttcttcaaccagctcaaatcggcctcccagggatatgcctccctcgattacgagctggccggctggcgggagggccccttggtcaagctcgacatcctgatcaaccgcgaacaggtcgacgagctttcggtgatcgtccacgaggacaaggcgtacaccttcggccgggccctggtcgagcggatgcgcaaggcgatcccgcgccagcagtacgaggtcgccctgcaagccgccctgggcagccgggtcatcgcccgggagacgatcaaggccttccgcaaggacgtcctggccaagctttacggcggcgactattcgcggaagatgaaggtcctggaaaagcagagggccggcaagaagcggatgcggaccgtcggccgggtgaacattccccaggaagccttcctggccatcctggaagtcaagtagggccggcggtcagccgcccggccgcggatcaaggatggccgcggcggagagagaatcgttatgctggagcgggagaacatgcgagaaaaggcgcccgctccggttcccgtcgtccgcgaaatcgaagccaagtcgatcctgaacgcctcgaagatctacgactactgcctcaatccctacaccggctgccaggtcgcctgcgtctactgttacgccgccttgttcatgcggcggtacagcgggcacgtcgagccgtggggagggttcgtcgacgtcaagaccaacgcccctcttcttctggagcggcaaatcgccaaggccaaacgggggacgatctggatcgcctcggtctgcgatccgtaccagccgctcgagaagaaattcggcttgacccggcgcctcctggaaatcctcggcgggaagggttttcccgtcgtgattcaaaccaagtcagccctcctccgccgcgacctcgacatcatccggcggatcaaggacgtcgaagccgggttctccgtcgccaccgaggacgaggccgcggcccggctgttcgagccccgggccgccccggtccgcgagcggatcgagatcctgcgggaattcaaagccgccggcgtccggacctacgccttcgccgggccgcttctgcccggaaatcccgagacgctggcctctctcctggccccggccgtcgagcacgtgttcatcgaccggatgaactaccagccggccgtccgggccttctatgcccgtcatggcctgctcgaatatttatcggacgcgtttttccgccgccagggaggggccctggcccgggagctccgggcccgcggggttcgggtcaagaccgtgttctgaccagccgccctccggtttccccggggggaggaaaacgttatactggggggcgttcccaaggagtactcatgcgtccgacgatcgagtgggccggcgacaggatcatcatgatcgaccagcggaagctcccgctggaggaaacctacgtcgaatgccgcacttatgaggagacggccgaggccatcgaaaccatggtcatccggggcgctccggccatcggagtggccgcggccatgggggtcgccctcgggatgcgggcggtcaagaaaggggagaactgggacgcggccttcgcccgcgtccacgaccggattcaccggacccgcccgaccgcccgcaatcttttctgggccctggagcggatgaaatccgtcttcgaagcccatcgcggcgagccgctggcttcgctccaggcgaagcttgcagccgaagcggtcgagatcgaccgcgaggacgaggagctgtgccgccggatcggagcccacggcgccccgctgatcaaggacggcgaggcggtcctgacccactgcaacgccggcggcctggcgacggccggctacggcaccgccgtcggggtcatccgggcggcctgggaagccggccggaaattcaccgtctttgccgacgagacgcggccgtttctccagggcgcgcgcctgacggcctgggagctggagcggatcggcgtcccctaccgggtcatcaccgacaacatggccggctggctcatgcatcgaggggaaatctcggcggctgtcgtcggagccgaccgcatcgcccgcaacggcgacgcggccaacaagatcgggacatactccgtgggcgtcctctgccgggagaacaaccttccgttttatgtcgccgccccgctcagcacgttcgatttttcgctggccgacgggagcctcatccccatcgaggagcggccggcggccgaggtccgggagatcaacgggcggctcatcgtcccgccttcggcccgggtccgcaatcccgcgttcgacgtcactccggcccgctacatcgccgggatcgtcaccgagaacggcgtggcccgcccgccctatgaagcaagcctcgaggccctccgccggaaatgaccggaaaggcgatgcggcatctcctggcgatcgaatcctcgtgcgacgagacctccgcctccgttttcggggaggacgggacgatcctcagcaacatcgtcctttcgcaggatgaggttcacgccccgtacggaggcgtcgttccggaactggcctcccgtcaacatctgaaatccatcacccctgtcgtccgggagagcctgacggccgccggcttgccgctcgaggctatggatttcttcgccgtcacccagggaccgggcctgatcggctcgctgctcgtcgggctttccttcgccaagggcctggcctattaccaccggaagcccgtcctggggatcgatcacgtccaggcccatatcgaaagcgccttcctcgaccgtccggatcttcccttccccgtcctcgccttgatcgtctcgggcggccacacggcgcttttcctgatgccccggaagctccgcgcccgtcttctcggccggacccgggacgacgcggccggcgaggccctggacaaggtcgccaagttcctggagctgggatacccgggcggccctctcattcaaaagctggcggaaaacggcgatcccggccgcttcccgttcgccctgccgcggatgagcgaccggagcctggatttcagcttcagcggattgaagacggccgccgtccggatcatccgggaaagcggaatcagccgggaggcggccgccctgcccgatttcctggccagcttcgagaacgccgtggcccggaccctcgtccgcaacgtcgagcgggccgtcaaaagcttcgtcccgcgatccctcgttctttgcggcggcgtcgcccgcaaccgccgcctccgggccgcttttgagcggttcgcctccgggcgcggattgcccttcggcatcccctcgcccaagctttgcacggacaacgcggcgatggtcggcgccttggcctgggcgaaaatacgagcgtcaaggaaaaagatccccctccgcctggatcttgacgcttatccccgctcgccgcgttgagggcggggagttttcatccccggctttcctcgggcgttgcctcgtcaccggagaggggtgattttgagaagatagggatcaacgagaaggttttccccgctgtgttttttcagcgtcaggccgatctcgtaaaggtaaagatcccggaggcggtattctgcccgcggggcgaagacggtttccttgatttcctcggccgtgacgtcttccagcaggggagtgtcgaaacacgtcatccggatttcgtgttcgcctttcctcgagccgtaggccaggcggatcttcccgagcttctcccgggaggcgaagacgaaccggtaggacttttcaaaatggaggtacatctcgccttccttcttggcaacgacgccccgtcccatcggcttcaggtagaaacccagggttccgccggtggaatagaccaccgtccgggacggatgaagggggacgcgcgggaaaagaacccagagtccgagcccgccggcgagcaggacggccgccgcggccgggggaaagagccggggcagcggctttccgccgcccttggcgaagaccgcgtaggcggcgatgaacaggaggagcagccccgtccagatgtaattggggagataggccgaattgtcgactttaacaaaggaaggcaggaaaggcggcaggaacaagcggacattgcccaggtggacgaaaaggtcgccggcccgggccgtgaagtcgtgagtcgtcggctggtaaagataatccggatgaccgaggaggatcagggacatggcggccgtgaccgcgaccccgagaccgaacaaccaggtgaagaaacgatttccccggcgctccaaaaaacagccgagggccgcggccgcgacccaggaaaccggggcgagaacccggccttgcggacagaatccctgccgatgagtgaaaaaggcgtaattgagaaggtacggcccggcgataaacagcaggccgaaaagctcggcccccgttttccggccgcgccgggccatctcgaccaagcccaggaagaagaacgcccagaacggcgcgtacggcaggagcccgtcgcgctggtccaaaaaataatcgagcaaggtctcgatccgggccgataacggcagatcgaggaaggaacgggcgatctcccgggcctgccccggctcgaggacgccctcgtaaacggcgaacggagagaacgttccgtacatgttccagacggcgaaatagaagagggccaggccggccagggccgggatcacgaaccacaaaatccggctccggggacgaaccgccggccggagggagaggacggccacgatgagaagcggccaaaaaatcatgttgtacttcaggccgaaccagaaaaatgatccgaggagagcgccgagaagggccagccggagggcggacatcggccgcccagaccgggtcatccggtagatatagaccgaaaacagggcgatcgggatctcggggtagagatggacggcgtagaaaagaacgggcggggtgaaggaaacgagcgcccaaagacccagggccagcccttcccgcttccagagcttcctggcgaggaggtagatctggaggccgagaagcgccgcccagaccgccaggcttcccttgaggagaaaggttcgggcgaagccgtgaacggcctgcccggcggcgtagaaggggaccatcaggaaggagatgccgggcaggttgatcgggtagatatatccgcggcctttgacccccgcccgggcgtagggattcatccgcagattcggattctccttctcgtcgtagaaatggaagtaatcgcggttgcggtagttgttttcgagattgatgtcccggtcggccaagaggctgtgggtcgtcagaaggtagttcggctcgtcgcccgaaaaggtcatcccccgcgaaacgaggacgagggcgcaggcgttgtagacgagaaaagcggtcaggaaaaggacaagaagccggcgcttgaccggcaggcggagaaatccgtcaaggagacgggtcgcccgcggcgattccgggcgggaagcggatccggcgacgcccaggtagacgatcgccgcggcggcgagcagaccgagaagaaggagccgcctctgaaggtcgtcccggtcgaaataatcgatggtcaggaagggagcggcgagaagaacggccgggggccataacggccctccgaatccgaacgcctcgtcctgccaagaccgggcggcccgggagaggagaatgagggccgcggccgcgagccccaggaacaaggccgcggtgattcctaccggccggaatccgtgatcgaataccgtcgccccggccgcccggaaccaggccgttccataagcggccagccccgcggccgaggcccatagaaccgggcgggaaaccgcggattccgggacggccgtcatgaaggcagtaataatcgacttgtccggcggtgtcaagaagacgtaggaatccatcaagccggagccgcgcccgaggccgggggacggaaggcctgctttcgaggtttccggccgttccctttttgcggccggccggcgtccgcggacgaaagagaacttttcccggctgtctatcgttgacattaaggaacgcctcgtcgccgaaaccggccgcgggttgcggttgttccgggattggatcaaaatgagcggcgttaacgggaatcgtcgcgcgccggatcatagacgggccggatgaatatcgccgacggagcgatccggacgcgccccaaggagcgaagaaatgagaaaaatgaccgccgcggccgtcgcggccgtgatcgccttggccgcttcggccgtcgccgaagatttgaaggaaagcctggcgcccaagcttcaacggatcatcgggcttcaagcggaggtcggtccccttcaccccgttctccaaaacctttatcccgtggccgtcgtcgacggcgaccgtttcctgatctttgatctggatgaatcgaaaaccggatatcgcttcctcaaggaggcgcccgtccccatgcccatgccgaaaggcgtccgggcggcgtttccccttgaagccctcgacaaccggagcgcctgcgtggtaagcccggaggtcttcgattccgcccgcgggtatgtgacgatcttccacgagttcgtccattgccgccagtgggagaccgtcgagccggccttgaagggacggctttccatctatcgccaggccatggaggcgggcgattatatgtgggagctgagctacccgttcccctacgaaaacgcggagttcgccgaagactatcccgccgccttggaccggatggaccggggcgacggcccggaggctctccggatccgggctcggctgaaggacctcctcggacccgaaaactacgagtacctttgctggcaggagtggaaagaaggcttcgcccggtacttggagaatgcgatactccggcatctgaacatggaggagaaccacggcggcttggctctccccttgacccgggtggctttttacgaggggggatcccgcttcatcgcctttcttgaggggcgggagaacgggctgacgctgaatttggagacgcttttcgagcggatcgcggacccgtcgggcgagcccgcgggaaattccatccggccgaccgggccttcgccgacgacgcattgaagtcgcctccccctccggagtatcatggattcccggcccggcgccggggagacggagaaaccgggacgcttccccgcgcctggcggaagctccggcggcgggctcgacccgcaagaaagggaggaggacggcatggccgccaacgacgagaagaaggaaattctgcaggcccgcaacggaaagaacaaagaagatccggggctcaagaagaacgatcccctcttcaaacccctggaccgcaagcagtttaaattttccatctggtatttcctgttcaccctggttgcccttttcctgatcaacaccgtgctcctgcggccgaagtacgaatccatcgattacagcgatttcaaggctcgcatcaaatcgggggagatcgtccgggtcgaaatcagcgaaaaatacgtgacgggattcacccggaagccggccccggagacggctcccgggaaacccgagcccggcgagccggccccggctgcggcttcgataacctaccgggccgtcctgatggccgatgcggatctcgtttctctcatggatgaaaaaggcgtcgattattacgcggtcgccccggagaacagatcctggctgagcgccctcctctcctgggtgttccccatcgtcttgatggttttcttctggaattatctcagcaagagaatcggcggcgcgggccagggcgtgatgtccttcggggcgaacaaggccaagctggtggccgaaggagacacgggcgtcaccttcaaggacgtcgccggcgtggacgaagccaaggccgagctggtcgaggtcgtcgatttcctcaagaatccgcggaagtacgaggcgatcggaggccgcatccccaagggcgtcctgctggtcggtccgcccgggacgggaaaaaccctcttggccaaggccgtcgcgggggaatcccaggttccgttcttccggatcagcggggccgaattcgtcgagatgtttgtcggcgtcggggcggcccgggtccgcgacctgttcaagcaggcccgggagaaagcgccctgtctcgtctttatcgacgagctggacgccatcggcaagagccgcgggatcactctcggcggaaacgacgagcgcgagcagaccctgaaccagctccttgtcgaaatggacgggttcgactcccggtccggcgtcattattctctcggcgaccaaccggcccgaaatcctcgatcccgccctcctccgccccgggcgcttcgaccgccaggtgctggtcgaccggcccgacctgaagggccgggtggacatcctgaaagtccacatccggaacgtgaagctcgatccgtccgtcgacctggacaaaatcgcccggggaaccccgggcttcaccggggcggatctggccaacatcgtcaacgaggcggccctcttggccgtccgggcggggcgggccagcgtcctgcagcgggatttcgacgaggccatcgagcgcatcgtcgccgggctggaaaaaaagaaccgcctgctcaatcccaaggagcggtcgatcgtcgcccatcacgaaaccgggcatgccctggtggccgcctacgccaagggcgccgatcccgttcacaaggtctcgatcattccccgggggatcggggctttgggatacacgattcagctgccgaccgaggaccgtttcctcctgacggaggacgagcttctggggaagatcgacgttctcctcggcggacgggccagcgagcaggtgttcttcggcgagatctcgacgggggcttccaacgatatcgcccgggccaccgacatcgcccgcaagatgatcagcgactacggcatgagcgaaaaattcaccaacgtcgtcctgccgtcccagagaagcccgatcttcctgcccggggagccgatcgtcggccaaagggagtactccgaattcacccagcagtatatcgacgaggagatcacccggatcatcaagcagaggtacgacaaggtggtcgctttcatcgaggaaaagcgggaggttgcggcccgggtcgccgcccgcctcctggaagtcgaaacgatcggggcggaggaattcaagtcgttgatcggggccccggccggtccgccggaggtccggccggacggcgggggatgaggacgggtcccctcgaatccggggcggacgagcggccgcttcaagacaaacacgcggaaaaatgatataagaggacgacttccggaccggaaggcgtcatgaaaaccgcgaaacgaggaaagcgagtcgtcgtcgtcatgccggcgtacaacgccgaaaagacgttgatccggacgcttgacgacatcgaccggtcctgggtggacgacatcatcctcgtcgacgacggcagccgcgacggcacggtcgacctggcccgccgcctggggctccgggttttcgttcatgaaaaaaacacgggatacggcggaaaccagaaaacctgctacaccgaggccatgaagctcgggggcgagatcatggtcatgatccatccggatcatcaatacgatccgagggtcatcccccagctcgtccagccgctgctcgacgacgcctgcgacgccgtcttcggttcgcggatgcttggcggccggccgctcgagggcggcatgccgaaatggaagtacctctccaacatcttcctgaccgccgtcgagaacatcgccttttacatgtacctgaccgaataccactcgggcttgcgggcgtattcccgccggtatctcgaggcggtcgacttccgggcgaactcggacggcttcgtcttcgattccgaaatcatcgcccagggcgttctggccgggatgcggatccgggagattcccatcgagacgcgctatttccccgaggcctcccaggtcgggccctgggggagcatccactacggcctttccatcttgaggatgctcgtcaagttcaagcttcacaaaaaaggctggatccggtacccgatgttcgagttgccggggcccgccccgaagcccggggcgtgatcctccgccgggcggctggaatcagcgggccgggctcaaagcgaagaggtagggcgtgacggccgtccggacatccgattttctttccaggcggatcgaaacgcggtagaggaaccggcctttccagggataggcggggggggactcgaccgttcgggtcatcacttcccggcgcgtcgtcacggaaaagatcgccgcgtcggcgatgttcagtcgcagggcgtagtcgccgtggggcgatccgaattccacgccgagcttttccagaggccggttcgaggtgaagtagaaatcataatcccggttgtcttggagaatgtcgaaccgcccgggctcgttcatgatcgccactcgggagagggaatagaacgtccagggctcgccggaagcgtggacgatcggccggggcgacatcaggacgggccggggataataaacgtactgaacgaagaatagggccagcaggaccagggccgcagccgcgtgtcccgggaaggggaggcgcttgtcggacgggcggcggagggcgaaaaggacaacgaagaggaccagggcgccgatccaaacggcgttcggcgtccacccggtttcctcgaccttgatgaaggagggcaggagccggggaagatagacgtggagattgctcagggtgatgaacaagcttccggcccgctcggtcacgcccatggtcgtttcctggtagagggcgtacgggtggcggcagagaagccaggtcatcaagagcgtcagcccggccgccccgttgaagagataacggaacgcgtgcttccggccctcggcgataaaggcgccgaggaagatcgccggaacccagatcacggctaccagcggccgggcctgcggcgcgtatcccgaccgctgcgtcaggaacgcggaggcgagcatgtagggcagggcgatgaggagcagccagccggcgtcgccggcttttttccggaagagggagacgcagccgagaaaagcgaagagatagagaggcgaataaagcaggaggccgtcgcgctggtcgaggaaatatccggccagggtctcccagcggaaacggaacgggatgccggtgaacagctccttgaggaagctcagcgtctgcttcccgtccatggccccctgccaggagacggacgtcgggttgagcgagccgtagagggcgtgctggacggcgaaataggcggccgcgaagacgccggccgggaggatcagggcggccaggcggcgtccccgatcggccggatcatttcctttccagatccggaggatcgcgtagaggaagaggggcgcctggatgaaggcgtacttcagggcgtgaaaccagacgaacgagacgatcaggatcccgatcaggacgcagtctccggcccggcgggccggtttgaagcgcagccggcggaacacatacattccggccgcggcgacgaccagctccggatagatgtggaaggcatagaaaaaaaccggggccgagagggtgaccagggcccagagggcgaacgccaggcgttcccgggcccaggcctgccgggcatagagataaacctggattccgaaaaagactccgacgagactcagggcgaaacggacgagaaagaccagggcgcttttgcccagggccaatccgagggcgtaaaacggaagaagaagaaccgaaatcccgggcgaatggaaggaatagcggctttccggctttttcccgggcaccgtgtgcgagcgcatcgcgacgccctcgggcatgtaggcctcgaagtcccggtccttgtaattgttcgccaggtccagatccccgtccttgagcaagctgtgggtgatcagaaggtaatggggctcgtcgccgccgaaggacacgccccttccgctcacgaggagcgcgcctccgttgatcaggagcagggcgagaacggacaagaggatcaggcggcgccgggtgggccaggcgagaaaacggtcgagggcggccccccaattcgatttcccttggcggtcggcctgggcgacgcggacagccttgagatagaggacggccaggaggacgcccgcggccagaagtccaagcctttcccggagatcgtcccgggtcaggtaatgcaccaaggccaggggagccaggaggaagaacagcgccggcagataggtcggaaaatcgagggccagcgcttccttgtagctcagccggctgtttttcgtccagatctggctgatcaaggcccagagcccggcgagaaggatgaagatcaggatggcggacacgaggagaggaccggcttcgggccggaaggcgtggttgcggatggtgaaatccggggcctggacgttcagccggagaatgagcgcgatccccgccgacaggacgaaaaagacgataggccggaggatgcggcggaggattttcatcgccaagactgtatgtcggaccgacggacaagtcaagaacgcgccccgaagccggcgacggcattttagtctataatgagtccgccatgaacgaccgggccgcctcgatccccgatccgccggggacgattttcctcgagctgacaagcgcctgcaacatgcattgcgcgttctgcccttcggatgtcctccgccggccgaaggagcacttgtccgaagcccgcctgaagagtttcctcggccagctccatgacctcggcctccgtccccccgtccttctcaacattttgggcgagccgctcctcaacaagaaggtttacccgctcctggacgacttggaggcggccgggcatccggtcaccctcatcacgaacatgaccctcctgggcgacggcgcccttcgccgggagctgcttcgccacggcaacctgaccttggccttgagctttcagacggccacgccccgctcgtatgccctgcggggatacagccgcctgccgtttcgggcttacgagcggattctctggaaggtcatcgaggacaagttccggctgaacagcggcgcccggctcgaaatgcatgtcgcctcgaattacgtcatgagccgcgacgcgaccatccaggccgacggcggagccgggctctgggccaatttcccggatgaaaaagccgaggggcggtggatcgcccggacgctccggcggctggaacgcctggccaagcggatgaaaagaagatatcccgattccttcgcttccgcccgggagacggccgcggtgaaataccgggatcatgtcgggacgaaaatcgccgtggaccgggccggcctgccccccggtttccaccggctgaaggacgaggtcttctggggctacatggccttgcccgacgtcttcctcgtgttcaaatccctggagctctggacccgggatcggacgttccttcagaccgctttccccccggggcggttcacctacgtggaggagcgcctcgagccgcggccttgccccatgaccggcaacctgggcctgttggccggaggaaatttcgtcctctgctgcctggattatgaaggggaaatggacttgggtcacatcgaccgaacgccggtggccgatgttctccgagccgaacggcgggcggccgtccgccgcgatgcgatggccgaggcgctctgccgtcggtgccggggcaatcttttcgtcttcgaaacgaccctccttccggaccgggcggaacaaacggtcgacaagttcggccgcggcttctggccccgcgaagacggattgcacggcgtaggcggccgctggaccgacggaaagggttgggcgtatgtctacgcccgcctccccgcccggaggatccgcctcgcattccggtccgatttcgatgacgatgcgcctctccggctggcggtgtcggcgtatgaccgggatgccggcgccttccccgccgtctccgcgtcttggcccctggccgggcggaaggggcggacggccgtcttcgaagcgggcttcgattttctcagcgaccgcctttaccggatcgaaatcgaatcgcccttcttcgtcccggacgagacgctcggaaacagcgacacccgccgcctcggcctggcggtctattcgatttcgatcgggacgacgccggcgcctccgccggagcccggccgctgaaccccgcctcagtttttccgtatgaatccgagacggccggaccgccgcctttcctcgctttccggaggaaacggaaacggcgcgacccggatctcagggaggtttgccgtgaacatccgccggatcattctcgctctgttaacgatcggcgcggcttttgggccgctggccgctgaagacggagccgtttggccgctgaccctggacgaagcgatcgcccgggcgcttaaaaacaacctcgacatcgccgtcgaatcctacaatcccgagctggcggaaggacagcttttcaaggcccgggagaccttcctgcctcaattcgatctcagcttcggcgacgatcaccgggaaagcccctcgtactggtggctgcagggcgaagggacgagcatcgataaataccggaactattccgcggggatcgctcagatgatcccgaccggcggccgcttttcgctctccttccaaggatatcggtcggagacgaatcaatcctttcagctgatcaacccccgcttcgggacgacgctggctgtgtccttcagtcagccgcttctcaaggatttcgggctcaagatcgcccgccgccagatcctggaggctgaaaacagcctcgagatcgccgatgtccagctccgcggggcgatgatggagaccatttacctcgtccaggaagcgtattggaatttcgtttacgccgtcgacagcctccaggtcaagcggcagtcgctcgagctgggccgcgacctcctggccaaaaacaagaaggaggtcgaattcggccagctggccccgatcgagatcctcaacgccgaggcggccgtcgcccagagggaagccgacttgatccaggccgaagcgatggtcacccgctcccgcgaggtgctgaaaacgatcctgaatcttccggccgaagctccggggacgatcctcgagcccgtcgaccgcccggtcgcgcaaggggtctccttgagcctggacgaggcgttgaaacaagccgccgcgaaccggaccgatctccaggccctccgcaagaccatcgacaataaatccctcagcttggaattcgcccggaaccagatgctgcccgccttgaatttcgaattctcttacatgagcccggggatttcgggggaccggatcaagtacctcgacgacaacccgatgaccggaatcatcatcgggaaggagccgggaagcgcgggagacgcgacgaaggatgcggcccggttccggtacagcaattggagcgtcggcttgacgctctcctttcccctgggccatgctttgacaagggccgacgcggccgttgcccggatcgacctcgcccagagcgaagccaggctgaagagcctcgagcggcaggtcgcccttgacgtcgccgacgccgtccgagcggtcgagaccgacgccaagcggatcgaggcctatcgtctggctcgggagctggcggaaaaaagcctcgaggcggagcagaaaaaactggccgtagggatgtcgacgaactacttcgtcctggatttccaggaccgcctggctaatgcccggtccttggagctcaaggccaagatcgactacatcctgtccgtcgaacgcctggagaaggccacggggatgagcctcgtccggcgcggggtccgtctgccttgactttcgcggggagcctgattaccctgagggcgtgaaaaaaagggaaccggggcggcgctccatccttaaaggggagaaaaagcgcctctttgaagcccctccgggcggatcgccgttcggagaggaagacggttcccctgaggaatgcaggggcctcggcgccggacggggaatgcgggaaaaaattcagcgttcttttcaaatccttgacccaaggcgtcgtgtaccgggacgcccgcgacgccgtcatcgacgccaatcccgcggccttgaaaatgctggggtgcgcccggaaggaactcctttcccctgatccgtcccgtccaggctggatcttgaccggagaggacggccttccgctccgccccgccgatcatccctcgaaggtcgccctccgaaccggccggcccgtccgaggcgtccgggttcgagtgatccagtcccggtccgggaacgtccgccgcctcatcgtcgacgccgttcctgagttccgcgggggcgggaaaacgccgttccgggttctggtgatccttcaggacgtcaccgagcggaagcggctggaaatcaagctccgggaggacgaggagaaataccggacgcttttcggaacctcggacgaggccattctcctcatgatcgatgagatgttcatcgactgcaacgatcgatcggtcaggctctacgggtgttcctccaaggaggacctgatcggccattcgccctgggaattctctcctcccgcgcaacctgacgggcgcgattcccgcgaaaaggcccgggcctatatcgccgcggcggtcgccggcgcgccgcaacggttttactggcggcaccgaagaaaagacggcgggctgatcgagaccgaggtctgcttgaacggccttgtcctgaataaccggatccacgtccaggcgatcgttcaggacatcggcgagcgcaaaagggccgaggaggaaatccagcgctccctgcgggagaaggaaaccctcctccgggaaatctatcaccggaccaagaacaacatgaatgtcatcggggccatgctgtcgctgaagtcccgggcgatcgacgacgaaaggatcgcggccgtttttcgggacatcgaggacaagatccgggcgatggccctggtccaccggaagctatacgagtcgaaagatctccaccgcatcgatctgaaggactacgtttccgacctcgccgcccagctggcggaaagccaccccgaggcggccgcggccgtcgaggtgaagctggatctggaggagctgccggtcccgatcgacgtcgccatcccctgcgggatgatcctcaacgagctgttttccaacgtctataagcatgcgttccccggctccggccggggcgaaatccggatccgcctggcccggtcgaccgacggaaaaaccatcgagctcgatttcgccgacaacggccgcggcgtgcctccgggattcgaccttttagcccaagcgacgctcgggttacagactctggtcatgctggtcgagcatcaactccggggcgcggtccggttcgagacggaaaaaggcgtgacttgcctgatccgctttccctccaaagcctttttcgcggaggagggggcatgaagcgcgagccggccgttcttttagccgaggacgaggccctcatcgccatggatctgagcgcccgcttgaaaaacgccggctgcggccgcgtccaggtcgtggccacgggggaggaagctctcgcctgggcgggacgagagcgcttcgatgtcatcatcatggacaatcacttggccggatccatggacggggtcgagaccgccgcccgcctccgggcggaaggggccgtccccttcgtgttcatcaccggttatccaaaggaagaaatatgcggcgggcggacgctttctctcgccccgttcatctgcctggaaaagccggtcgacttcaatcagcttttggccgcgatcgaagctcttttgtcctgagccggatcctcccggtctttggttcgcggcccgaaacggccgggcataagccgaagtcagaaagaacccgaaagacccgctgaataaaacgtgccgtgggaaacggtgagggcggcgaagatcctccagcgccggtcaaggcggaaggccgtttcgaggccggcggccggggcgagcaccagggacggcacgtcggcccctccttcccggatttcggccatcgttccctccaggccgccggcgtacgtgaaatttcccaggatggtccgggcctggagaatcccgtcggccgagaggcgtccccggaagggaagaaccgagatcccggcccgcagcccgacttcaaaagatccggccgatacaaccgtccaccgccccaggagggacagtcccaaaccctcgagccggaccgtcccggccgccgtcccgttcagctccgcgaggggaaatccgataagctgaatcgtttccgaggccgaggcggtgaaaggaatccggaagcggaaaacatcgccccggacgccgagggcgaaccggccccggccgagcggaagccaaagctccgcgaacagcgagccgcccgaggaggccaggtcgatgtccgcccggacgggcgaaagcattccttggggaagcgcggcctcgaggaaagcgttgaattcggcttggacagcctccttgctgcgggattcgatcaagggatggaagggcgcgagcgtccagccgccgccgccgatccggatctccacggaggcggcggccggaggaggagcggccagaaaggctgccgttaaggcggctccaaggaggaggggaaagctttttccggggggcatgattctaatttagcacaaggcgcctctccgaatcccaatatttttccttctgaattttctcttgccagggcgggggttttcatgtatatttcctccttaacatctggccggtattagtgcaaacgagtcgattcaaggaacttccgagatacgccgcttgacttccccccttatgttgaaattcaattctcaaggattttttaatgcgttttgacgaactgagcttggatccccggctcctccgcgcgatcgcggacagggggtataccgagacaaccgacgtccagacccggacgctggccgagaccctcgccggccgtgacgcggccgtccagtcccaaacgggcacgggaaagaccgcggccttcctggtgacgattttcgaccgcctgctgcgggacggatcccggaaaagcgggaaaactttgatcatcaccccgacccgggagctggccgtccagatcgagggcgaaaccgatctgttgaaccggcgcctcggtttcaccatcggctgtttttacggcggcgtcggttatgagcagcaggaggccgtcctccgcaagggggccgacatcctgatcggcacgccgggccgccttctcgacctcgaggagaaaggaacgctgcgcctgggcgacgtccgtatcctggtgatcgacgaggccgaccgcctgttcgatatgggatttcttcccgacatcaagaggatcgtccggaagctcccgccggccggccggcggcagagccttttcttcagcgcgaccctgaaccggctggcccggcggaccgcggtggaatttctcaacgatcccgtgttcatcgagctgacgcccgagcggatcacggtcgaggcgatctcccaggagctttatcgggtcggcagccatctcaaggccaaccttctcctggggctcatcaaggccgaagcgccgaaaaacgccctgatcttcaccaacacccgccacgccgccgagcggctggccaaaaagctcgaaaagaacggttatcgaggccgttttctgacgggggacctgccccagaacaaacggctgaggatcatcgacgacttctccgccggccggttcccgtttctcgtcgcgacggacgtggccgcccggggccttcacatcgagggcctggagatggtcgtcaactatgacctgcccgaggacatcgaaagctatgtccatcgcatcggccggaccggccgggcgggcaaggaaggcaaggcggtttccctggcctgcgagaagtacggcgacaagctttccgaaatcgaggcctacatcgggatgcggattccgatcaaaacggcgacgccggatctctttgtttccgaccggggcttcgaggccgagctcagggcccgggaggagcggaagcgctcccgcggattcggacgggggcgcggcttcgctggcgaccgccgctcggcccgccaggacgatttcggctcccgccccgggccgtcggggccggaactccgcccctcgcccgcggtgaaataaggttctgtcccggcggccgccggccggccttccctgcgtattcagcttgatcgccggaacccggcgttccggtgaagacgccggatccggaaaagatcccggagcatggaaacggacgaggcgacgatccggaccttgctttcgggcgagttgatccaaacgaccgggacctgcccgatggaatagccgagccggcgggcgaggaagagaacttcgacgtcgaagctgaagccgtccaggcggacgcgggaaaaaatatctcgggcggcctcccgccggaagagcttgaaaccgcactgggtgtccgggaatcccttgagaacccatccgcggacgaaaaggttgaacgttttccccatcctctcgcggagaacacgctgacgacggcggatctccgccccgggcagggctcgggagccgatgacgatgtcgtgaccgtccctgatcccggccaggagcttttcgagttcggtgatcggggtggagagatcggcgtcggtgaacaggatcaagcgcccggcggccgcgagcatcccttccttgaccgagaaacccttgccgcggtttttccctcggcggagaacccggtcgcggggccggccgcggagggcttcggcggcgacggcgcccgtccggtcggtcgagccgtcgtcgacgacgatgatttccgtcggtccgttccccgtcccggcggcgttgatcctggattcaaggtgagcccggatcgtccttagggtcggcccgaggcgcgcatcctcgttataggccgggacgaccacggaaagaaagaccgattcatccgaacccgccatggcgggaatatcctatcatatccgcgcgggagaaaaccgctcgtcctttcgccgccgccgctattcaaggtccggcgcgaccggtgcttccgtccccgttttccggagggagagggatccagcttcaggaacgcccggccgaccggatctcttccatcagcgcgtccaggtcgccggccgtcgtccgcggattaatgagcgtgcagcgcagccaggtccggccgtcgagctgggtttggacgacatagaaccgcccctgctccaggagaatcctccggatccgccgctggaggccgtccaaatccggttcgcctttcttcaggtgccggaaacagacgatgttgctttcgggctcggacgccgtctcgaaatcgccggcggtccggagccgccgggcgaactcccgggccaagtcccaggcggccgtgacgtatccggcgaaaaaatccgtgccataggcggccagggagatgaacaggcgcatccccatcatcgtcttggtgcattccagcgtccggtgggcgaagttgtaccattcctcggtcgcggttttttcgaagagataggaggcgttctgggaaaacgcctcgaaggaccgtccgccgtcgcggaaaacgaccgcggtgaccagggccggcatcaggaggctcttgtgggcgtcccaaataaacgaatccgctcgttccaagccgcggagaagggagcgatacttgggcgacagcagggctccggccccgtgggccccgtcgacgtgaagccaaagcccggcggaggccgcccaatcggccgcctgttcgaggtcgtcatagctgccggtggccgtcgagcaggcgttggcgacgagggcgaacggtctccggccgcgcttcccggcctcggccagggccgtcttgaaaccggaggcggtcatgtggaatttttcgtcgacatcgacgggaacgaccgcctcctcgcccagccccatgatcgcggccgaccgccggacggagtaatggcattgggaggaagccagaatcgccaggggagccgcgcccgccgcgccgtccctccagatatcgccttcggccgcggcctgccgggcggccagcagcgcggtcaggttgccgcccgatccgccgctcgtgaagacgccgtccgcgccgggcccgaatccggccaatccggccatccagcggatgagatgccgttccatggccgcgttgaccgggcccatttcgtagatggccgtgccgttgttgagtaactggccggccagcccgccgagggcggccaaaggcaaggccgtggtgcactgatggccgacgtagcggggatggagaaggttgttggagcgatcgaggatttccggaagaagatcggcgaacggcctcgacggttttgcggcgaaccgccccgcccaggaggcgaacatggattccggatcctcccaggcgaacacgcggctccggccttccggctccgaggcggccaggaaatcggccagaagatcgacgattttcttcccttcccggcggaattcctcgggatcgaaggctttggccagcaggcgttcgtaggcggtcatgacaacggtccttatcgagcggtcgagaggggatactataccagaatcgcgggcgccgccgctccgcgcgttcttgaaccgccgcggcgggccgtgttaagattccggcgtgaaaatctcggcggtggtgatcacttataatgaagaggcgaacatcgaggccgctctccggagcctggagggcgtcgtctccgagatcgtcgtcgtcgacagcgactcgacggatttgaccgtcaaaatcgcccggcggttcacgacgaggatcttccagcggaagtggacgaattactccgaccagaaaaactacgccgacggactcgcctcccatccttggatcctctccctcgacgccgacgagcggctgtcgccggaattgcgcgaggagatcaaagccctcggtccgggcgaccccgattgctcgggattctcggtgccccggcgggtgtattacctcggccgctggatcaagcattccggctggtatcccgaccggaaagtccggctgttccggaaggaccgggcccgctgggaaggggcgtatgtccacgaggacctggtcgtcgagggggagatccgcaagcttcacggcgaccttcttcacttcacgtaccgcaacatcgccgatcatctggcccggatcaatcagttctccgacctgggcgcccagaagctttacgcccaaaggaggaaatgccgtctccgccatctgatcttcgtccccccggggcggttcatcaagtcctattttctccggcggggtttcctggacggcttcgccgggctcgtcatcgccgtgctcaacggatacgggatttttgtccggtacgccaagctccgggaaatctggaaaaaaggggagcgcattgagccttttccagattgacgcggggcgggattggcgcggaggccagcgccaagcgtttttactgacccgggagcttgccggccgcggatacccggtcctcctcgtcgcccagcccgaaagcccgcttgagaaaaaggcggctgaggccggtctccgggtcctccccgtcgagatcaagaacgacgcccacatccaggccggatggaaaatcggccgggcgatgcgccgcgagtcctgcctcctggcccatttccacgacggccacgccgccggagtggggggccgggccgcccgcctggcgcgcgtccccgtccggatcgtcacccggcgggtcgaatatcccctcaaggcgaatcgcttctcccggaacaaatacgccgaggctgacgcggtcatcgccatttcccagcgtgtccgggacgtcctcctggagggcggcgtgccggccggccggatcgaagtcatcccctccggcatcgacctcgagccgttcgccgggagcttggacagggattaccttaggcgcgagttcggctttcccccggacagcttcctggtcgggatcgtcgcccagctcgtggacggcaagggccatgggaccttgatcgaggcggccaagctcctgaaaacgttcctccccaaaatcaagatcatcatcatcggcagcggggctctcgagctccggctggccgaacaagcccgcgggttgggcgtcggagacctcgtctttttcctcggcttccgcgatgacgtcccgcgcctcctggcctcgctggacgcgttcgtcctcacgtccgacgccgagggattgggatcttcgatcatggacgcgatggccgcccggcttccggtggtggccacgcgcgtcggcggcatccccgaggtcgtcgaggacggggagacgggaatcctgatccccccgcgcgaccccgaaacgctggcccggacgatcctcagactcgccaacgaccgggatctggccgggcggctcggggctcaaggctttgagtccgtccggcggaaattctcggccgaagccatggtttcacgcatcgtggatctctatgaaaaaatcgccgcctcccaaaaaatcaatctccgggcctgatgtccgcatccggcccctgacgtcgctggaggaattccgggattgcgtttttatccagcggcgggtctgggaccatccggacctggacctgatccccgatcatttcttccaaatcgccttccataccggggcgatccttctgggggcgttcgtcgccgggcggctttccggctatgtctattcgttcccggccgatttcggccggacgaggggtcatcattcccaccatctggccgtgctcccggaggtccagggcttgggccttggcaaggccttgaagtgggctcagcgcgacgaagccctgaaacggaggcttgagctcgtcacctggacctttgatccgctgcaagcccgaaacgccaatctcaacatccatgtcctgggagtcgtcgggcggacgtatctccggaatttctacggggaaaccccgacgctcggcgtcgaggagggcgttccaagcgaccggttcctcgtggaatggcggatcaagtcggcccgggtgagggcccggaggcaagggccgccggccccggtcgatccgcggcggatcccgaaagcgctcgagagggaggagggcggcctcgagccggcgatcgtcccgggccggccgaacctccggcttcaagcgccgcggatcctggtcgaaatcccgggaagaatcgcggatttgccccagggcgaaggcctggtcgccgcttggcagacagccgcccggaaggcgttcgaagcttactttgcccgaggataccgtctggatgatttcatctccggcgagcgctcctattacgtcctccggctgaccgccggaacggaacgagcgcccttctttggacggccctcatgaaaatcgagcgtctcgagcttttcctgcttcgcctgccctatgtccattttttcgagaccagcttcggccggtcttatgaccggacgttcatcctgatcaaggtcgaggccgaggggctggccggctggggcgagtgcacggccgaggaaagccccctttacagcggcgagacgacggagacggcctggcacgtcctgaaagactttctcgttccgctcgttttcaagaaaaatatctccggcccgggagaattccaacgggcggcctcgatctaccggggcaaccggatggccaaggccgggttggagctggccttctgggatcttcaggcgaaagcggccggagtgccgctggcgaagctttacgggggaacgcggacggaaatcgaggcgggcgtcagcgtcggcatcgaggattccctgccggagctggtcgaccgggtcggctcctatctcggccagggatatcgccggatcaagatcaagatcaagccgggctgggacgcggctgcctgccgggcggtccgggaacgccatcccggcatccttctccaagtcgatgccaacggcgcctacgggcccggggacgcggccgccctcgccgccttggacgaattccggctgttgcttgtcgagcagccgtacgccccgtacgacctctgggagcatgccaagctccaaaagaagatgagcacgccgctctgcctggatgaaagcatcctctcgctggcgaccgcccgggcggctctcgagatgggcgcctgccgcatcatcaatatcaaggtcggccgggtcggcggcgtcgtcgaggccagggcgatccacgaccattgccggtcggccggcgtcccggtgtggtgcggcgggatgctcgaatcgggaatcgggcgggcccacaaccttcacctcgcctccctcccgaatttctccctgccccatgatctctcggccagccggcgttattatcgggaagacatcatcgatccgttcatcgagttgagcgggccggggacgatccgcgtgcccgaggggccggggatcggcgtcaaccccgtccccgcccggatcgcccgggcgaccgtccgccgggaggaattccggccgggctgatcctctctcggtccggaatccgcgcgcccttgatcttttgtggcacagatggtatgattcgtgccacggaaaacctcgatgacgcccggattgaccgccctcgtctccacggccgccactctcggcgttcttcacaccgcggccggccccgatcattaccttccgtttatcgtcctggccaaggcccggaaatggtccatggcgaagactctggccgttacggccctctgcggcttgggccacgtcggcagctccatcctgatcggcgccgtcggcatcctgttcgggctgggcgtggccaagctggagattttcgagggcgtccgcggcggcgtggccgccgggctgttcatcctcttcggactgggctatttcctctgggggttggcccggggcttgaggaatcggggccatcatcatcttcacgtccacaccgacggcaccgtccacggcgatcattcctccgccgaaggaacggacggcgtccgggcgggacatgtccacgccgaaccgaagccggtgaacgtgacgccgtggattcttttcacgatcttcgtcttcggcccctgcgagcccttgatccccctgctgatgtttccggccgcccgggagagcgccggcggcgtcgtcctcgtggccgccgtcttcagcctggcgaccatcgcgaccatggccatgatggtcctgcttccggccgccggcctccgcttgctcccgatgagattccttgaacgctatctccatgccgtcgccggcttcacgattctcgcctgcggcctcggaatggcctttctcggcctatagtctcctctgttttgacttcgaccggccgatggcttagactggccgggaaaaaacgtcccccgatgaaaaccccgactttcctccggcccgctttcggtgccgccgccgtcgccctgttcattcagtcgatcgccgttcccgccgccgcgccggcggccgcggtcgttctgaccggcctcctggactccgaacgcgtcctggaggctctccccggagcggcccgggccgcccgggagtacgagccccatttccgggcgatcgacggccttcgcggcttcgccaatcccgcccggatcgaagtcttcctggggacgtgggacgagaacggccaagagctgatcgcggcccttctcaagacgctcgaggaagcctttaatccggccatcgaggtcgtttggatcggcgtttcccgggacttgcgggaaccgccggaggcgcgccgggccggcgtggaacgggttccgacgatcatcatccaggtggaagggaaggagaaaggccggatcgtggccgtccccgacaataccttggaagaggatctggctacgattctcctcggcgtccctttttccgaggccgattttgatcttttccgctcccggccccattcccacctgccgatcgattgcactccctgtcacctcccggtccccgacaaggccggtcgtccggccgccttctgacccgccggccgcgcggattccactggtcgaaccgcttgagaacctatccgggaggaggagatcgccccccgtttcgattattgaccggagatgatcgatcggatcagggacgacgcgattcgtgcctttgttttcggtccggggttgcgttacaatgcccgcgttgccgggccgccgaccgggcgcgcgccgggactcgaggagtcacatggaacataaaaacgagttgacgattccggccattctggccaagagcgcggagctctatgaaaacagaaacgccctcggtttctacgattcgcccgccttgagctaccggcagctgaaggataaaaccgatcagatcgcggccttcctggccgaccggggaatcgtccacggcgaccgggtcgccatcctcagcgagaacagtccccactggggtgtcgcctacctggccgtcacctccatgggcgccgtcgccgtgccgatcctgacggatttcagtccgacggaaatccatcacgttctccggcattccgaggccaaggccgtctttgtctccgagaagctgtacggcaagatcgacgaggcgtccttcgaccacctcaagacgcggatcctgatcgatgatttttccgtgatcaaaccggatacgagcaaggacaagctccgccggctgatcgccgagggcagtcacgagctccgcaagatcaaggcgatggccttgaagtggctgggccggatcccctcgcaggtccagtccgaggacctcgcttcgatcatctacacttcgggaacgaccgggcattccaagggcgtcatgctcacccacgggaacctcgtcagcgatgtcctggccacgacccgcctcgtcgatgtgaactgcgaggaccgcttgctgtcgctcctccccctggcccacgtctatgaatgcaccctgggattgatcacgagcttgatgaagggggcttcggtctcttacgtccacaagccgccgacagccgcggtgcttcttcccgccctccgggcggtccagccgaccttcgtcctgtccgttcccctgatcatcgaaaaaatggtccgggccaaggtctttcccgctctccggggaaaagccctgatccggatggcctgcgccgtcccggcgctgcggaagatggtcatccgcaaggccggggcgaaaatccgggcggcgttcggcgggaaattgaatatgttctgcatcggcggggcggccctggcccccgacgtcgaggatttcctgatcgaagcgggtttcccctactgcatcggctacggattgacggaaacggcgcccctggtcacggggacgaagccgtttgaaacccggccccggtccgccggccggcctctcgagggcgtggagatccggatcgccgatcccgatcccaagacgggcgaaggagaaatccagctccgcggtccgatgatcatgaagggttactacaaggatcccgaaaaaaccgccgaagccttctccgacggctggctgaaaaccggcgacctgggatgcctggacgccgacggattcctgtacatcaagggccggtcgaaaaacgtgatcatcgggccgagcggggagaacatctaccccgaggtcatcgaatcggtcatcaaccggaccgactccgtccaggagtctctggtcttcgaggagcaagggcgattggtggcccggatccacctgaactacgaagccctggacgcgtttttctccgagaaaaaatggagcgcctcccagatccgcgagcacatccgccgtcttctcgaggacatcaaggcgaaggtcaacgaaggcgtggcctcgttctcccggttgagccgggtcatcgagcaaaccgagccgttcgagaaaacgccgacccaaaaaatcaagcgctacctttacgtcgaacggacgatcgacggcgagggagcgatcagcgtttagtccttcaaaattccatccgaaaccggctcggccggacccctcggcgtccgcctgagagggaatgacgacgatttccatcgggagtgagccggccctcgttttcaaggacgatgggacgcgccgcctcggatgaggggcggggcgggaggctcggccctccgcctgcaagcgtccgccacggcgaagatccggcggtcgctctcaggatccgccgcccgcgctgatcgggattcttctgagggcggatcggcttggctctcttggaaagccgatgaggccgcttattgaaaggcgagccgggcgatcaggccgttccggccggcggcccaggccgccagcccgttgccggcgaaaccgagggtatgaaatccttcgggaccgccgatcgcgatccaggtttgtcctccatcgaacgatacgtccgaaccggacgggccgacggtcacggccggagacgatgggtcttccgggacggccgcgacggcttcccggaatccgcccggccgccggccggaaaccggcgcccatgtttttcccccgtcgaaggtgacggcggcgttgtccgcgtcggccggctcgttccggtaatccccgcccacggcgatcccggccttttcgttgagaaaataaacggagaatcctcccgacgacggggttccgccgccgaggggagcggaaacggcttcccatcggacgcccccgtcggaggagagccatatccgcgaggccgccccgcccgtgcagaaccaagccgcgttcccccggacgtgaagggccgttccggaggcggcgaacgccgcctcgccctcgagggcggccgggcgggattccagcgggagggaacgccacgtccttcctccgtccgaagtccggagaagaaagaaccggccgtccatcggatctccgagcgccaagccgttcatcccgtcgaagaaggccaaggcgtcgaggaagatcccgggggagtcgtcgaaatacgtttccgtccatgtccggccgccgtcggccgtgcggaagaggcgggccgggcgcccggcggccatgacgacggcttcttcgggaccgaaggcctcgatgtcgcggaaatcagcctcttccgcgcccgggaccgggacggccgtccaggtctcccctccgtcgacggtccggagaaccgttccctttgatccggaaacccacgcggtccgctcgtccacggcggacaggccgcgcaggctttcggacgttccgctcgtttggatcgtccaggacaaggacggcatcgatgccccggccgggagaaggccggcggccaggacggccaggccgagaccggccgccgccgccctccgaaaaataacgctcatgacatgcctcccgtccattctaacccaaaccggcccgccgggaaatgatgtccgttttcgcggcggttcgtgtacaatgaagccggcttgaccggacaaggaggcggccccgatgcgattttttaaacgtccgttatggacctgcgtgctggcttcttttttatcggcggccgttggatccttcgccggtccgccgccggccgcgggccggctcaagctggatgtcctgccgacggtcttcttcgtcgaggaagcgggcgcgcttcttcagaagtgcgaggcggttctcgagtatgccggaccggaggcgcccggagagctgcggatcaggggattcgccgccgagatccgccaagcccttccgaagatcgggccgggcaggcactccgtcgtcgttcatctccccgatcacgcccggccggtcagggcgcagttttccgtgcgggtgggaaacagcacggcctcccggagccttgttctcgcgccccagcggaaatggacggtttacctctggccccattcccacacggacctcggctataccgattttccgtcccgggcggccaagaaccaagccgaatacttggaccgggtcatcgagttctgccgggcgaccgaggcctatcccgacgaggcaaaattccgctggaacatcgagatcgcctgggccttggaaaattacatcaagagccggccggcggagaaggtccaggcgctggccggcctgctgcgttccggccgagtggagctttcgggctggtatgtccagctttcggatctgttcggccacgaggagctcgtccgggccgtcctgccggccaaggatttcagccggaccctggccttcccccttggggcggcgatgaacaacgacgtcaccgggttcagctgggcttccccccaaatcctcagccaagcgggaatccattatttcgccgtcggcatcaacgagacgcgggcccgagccccgcttcgcaagccgaatcccttctactggcaatcccccgacggggcgaaagtcctcgtctggaacggcgagcattacctgttttccaacctggagctccgtcttcatcaaggaaacgccgaaagcgagccgcgcctcgctgaatacctgtccggcctccaagcccggggggactatccctatgacctgatcgcttttccgatcagcggccggccggtggacaacagtccgccgaaacgggagttgtccgaccgggtggccgaatggaacgcgaagtgggcctatccccggctccgcctggcgacgatgagcgaatttttccgggttctggagaaacgatacggcgcgaccctccccgtccataaaaaagcctggcccgattactggacggacggcgccggctcgacggcttatgaaaccgggctcaaccgcttggcccaagacgatttaacgacggctgaaaagctggccgcggccgcctccctggttgagagcggggcgccgttcccgaaagccgagatccgggacggctatgcccaggccatgctgtttgacgagcacacgtggggctcgcaggattccatcagcgagccggaggcggagtcggtccgcggccagtggattcaaaaatcgtcccatgcctatgaggcccgggaaatcgccggctccgtccgggaccggagcttggcggtcctggcccgcggcattacgaccggcgacggcctgcccctggccgttttcaaccccttatcctggagccggacggacgtcgtccgggtcattctgccccgcctcctggccgagctggagggtcggttccgtctgatcgacaaccggaccggagcggaaattcccttccagatcctcgacccgaacatcttgatgttccgggcggagaacgtcccctcgatcggctatgccgtcttcacggctgctcccggagagccttccgcgccggccgaagcgggagcggtgatcgaggacaaccggatcgaaaaccgatttttccaggtgacggccgatccggtcaccggcgggctgcgaagcctcgtcgacaaggagacggaccgggagctggtcgatccggcttccgccttcgggcttaaccagctgatttacgagaacccggaaggcggccgggaagccgtcgatgaccggtccaagcgggccgccttccggcggtatttcccggaatccgccgccgtgtccgccggcttccgcgggccggtcgcctcgagccttgtcctttcctcccggatgttccggtttccggagatccggcaggaaatcatcctttacgatgatctcaagcggatcgatttcatcaaccggatgcgcaaggaggagacgaccgaagccgaggccgcgtatttcgcctttcccttccgggtggagaacggccggctccggctcgaaatcgcggacgccgtgatgtctcccgaagccgatccgcttccgggaacgacccgcgactggctggccgtccagaactggatcgaggcggccgggacgaaaaacacggtggtctgggctccgctggaagcccccctcgtccagctcggcgacatcaacaccgggaaatggcaagccaagatggatgtcgcccgccccttcgttttttcctatgtcctcaacaactactggatgacgaattttaaggccagccagggcggcccgctcgttttccgctacgccctcaccagccggccgggcggctccgatcaggtcgcggcggcccggttcggggcggaagcccggacgccgcttctcgcggaatggctgccgaatcaaacggccggcgtccttcccgcggattccctgagctttttcgccgtcgatcagccgaacgtcctgatccagacggtgacggcccccgaatcgggcgaggggatcgttctccggctcagggaaatcgccgggcgggagacgaggacccgggtgtcctcaagcctgttcacggccgaaacgctgacgtatacggcgacggacatcggcgagcatccggccaatgcctttgaggtcgtcccccggtcgatttatgtcgatctcaagccctttcagatcctcacggtgaagatccgaagcccccggtagggagcccgcccggagaaccggggaggtcagagactcatcaggacccgggcgagacggtcggaatcatgtcgggctaggtcgcggccgcccagcagggaagcccggcggacgcggccttcctcgagatccggctcgacgaattcagccctctcggccgcgtatcgtttcaacatccgggcgggcggcttttggtcgttgcagacgatgtcctggacgattccccggccgaggtaatgctccagctcccggacgaaatcgacggccgtgaaaccgagcgtttcccccgccttggtcatgatgttgcagacataaatgacgcgggcccgggttttccggagggcggccttgaccccggaaacggcgatgttcggaaggatgctggtgtagaggtcgccgggcccgatgatgattttgtccgcttcgaggatggccgcctcggcctccttgttgatccgggcccggggaacgacgaacagggagcggatccggagccgcggatcgtgccgcggaatgctgatgttcgtctcgccgacgacggtctggccgttttccaggacgacaccgagctggcagttgttcagggtgacgggcaggacctggccgcggacattcaggattttcgccgcctcccgaacggccgcggcgtcgcccccggtgaggtcgcgcaggacggtcaggaacaggttgccgaagctgtgtccgctgagacccgagccccggtcgaaccggtattcgaagagcttgcggagcaggccggtatcgcttgaaagggcgaccaggcaccgccggacatcgcccggcgggaggaatccgaattcatcgcggaggcgtcccgtgcttccccccgaatccatcatcgtaacgacggccgtgaggtcgacgggatactttttcagtccgcaaaggacgttgtacgagcccgttcctcccccgatgacgacgattttttccttctttctctttccacccatcagactctcccgcatctccattctataaatcggccggcgggcccgtcaaggaatttcgggcttggtttgaccgggccgccgggggcgtggtataaacggcctgatttttccccggaggaacgcccatgaaatccctgacctatcgccgggccggagtgaacatcgccgcggccgacgactttctccgccggatcaagccgctggtccggacgacctcgcgccccgaggttctcggagggatcggcggattcagcggcctgttccttccccggttgaaagggttgaaagagccgctgctcgtttcctcgaccgacggcgtcggaaccaagatcatgatcgccgacatcctcggccggtacgacaccgtcgggatcgacctcgtggccatgaacgtcgacgatgtggtcgtgacgggggcggagcctctgtttttcctcgactacatcgcttgcggcaaagtcaagccggcgatgctcacccaggtggtgaaagggatcgtccgggggtgccgagaggcgggctgcgccctgctcggcggcgagacggccgagctcccgggtctctacggaaaggatcagtgggatctggccggattctgcgtcggcctggtcgacaagtcccggctcatcgacggccggaaatgccgtcccggcgacgccgtcgtcggactcgcctccagcggcctccactcgaacggctattcgctcgcccggcgcgtgttcacgaagaaggagctcgccggccccttcggccggacgctcctccgtccgacccggatttacgcccgcctgctgctcgaagccatggccgcgatcgacatcaaggcgatggcccacatcaccggcggcggattctacgacaatatcccccgggtgattcccgccggctgcggcgtccggattcaaaagcgctcctggcccgttccgcgcattttccgggtcatccaggagcggggcggcgtcgccgaagccgaaatgtaccggacgctgaacatgggcatcgggatgacggccgtcgtcaaggcggccgacgccgggcggatgatccgctggctcgccgcccggggccagcgggcttgggtgatcggcgagttgacgcgggattcctccggcgtcgtcgtcgagtagccgtcgccggtccgggacggggaaccggccggatcaggtcccggtcgaatccgcttcaggaaaataaggaccaggaagccgcggcggtcgatgaactcagccgggacgaggatcccagcgatccggggaagaccgcagccggcttggcggcggattccggccggcttttttttcaggcggcgcggttagtcgctcttcaaaagcgatttccactcgaaaagacccggccggagatcataatttttcaacgcgtcctcggtttcggacgaaagcgggcggagccattcccccaaagcgtcgcggacggcggccgggatttcgaccatcgagatcacccgcgcccgaacctcggtttcggggaagcggtttctccgggccgggggatcgagggcatcgacccagcgggaattgggattgacgagaccggccagggtgaggccgcggcgggcgaaggcgcgctcccaaagggccgaggcgtatccgaaatgggtgcagaaaagccccgcgtaaaccggggcgccggcgtccggaaggcggtccgcggcttcgccgatataggtctcgatcaagcgggcggcttcctctccccgccaatcgctctcaatcaagccgacgaggtccggacacggttgcgagaccagccgctcctcctcgatcccggccgcgaggagcttccgccgatgctccccctcggcgatcgtcgtcgccgtgcccaagagaaggccggccgcccgcggattccgggaaagggcctcggccatcatctccacccccgtgtcgacgatcccgaggacggggacgtccgcggtccgggcgaaggggacgtcgccgagcaggacggagagggtattgcagccgaccaagatgagatcaggcttgacctcggcggccaggctccgcaaggaggcgtcgaaaatccggaccttgtcctcccgggacggaaggctgttgtagccgctgtcgttggagaaaagggcgttccagaaaacgaggtcgacgccccggaaggcccgagccgccttcatccgggaggcggcctcggccatgatcgaaagcccgccgagccccgaatcggtcacggcgatggtgacccgctcccgggaaaaaagcgcggccgccccggcgggatgggaggagccggccggcggcggggggccagaacaggccagcgcgcccaggaaagacggaatcaggaccgcggccgaaatccgacgcggccgggcccctcgttttttttccttcattccgtcgtccggccggcgggggttaaaacgccgtgacgatccccgtcagccaccggtcttccttccgctcgaagtcgcgggtgtattcggccgtccacttgagattccttcggatcaggcggctgacgttcacggtgagggcgttggcatcgtccacctccaaggtcgaattcacccggttccaggccagggtgaaaaacgtccgtccctgttcgccccagggactgaggatcgcctcggccaggacggcctcgctcgtttgctcccggccctccctctggaagagcggattggagtccgttctcttgacataggcgagcaggatctcgacgttcggcaggcgcaggaggaggtccggcccgagataggtgaccgcattgaccgcgcctcccgccccggcttccttgccggcgtatcccaggacgcccacccggacccggcctccggcgaagctctgggcgaggcgtccgacgacgcttttgtatttgtccgagtcgaaaatctcctgctcctcgatgccgttgccgttgacgatctgggcgatgacatccagcccgaatcccgtcttggtcgaaagcaggaggcctcggtcataggccaggttgatgcggctgtcaccgacgcggaacttgaagagggcgtaattctccaccgtcagccgggtttccgtggccttgatggggtcgctgacccgatattgtccgaacatcatgtccaggggcaggccgaagacgttccggaagctcaggaaggtgtcttccaggccggccaccttgccgtcctcggccatcaggaaatacgtgtagtaggaaatatcgtcggagatgttgccgccgctgaggattttcatcgccaagggagcccggaaatctccagtgatgtcggcttccggctcataggccaagtacgcatcgaaacggaaggccaggggcagcgtgcgctggagaaggaggagcggatcccccgtgtcgatcgtcgctcgcggcggctcgttgtccgggaggcggtagccgttgtccatgaactcctccccaaaagccttcaggcggggcaccggggcatggcagacgtcgcaggaataggaatacttgcgggcgaaggccgggatggccgcggcggcttgaacgaggccggcaacgaggaccaggaaggcgaagatttttttcatcgacggctcctcaaaagacgacctggaggacggtttcggccgaattgacctcgagggcggcggattcctcgggcgggaccttcaggaaatcggcgaccgatttgacgagcagccggtagtagagcttggcctcgatccggagagggccttcgggaagagtcgggggaagcgtccaagaataggtttcgattttcgtttcccgggggccgatccggtagtcggttccgaaggaggcggtgttccattggccgatcgtcatccggcccttgggatcgaaataaggcatgcgaaagacccggtggccttcctcggccaccgcgtcccgggagacgcccggaaatccgggcagatccatcatcatgtcgcccatatcttggtaagccggggcgttggaggtgatcgtgtactcctcgtccgggaatccctttttgtccaccggcagggcgtagcggatcccggcggcgtcgacggcgtggacctcgacccagagctggcggtcctccaccgagccggtcgggatcttgtggccggccttggcgttgtagagatggagggaaatgacggccttctcgcccggctcgagctcgtcggcgtcggcgtagattttcatctcgatcgccccccggaccttggagggaacgtgggctcccggaaacgtgtgccgggccatatcctcgacgggcgagcccatgtcggcgcttgtgccgggagcgtgccacatatggcaatcctggcagcggacgccctgtcggctgtagggtccgtcctgccattcgagctgagtggacttgacatagaggccgtagggattcagctcgttgtggcaagttccgcagaattccggcgaacgaacgaaatccgaataccgcgtctcgtgatagggcgaaacgacgccctcccgagggccgtgcttcgtccggccgggggagaggacgtaattgaagttgaccgggacgtccccgctttttccggtgatcgtatgacagatgtcgcaaaagacggattcgttggcccggcttccggcggcgggacgcggcggcggaacgtccccgatgaaaaaggccgagggggcgtggcagccgttgcagccggctttcacctcggcgaccttgggatccttttccgcttgggggacggccagctgaaagtattcgatttcgtcccagggatgggtaaaagcctgggacatcatcgcctgcttccattggacgtggatctcccgatggcattgggcgcaacggcgcggcgtctcgaaggcgtcgtaggattttttctccgggggcggggccgcgagaagaaggacgaggaagggggccgcggccgcggccgcgaacgcgaaacgggacgcttttctcataggcacctcccgccggagtgtcgaaaatattcataccggaaaaatcggccgaatgcaaatgcatgcggaaagccgcatgtcccccttccgggaacccgtccgaactggtggcaaatttcagccgaacatgctaggatatccccggtatccgcacccgacgtgggcgtttagctcagctgggagagcgcagcgttcgcatcgctgaggccgggggttcgaatcccccaacgtccaccatcctttttcctccgttcgctgtttctttttttacgaattgtccggcccgtcggcttcccctcggtccgggccgccgttcgattgactgtttccgaatcgacgcgggcggccgcatcgtcgaggatgtcatcgatttcgtcccgcttccttcggcgcccgaaaggcgaaaccgtcccatgcccgtgacggccatcgccgttctggaggattctcatctcctgggcaagcaagcggatcgccgccgcggccccctgggcgtccggtctcgagatcctcgaggtccgaaacggaggaggggcggcctttcgtctcgtcttccaaaggcgcggcggacccggcggaagggatttccaaaattccgttttccgacaaaaacggaacgggcgtccgcggcgcctgcggttaaagataggaccggatttccaaaagacggtcccggaaatagggattcgccagcgaatccggacggatggctttttcccttcccggagcgtggacgaaccggtttcccccgatgaggattccgacgtgggacgcccggactgttttatccatggaaaaaaagatcaggtccccttttttcgcccggccggcgggaacggcccgaccggccgcggcctgctcggtcagagcccgggggaggaaaaggccgttgatccggtagacggtcatcgccaagccgctgcaatcgaacccttcctcgggcgaggcgcctccccaaacatagggaaattccacgaaaccgagggcggtggaggccaggcggtcgcggaggtcgtcctccgttccgccggccggcccggggatgatttcgcttccggggggaatgatcaggaaatcggcgatgagacggcggccgagaagcgcgtcggccgcctcgaccgcctccttccgcgtccgaaacggcccgatccggaccttgaacacccgcgtttcgtgaaaaagatagaaggcgttccagccttgctcccggagagaccgggtgagccgggcggcgttgtcctcgagggaaaaggcgccggcctgaacttggtaacccggcggcgggccgccgccggggcccgccgcggggccgagaggcaaaacccgggcccggggccggcaagccgggaggaaaacggaaaggacaagcaggatcagcatggaaacggccgaaaacgggccgatagggcgggacgaaaggcttctcatggtcggatgagccgcttctctgccctctattgtaccttttccttcccggggatgaaatgtttgcggaaaaggcaaccttttccctggattgatcatctatggcggtgtggagagaaacccgatgattcaggaagcggcgctttcccccagccttgaattcggcgataatgccttcgtgaggtattccaggcgggaaacgggcgtccggatgatcgacatcgaatcggaagagctggccgacctgatcattcaggcccgggcgggggagaccgaggcgatggaggagatctatcgccgttttaaaaccggcttgttcaatctggcgttccgctattcctatgaccgggcgacggccgaagaccttctccaggaaatcttcatcaaggtcttcacccatttggataacgtcaagaatccggacacgttcgccggctgggttttccgaatcgggttgaacacatgctacagccatctccggagccgccgggttgaaatggagaaaggaatccccctggaggacattgaaggcacccgctgcggcgcgaccgaggaaaatcccgcccgcgacatgcgccggccgctggacgacggaatcgccgccctgccgggcaagctccgggagattttcctcctccatgatgtccatggattcaagcactcggaaatcgcccggatgctcggtctttccgtcgggacgtcgaagtcccagcttttcaaggcccggctccggatgcgggactttctggagcggaaaggcgtctgctaggagacgaccatgaagtgtactcaagcccatgagctgatcggcgaactgctcgaaggcacgatcagggaagaggatcgccgggccctcgaggaacatctcgagtcctgtccggactgccgggagctgctggctgatttccaggagatcaaaacgcaagccgcggctcttccgcggatcgaaccgtcgccggccgtctggccgaacatcctcgacgccgtccgccgggagcggagggagcgatccgcccgggcggttctgagcgtgtcttggtgggaccggttattcgctccgggccgtccccgctatgccctggccgcggccttggctcttgtcctcgtcgtcgggggcgctctcttgattcttccctcccggaagcccgctgctccggccgtgtcatccggaaacggcggcgaatacgcgatggccaagctccaggaggctgaaatccattaccggctggcgatccgggctctatcggacgccgcggccgggcagcagaccgggctcgatgcgaaaacgatggaagccctggaccgggacctccggacgatcgatgccgtgatcgcctcctgccgcgaggccgtcctccgcgatccccggaacgtcgaggcccgcgtctacctcctgggcgcgtacaagggcaaggtcgagttccttgaaaacatcatcgaagcgaagaaaaaatcgaccgctcccctgagcggcaagatcgccctttgaagagaggaaggagaacagccatgaagagaatcggaatgaacaaagccgtcgtcatcgccgttttcggcgtcttccttctcgccggaagtctggccgcaagagacacgtacgaggagaaattcgaccggaccgaagcgttggatcgcaacggccgggtttcgctggagaacatctccggaaccatcgaggtccggagttgggacaaggccgaagtccggatcgacgctctcaaggtttccaaggcgtcctcccgggatcaagccaaggaaaacgccggcctggtgagaatcgaggtcgtcaaggaaggcggcgtcctgcggatcgagacgaaatatcccgaacggaggttccgcggcaataatctcagcgtcagcgtgaactatgtcctcaccatccctgaccaggcgtccctccgggtgaagaacgtcagcggcgatatcgatgtccagaagatcggcggcgatctcgacatcgacgaggtgagcggcggcgtccggatcgccggggccgccaaaacggtcgattgcaagaccgtcagcggcgggatcaccctccgcggcgcgggcggcgcggtcagcctcaaggccgtttccggaggaatccgggccgaggacgtcaagggctccatcgaggccgaaaccgtcagcggcggcatcaccctcggcaatgtccgggaggcctcctccgtccgggccaagaccgtcagcggcgggatcgattgtgaaaccgaaatcctgccgtcgggccgctacagttttgatgccctgagcggcgggatcacgctcctgctcccggcgtcggccgccttcgaggtcgaggccgagaccttcagcggccatatcgcgaccgatttccccgtcgtcgtgtccggcaagatttcccccaaggaattgcgggggacggtcgggaccggcggggcgaccgtccggatcaagagcttcagcggacgggtggagatccggaaaaagtaatcctccggccggatggaggccgttgcgcctccggacatcgtccggaggcgcttttttttaccgtccgaccggaaaataagattgacaagattctctccccgaagatacactcttggcggaagattggacatgggcggggcttctttacgtgatcgattcccgttttttttcgtccctcaaatccgtccttcgaccgacgccggcccggggcggcgcggccgggaaaagattcggctgatttcgtccgttgttttcatcctggttttgatcggcggagcggccgtcgcgcccctccgggcggaggcgccgccgcgccgcttcgggaacgatttcgtccgtctttccgtcaacgaagggatgtcccagggttccgggatatcgatcgttcaggaccggccgggattcatctggatcatgaccgaagacggcctggaccgctacgacggccgacgcttccgcgtctatcgcgtgaccgaggagccggcgagcttgagcgacgtgacgggatccgttctgttcgaggactccggggggattttatggatcgggaccaactccggcctcaaccgctacaaccgggaacaggacgacttcacccgctacgtccatgacccggacgacccgaaaaccatcagccacgacatggtgtattccctctgcgaaagccggtccggggacctttgggtcggaaccgaaaacggcctgaacgcgttcgatccgaaaaccggaacattcacccggtatatccggacatcccgccggcgggttccctcgtcgcccgcggcgatccgatccctggtcgaggacgccgaaggcgttctctggatggcgacgaacggggggcttcacgccttcgaccgggcgaggggccgggtcaagcgctatgtccatgatccggacgatccccgcagcctcagccgcgacgaggtaaacacgctgttcctggacgaggacggaacgctttgggtggggacaaacggcggcggattgaatgccttgaacccgcaaacaggaaccttcacccgatatcttcccgatttccgcgatccccgaagcttgagccacgccgtcatcaacgtcatttaccgggaccgggcgggccgcctcctggtcggaacctatgacggattgaacattttcgacgaggaaacaaaggatttcaccgtcatccgccatgatccggcggacccggacagtctcagctcttccaacattatatccatcatcgaggaccggacgggcgtgtattggatcggcacgcggggacggggtgtcaataaatatgtcccggaccggaacaagtttcacaagcttcaggagatccatggcgggaggaaggagctcatctccaacttgatccggtcgttcgccgaggatgaggcggggaacttgtatttagcctccgaggacaaaggcctggagtattggaaccggacgaccggcgcgcacgccttcatccgccatgatcccggcaacccgtccggcctcagcgacgatgccgtctatgctttgagcctcgacgaaggcggggcgctttggatcgggacgctcggggggggattgaaccgttacgacccgaggaccgagtcgttccaacattggcgccgcgactcccgggatccctccagcctgagccatgattccatccgttgcttgctgcgggatcgcgccggcgcattgtgggtcggcaccgacggcggcggattgaaccggttccttccggaaaaaaacgcctttgtccgttacccgcatgatcccgcccggccggattcgctcggcttcgacctcgtccgggcgattttcgaggacgcctccggaacgctctggatcggcttggccggcggcggcctggaccggttcgaccgggcccgggaaaccttcacccatttccggaaacggcccggcgatccgggaagcctcagcaacgattatgtcatggccattacccaggattccagcggcgcgctttggatcgggacggccgacggactgaatcaattcgacccgagaacggagaccttcgtcaagtatggggtcgccgagggccttcccaacgccatgatctacgctcttcagatcgacgagggcggccagatctggggttcgaccaacgccggcctcttccgcttgaacgtccgcactggggccgtcaaatcgttcgatgtgtcggataatctccagggaaacgaatttctcgggggatcctcgttcaaaacgaaggccggcgagatgttcttcggcggcgtctcgggcttgaactatttctttccgagcgacatcgtcgacaatccttttcccccggacgtcgtcctgaccgatttccagatctacaataaatccgtgcccatcgggcgggaagtggaaggccgggtcgtcatggcccaggcgatctggagcacgccggagatcgagctgacattccgggaccggctgattacgttcgaattcgcctccctccattacgcggcgcccgaggacaacgtctgcgcttatatgatggaaggactggaggaggactggatcacggtcaaggagcggaggttcgccagctataccaacctcccgcccggccggtatgtcttccgggtcagggcgtccaattccgacgggctctggaacaacgacggggtcgccttgcggatccgcgtcattccgccgttctggaggacatggtggttcctggggttggccggaaccgcaatcctggcgattctcggcgcgtatatcacgacgggcatccggcggaaccgccggcggacgaaatttttggaatcccgggtccgggaacggacggccgagctcgaaacgcagatcgcggtccgggaagcggccgagcgggagttggacaagcggcggcagtacctggaatcgatcctcctcaacgctccgaacgccatcatcaccgtcgatcccaagggccggatcaccgaatggaatccgggcgcggaacgcctcttcggctgggcgcgggaggaagcgcaaggaaaggaagccgacggcttgatcgtcgcgaaggatctccaaggcgaagccgcccgcctgacggagatgaccttcgccgggacggcgcttcccccccgggaaagcgtccgcctgcacaaggacggccggccggtccccgttttgttcggcggatcgccgatccgcagcggcggcgaaatcgtcggaacgctgttcgtgtacacggacatcaccgagatcaagaaggccgaggaagccgcccaggaagccaaccgggtcaagagcgaattcctggcgaacatgagtcatgagatccgaacgccgatgaacggcgttttcgggatgacggagctggccctggaaacggatctgacggcggagcagcgggagtacctggaggcggtccagtattcggccgcatccttaatggggatcctcaacgacatcctggactactcgaaaatcgaggcgaggaagatcgagatggaatcgatccccttccgcctgcgggatacgatccacatcatgatcgcctcggtcgccctcctggccgagaagaaaggattggagctggcttatcatgtcgccccggacgttccagaccgggttaagggggatcccggacgtctgcgccaggtcctcaccaacctgatctccaatgccgtcaagttcacgtccgccggcgaggtgatcgtgacggtcggcgtggaagagcgccttcccgaccgggtgaagctccatttccaggtgagcgacacgggcatcggcatttcccccgataagctccgatcgatcttcgccccgttcacccaagccgacagctccgccacccggctttttggagggacggggctcggcctggccatcaccgcccagctcgtggagctgatgaaaggaaaaatctgggccgagagcgtgctcgacaggggaagcacgtttcatttcatcgtccccctggatcttcagacgcagccggaggaggaaaccgctccaagccgttatgaagacctgttggatcttcccgtcctcgtggtggacgacaatgccgccaaccggatgatcctgaacgacctcctgacccaatggggactgaagccggcgcaggcggagagcggcgagaaagccctggacatgctgcgcgagcgcgcggccgccggccggccgttccgcttcgtcatcaccgacgccaatatgccccgcatggacgggttcgccttggccgcggccgtcaagacgatgccggaatacgccgatgtccaaatcatgatgctgagctcggccggactgcgcggagattcagcccattgccggaagctgggtttgacggcttatctgaccaagcccgtcaagccggccgttcttctggatgccatcctggcggccgtggggatctcccccgaaaagcgggcccaagcccccttgatcacccgtcattccttgggccgctctcccgcccggtatgagatactcctggccgaggacaacatcatcaaccaaaagctggccgtccgcatcctggagaaccagggccaccgggtcacggtcgccggcaacggagccgaagcgctggaggccctcaataggggccggttcgacgccgtcttgatggatgtccagatgcccgtgctggacgggatccaggcgacgacggaaatccggcggcgggagatggccacgggggcccatatccccatcatcgccatgacggcccatgcgatgaccggcgaccgggaaaaatgcctcgccgtcggcatggacgactatgtctccaaacccctcaagccgctcgacctcatgaaaaccatccagcgcgccgtggaccggatcacccgggagcggcgggggatcccgagggagccctgagctcccgcccggacttgaaatgaacggcctccgcccgccgcgacgggacgttgttctgatcaccggcgaaatccacgtcgatcatcctctttccgcctcgggcgtcatcgcccgggttctcgaggccgagggccgcacggtcgggatcatcgaacaccccgattggaaaacggacgccgattttctccaatggggcgccccgcggctgtttttcgggatcacctcgggctcgatcgacagcctgttggccaactccacgcctctcaagcggcggcgggagaaagacccccacgcgccccggaagacggccatgcccgatcgggccgttcttgtgtacgccaacaagatccggcggctcttccccggaacgcccatcgtcctcggcggaatcgaggcctcgctcaggcggttcgcccattacgattactgggagaaccgggtccgccgcagcctgatcgtcgacgcccgggcggacatcctggtctacgggcccggcgagaaggcggccgtcgaaatcgcccgtcgtctggaagaaggacttgatttgcagggaatcgccggaacctgtgtcgtctcccggaacgttcccgcggatttcgtcctccttcctccggccgaggccgtggccggctccccggacgccttcgccgaggcccagatgaaactctcggtccggacgccgttggcccagggccacgccggacgattcgttcttcagtatcccgccccgcgctggactccggccgacctcgaccggatttacggtctgccgtacagccgcctcattccgccggatttccccgagttcgggatggcccggttctcggtcgtctcccaccgcggatgcttcggccggtgctccttctgcgccctggccctccatcagggcgacacgatcgtctcgcgctccgaggaatcgatcctggaggaaatccggcggctcgtccgtcatcccgagttcaaaggatcgatcgacgacctgggcgggcccacggccaacatgtacgggatggattgtgaagcggcctgcggagagtcctgcttggactgcggccgccgtcccggacatgaacggctgatctcgcttttgcgccgggcccgggagatccccggcgtccggaacgtcttcgtccggagcggggttcgctatgacttagccctgtccagcgaggaatacatccgcgagcttgtcgggcatcacgtctcgggccttctcaagatcgccccggagcacgtttcgaaaaacgtcctccgcttgatgaacaaggattccggcggggcctttgagaaattccggcgggcctttcggaaggccgacgtttccggccgccggcatctgaaatattatttcatggtcgcccatcccggctgcggcccccgcgaggccggggagctggcccgggaagtccggcggctggaaaaagaaggggaccgcccggttgaaggcgtccagatcttcaccccggcgccgatgaccctctcgacggcgatgtaccacacggggcgcgatccgcggacgggtgaatccgtctacgtcccccggacatttcaggaaatcaaggaccagaagcggatgctcatggaaagacggccgggaggggcgtccgtccgtcccgcgcgccggacccggaaccgttgaaagcggccgcgggcgttgtcccccgaagctctccattttccccctcgtttttcgacttgatgatattgttcgttttcgagaaagtgaatatggaggtcacggaactagcgagggccggaatttcgggcgtcctggcgggcttcctatcgctcggtttttcgagctgcccgggagggaaaccggccgagcggctcttttccgcactggggagcgctcccgcgggcttcaaccgtccaggcagtggaaaccgggcggtcttggaataccgcctcggcgaaaaggaatcccgggttaggatttccgtcgaagatcgaacatggacggaggttcttcccgcggccggacgcattgagcggagcgtccttggtttcatcaaggaaacagcccggccgtcggcctcacggcggtcgctggccgcggcggccggaagaatcgccggggaattgattccttttgaccggacattgaccgccctgggagtcgattgcttaatcgtgatcccggacggcatcctgtgtcgtctcccgttcgaggcgcttcggacggccgatggccgagggttcctggtcgagagatacgcgatttcctacgcgcctttccgattcggtccaagcctcgaccgttcggaagaggagcccggcggctcttgtctcctggccatgggcgcttccgtcccggaccgcccggccggggccggcgaagcggacgccgtatttgaggaaataccgggggtccgggaggaaatccgaagcgtttcccgattcttcgaccggaaccgtcgttttgtttacctggacggggcggccagcgaggcgactctccggcggcaccgcggcggccgctacaggcttgtccatatcgccgggcatggaacgaccgaggcgggcgacccggggcgttcgtcgcttcttctttgccgaagcgccggggacgacggtctgcttcgagccgaggaggcgcgggcgctgggcttggccgccgatctcgttgtcttgtccggatgccggaccgcgtgcggcgacgctccgcccaaagaagcggggggcttgccccgggctttcctggacggaggggcccggtccgtcgtagccactctttgggcggtgccggaccgatcgacggcggacttcatgaaggagttttaccgtcacttggaagccgggcggggcaagtcccgggcgttgcaggcggcgaagctggggatgatccacggcggccggccgcatcccttctactgggccggatatatcctcctgggcgagccggaggagacgattcttttcaactgacgcgcctccgggggcggaaagagcgggcccggccgggccgtcgagcggcggagcgtatcggccgccgtcttcgtcttgagcaatcggcgaccctcggcttgattgtcttcgtccccgtcccctgaaaccgggcggggaagggcgggctttcttccgtctcatgcttccgggagatcactggaaagacggggaaggcgatcctgatccattggaccggtccagtcgattgacagtcccccggcgccgcgcctagaatacgatcacatgttttcctccatttctcccagggaaaacgccgacaggctcagggaaaccgcccgggatcttggtttttccgtcgccggggtggctgacgtttcttccgttcgggagacattccgcctgcccgaaaaccttcgaaaccggttcgtccgggcggcggttctcggcgtccggctgctggacggcgtccttgaggatctcgtcgaccgtcccactcccctttatttccaccactaccgccagcttaatttttttctggaccgggaggcgtttcggctcgccgcccgcatccaggcggccggctttctcgccctgccgataccggcctcgcagatcctcgattcccaaaggcagacggcccacgtttcccacaaaaagctcgccgtcctggcgggactgggacacatcggacgcaacaatcttttggttcatcccgccttcggatcgcggctccggctggtcacggttctgacggacatgccgctggaagccgggattcagacgaaggcggattgcgggacctgcgccgcctgcctggcttcttgcccggccgaagccattaaaatgaatcccgcggaattcgatcatcgggcttgtttcgaaaagctcgatgaattccgccggatccggctggtcagccagcatatctgcggactctgcgtcaaagcctgccgcggccgcgggcaagcttgaaattccctgggaatctcatatagtagatccggatcggggaaggagaagaacatgaaaaaaacattgataccggcccttttgttgatattgctgccggcctcgctggcgttcgccgcaaatgacgcgtccgccgagaacacgggcatcgcacccggatcctataaatcctggagcgcccttccgatcctgatgtatgacaacgacatcgggttcggctacggggccaaagccaagctcgtcgatttcctgggaatcaaggaatccttcgacttgatcctgttcaattcctccaagggggagcgctggtatgtttttacgttttccctcccggacatcgagatccggcaggggaagacgtatcctctctccttcgacctcaaggccgaatatgacaagttcctgaaatattcttactacggccaggggatggattcccgcaaggaagacgagacgattctcacccacgaggtgaaaaatctctttctgacggtgggccgcggcttcaccccgcatttttccgcctcggtggcctatgtgtttcggacgatcgattattatggagtccaggacggccccttggccggagaattgaggcggctgaagaagaaatccgcgccgtatttctccctggccatggcgtatgacacctccgacagccagattcatccgacccgggggctccggctgttgattcaagacgacatcgccgtcagcttttcccgcaacggcgacgcctccttcaatcgggtcacgttcgattttcggaaataccagcgcgtcttcggcgaaaaggacgtgtttgctttccggacactcgtccaatatattaacggcgacgagattcccctgtttgatttggcttccctcggcggcggcaacaccttcaatgtcatgaggggattcggcctcaatcgtttcctggacaaggggaaaatcctggccaatgtcgaataccggttccccgtctggtggatcttcggcggcaacgtcttcatcgatgcgggcaacgtctggccgagcttcggcgatatcaatttccgcaagacggtttttgattacggcgtggggttgcgtcttttcatgaaagatttctgcgcccgggtggatttcgggttcagcaaggaaggaatgcggctctatttcaacttcggccacgtcttttgagaccggccggccgagatccccgcttttttgccgctcccggcccgcggcttgggatgacaaaacgtgccaaaaggattaaaagatggcgtttattttaagaaatttcatctgggctcgggctgacagaaaattgtgcaacttcccataatcgttttcttttaccggggttagaaaaatcccctccggggatttccacaagattatgcacataaactgtggaaatgggagcggacgtccgctcctcatttccgcggatacaaatcgaaccaccattccggctggtctttcagccagcggtcgaaccaagccaggatggttttgttgaagagaatcctcttgtcgtacgtgataatcgtatggttttcgtcggcgaacgagatgagctcggtttcccggcccagaagcttgagggcggtgaaaagctggatgctttcccccggcggaacgttcgtgtcggccgagccgtggaggagaagcagcggcgtcgtgatcttgtcggcgtggaacagcgggctccggtcgacatagatgtctttccgattccaggggaagctgccggccgtggccacggcgctgtacgtgtatccccagtatccctctccccaatagctggagatcgagctgatcccggcgtgggaaattgccgccgcgaacatcggagtcttggtcgccagggtcatcgtcatgaatccgccgtaggaggcgccgatgcagccgacccgtttcggatcgacgaagggatgggcggccaggaaggccgtgaggccgtcgatgatctcctcggacgtgatttccccccagtcgttgacgtggaaggcggattgttcctggccgtagccgatcgccccgctcggctcgggtacgtaaacgatatatccatgggcggcgtagagcgccttcggatagcggcctccgaagtcccgggtgatcggggtcgttcccccgtagtaattaacgatcagggggtatttccgggcgggatcgaagtcggggggatagacgacgaaaccgtcgatctcgacgccccgcctgtttttgaatgtccaggtctcgacttttccggcggtgatctccgacccggggagagggccggccagcggccggatttttccggttttaagatcccagaggaagacacggggcggagtttggggggaggaaccgacgaagaccgcccggggggccgcggaggcgatatcgatcctctcgatgacgtccacgccggattcgcgcggaacgaacgttttcccggcgggggcgtagtcgtagagccgcgtccgcgccccgtcggtcgtcaggaagcggatgaccttgccgtcacccgaccagaaggcccgttcgatggacggattgaattcccgggtgatcggccgggccgtccggtccgccaaatcgaagagataagcttggatgtcgtactcattgggaaggcggtccggggggacattgaggccgatcccgccgaacgccgaaggtccgcccagcactaaaagagtcttgccgtccgggctgaaacgggcgccgttgaaccaagctcctttccaaaggaggtcttccttgcgggtagccgggtcgagaaggtagagctcggtccgggaatacgggcgctcggtcatatccaccggattacgggtgaagagaagcgtcgcaccgtcgggagaaaatcccccgaagtcagccgacagctctccggccgtcagcctttcccggacgccgtccggcagggtgaggcggtaaaggtgccggcggtcgcgctgacccggctgccggtcctcgggatcgcggtaacgcttggccaaggccgaatccttcggcccctcttccgtcccggagaagacgagggcgtttccgtccggcgcccaagcatgaaagccgaggttcttgaaattccggagcagcggccgggtttcgcccgaatcggcgtcgacgagccagatcgatccgccgttcttgtcctgcgtcgtatagctgaagcgattcccccgaggcgcccagacgattccggagaccgccgttccgccccgcagcgaccgggtcaggcgggcggagaggccgtcccgtcccgtctcgatgcggtaaagctcgatccaggattccgcctcgccggccggggacatgatccgggtcatggccagggccaggttctttccgtcgggagagagcgagacgccggccgcccgcgggccgtccagtatgtgccggagggcgactttctcccccggcgagacggtcatttgcggctccggcccggccggactcccggcgaattccagggaggcgcggacgttccagccggttggggaattcggatcatagacggtcttgatgagaatcaggtggacgcccgtctcgagcttcagatcggccgtcgtccggccgtcgacgtcggccttgacttgggaagcgacctgccgcccgtcgaaaaagacccgatgaagctgtcccgtcctcaccgtgagacgggccttttggaaacggaacgcttcgacgtaggccgccaggtaggcggtcttcggtccggggcccgcggcctcgagggggaggccggcttcgccgcaggggacctctgtccacgcggccgacgtcccgtccgaccagcgcaatccccgtcccgcggcgggccggacgccgccgatctcgagctcctcgaattccaggagctcggccgggccgaatccaaacgccggatcatcggcgaaagccggcggggggcaagcgaagggaccgagccgcagccaggcgggaaccggcttttcagacgtcggctcctccgcggcggttgcggcctgcagcgagcgcggcgggagagcgaggaggaacagcccggcgataagaagaagggggggcaggcgaagaaacgatttcgatcggatcgtcatgtctgtgtatcctttcggttcatcagggaaacgcggcggcgcttacttccggtttttaacgtaggcatcgaaccattcgatcatttcagccaggacggtgaacaccgattcccgggccaggtagccgtggctttcgcccggcagggagacgaagcgggccgtcgctccgaagcccttcagggcggcgaagaggcgctcggattggatgaaaaacgtcccggagttgttgtcgttcatcccgtgaatcagcagcagcggcgtcttgatcttgtcggcgcacatgaacggcgacatcttgagataagtctccggggcttcccagtaggaccgccgttcgctttggaatccgaacggcgtcagggtccggttataagcgccgcttcgggcgattccggcggcgaacaggtcgctatgggccaggaggttggccgtcatgaaagcgccgtagctgtgtccgccgacgccgactctccggggatcgccgacgcccaggcgatccaaggcatcgatggccgccttggcgttgccgacgatctggtcgacgaacgtgtcgttgaccgtcttggaatcgccgatgacgggcatggtggcgttgtccaggacggcgtagccctggctgacgaaaaacagctgggacgcgcctcggtagaaggtgaagcggtcggtcgagccgcggacttgtccggccgtggccgagctgccgtattccagcggataggcccagatgacgacgggcagccgcgttccttcttggtaatccgccggcaggtagagggttcccgagagctcgattccgtcgctccggttgtatttgatcagctgtttcttcacgcccgtcatccggggggcggggtcagcgaaagctgtcagcggccgcgttttcccggttttcagggaatacagatgataattcggaacctcggtccgggattcctgggtgatgacgatatcccggcgctcctgtcccgaaaacccgatgaacgcctggtatttgccgtcggcgcattgaaagagccgccgtttcgcgcccgtcttgatgtcccgaaggtcgaggaacggatggtcgccccggggggatgcgcccctgcccgagaaatagatcccgttcttgtcctggagaatgacgcgttcgccgtctttccaggtcatgaccggatcgccgggattggcataagcgtcctggacgtcgagatcgaagaggacgcggggggccgtctcgggatgatcgagatcgaccagacggatcacccgccggtacgctttcgactcgacttcataggccagggcccgccccggcgtttcgaaatacgccaagccttcgtatcgttttccggtcttcaagacctcgcgcggctctccggaaaacggcgcgtccagggccatgattttatcccggaactccgccgcttgttctggatccccgccgtcgagcgcctcaacccacagaaccgtcgccggttttcgagcctgccaggagaactcccgcggccccgtcgggacgccgttcatgggcgtgttttctcctgagggaagatcggggaagaccttcacggcgtttcccgaaagatcccagatttcggccgaatgggcgaagtcgtaatacgggacgctggtggaaaagggacgcttgaggcggtcgacgaaaagatagcgcccgtcgggcgacggcgtgatcgagagaaacacgccgggcgcgccgaggggctcgatccgccccgaaaccgcgtcaacgagcgagatttggcccgtcgcgtagtattcgaaaagctcttcatcaaaagggtttttcagcagatcctggtaggtggcgactttcacttgccgcccgccggattcctggatggtcgggccgacgggaacgcggggctcgacgggcgccggtccccggtcgccgggaatcatctggacgaggattttccggtttccaggcatccaggcgatcccgctcagcaccaggttgagacgcgggggggtgagcgccctggccttgcctgtggccgtctcggcgacccagagctcgacgccgttctccaggaagcgggcgaaggagatccaacggccgtcgctggaaaaagccgggcgggcgagcttgattcccgccggcagctcgatgccttggtctttcccgtccttgatcgtcttcagagtcaaggccgtgtcgaaaaccgtcatctgccggctgttgtcagccggtgtcaagcgcatcccggccagccggagaaagggacgggccagggttgcgatcgacggcatgctttcgctttcgatcagcagcagacggtcgcctccgggactcagcagaacgcgcggcgtgggcggcgcgctcaaaatgtcgacgatttccttcggcggcgtcttgtagggttcctgggcggcgagaaacggaacggacgcggccgccgccagggtcaaaatggaaatgaaaagaggaaggggctttgtcaagggaagcctccataaataaatttcattaataaccattctttatatcgcagatgccccgaaatattcaatcgggagaatggatttgtgtcaaggcggcatgaaaacttccgcttttttcatgagtttagcttcttggggcgacggggccgggggaaagcggtctcgatacgctcgcccggggtgatctggcggcggagtgaacggattccgcggatgaaggggacggctcgagaggtcctggcgctcaggagggaaggcgcgcgatttttatccgcccggtgatggccagggtcattttgtacgcgccccagccgttgaatatcttgatcgtcgccatgttcgtcacgccgccctccggggtgaacacgggagcattgttggccgtcacggccgctccttcgattccggccgaggcgtcgggaagccaaaggccggaattttcatcgtaggtttcgatcctgtagaaatccgccccgaaccggaccctgaatcggcgtccgttcaggatggatttggcccgggccgaaacgagggccgtccggacttctccgaccgctttctccaggcggtatttcgccgcgaggttgagaaacgacagcgaggccgcggtgatgatgaccgcgaggatcgccagggcgaggaccgcttcgatcaaggtgaatcctcggccggtcatcggtcggtccattggaggatttcccggccgctgataaaaaggaccgggacggcggcccggggggatccggctccgtcggcgaggtccgacgtcaaccggtcgtccggccggatcgtcaggagggcgccggccgtttccaggccggaggcttggaggcctccggagacggtgacctcgtggcgggttccctcgagacggacgccgtcgcgggcggtgagggacgcctggagatgcaagccggccggcgcttcggcggcgacgcggatccggccgtccgcccgggcgccggtgacgagatcccggccgctcgcgtagatgaacaactgggtgctcgcgtccttgagataaggaatcccgtccttccaccggacgccgtcttggattaaatgagtggagatgacgatttcccccgcggaaacgagcgtcagggacaatccggccaagagggagggcgcgtcggggctgtccgtcagagacagagttccgtccgtctcgatgagtcctcctccgagcgaggcgacgctcccgttgatcaggacgaccggaagcggggcccggccgaggcttggaattccgtccggtccggtcatttccaggacgtcctcggccgggctgaagatcatccgccatagcccctcctcgaggcggacttggagatgctggcggccgtcgccggcggccaggatcatttcgtccacgtcgccttggatgaagatgccgccggggacggcctcgctgaccgcgagatacacgccgtcggggaccggttcatcgacgagcggcaggcccagcgcccgtcggagctggaggacggtcagcttgtcgggggagaagatcttgattctcaacgcctcggccacgagaggttccggatcggtcggaatcaagggaaggccggccgccgccgggagcggggaggcgcttcccgattccgggggggcgagaacgacgcgcccttcggccagaagcgcggccgcgttttccggtccgttttcgccggccagcagaaaggggaaagaagataaaggaacgcggccggccatgagggataagccgagatccaaggcggtccttttgttttgaggccggcggctcagccgcccccgggcttcgatcgtcgcggcgaaggcggctccgaaaaaggattcggaatcggccacccgaaccgaccggaactccgtttccgacgaccactcccatcctccggccgtttccgcggcggtcagcggcaagcccgttcccagggcagcggccacggcgtccgtttccccggccaaggtggcggcccggagggcttcatattccccttcagccaggatgaggggaaacggccggccggcgaggatctcgtccaaggcggcctgtccggcccgggcgccgttttcggccgcttcccgaatcagaacggcgtcgcttttatacgcgctccattggcggtacgtccaggtcaacaggcataagccgaggccgagggttgaaatcaggaaggacgcgaagaccacgcccatcgtgatcgagccggtccgtccggtgatccggccgtcagcgcatttttccgagcagggcgtttcgggccaggattttgagggcatggaattcctccggggcggaggcgagagaaaggcgcgcctcggccaggcaggtttcagagtcatagataaacgtgaacgaatggacgtcctccagaagcggctgggcggacgaggaatcggatttacggcggaggactccttgccccgcgtccaagaagagggacgtcgtctggaggacggccgcggaggcttccgggatccggtaatcgcaatccaagggagaggacagcgtcaggattccgccgacggcctccaggataaccgctttttcccccctggtccggtcgtagaggcagagtgtttttcccgcccagtccgggttggctccggccacggcgacggttgtttcgccggcccgcggtccggccgtgagaaccggggccgcccccgcccggacaaggacccatcggccgccggcctcttcggccggggccacgatccccaagcgcatcgggcggacgagcccccggccggcgagcaggacgtccgaccggatccggtccagggcggcccatgcggcctgatggttttcctgccgggacagaagccggaaaaacacgcggcgggcggtcccgaagaattccaggctcccggcgaagatcaagaagaagatggtcaggctaaggagggcttccaacagggaaaaacccgggctgcggtcctccgccctctttctcatcgtccggccaactccggcgtgatcagcaggacggcttccagcggctggtccgtccgtccttcccgggtcagggtgaagctcacttttttcaggttcgcggagacggcctcgaccgtccaggcgacgatgacgcccggcccgtccgtctccggccggaggacgatctcgcccccgccgggggcaagatcgggggagtcgaacggcttggccttgaattcgtcgagctcggaggaaaggagccccgtgaggttgaccttccgtccggctttccggtcgacctcgatggaggtcaggagaagctcggcggttccggcgaggagaaaggaaatgagcccggcggcgaacaagacttcgatcaggctgaatcctttttcctccgttcggacggccggaatctcgaggcggcggaggccgtcggcgtcggcgagaaagatgggtttgttcatggcgacggcggagaatgcgggcggcgtgccaaccggccggaacaatcgatccaggcgggggaagaggagcgcgggccggccgccgtcaaccgtgatttccggtttgccgtggaaggatccgccgggccgtcaacgcggtttgacgaccgcggcccggaggctcccctttcccccgtgccggcgggaaaaaacagatgtcggagttgatcggatcaggcaaatcggccgtctatgcaagaaccgtgcaaaaacaatttccgcgctgttcgctcgaacgaaaaaatgcaaaaaacaacgcttctccgttaacgaaaaaatgtctgtaactatttagattttcgtcaattaaaaaaagtgcggggaaaaatattttttttgcttgacaaactcttcggaaagccctatattatccgagcctttgacctggctttcctatctgacagccgaaaggctgaaacaagtagcggaatgtttcgggccggggcttttctctctcgggcagagagaaacggatctttgaattaaaaagcggagcgattgtgatcgagccaatttgccatcatcaaactcgctaagtgctcgcaagagtgcttataactggagagtttgatcctggctcagagttaacgttggcggcgtgcctaacacatgcaagtcgaacgcgtcctaagggcaactttaggatgagtggcgaacgggtgagtatcacgtgggtaatcttcctttaagtggggaataagctctcgaaagggagtctaataccgcatgacattccgggacacaagtcccgtaatcaaagccgcaaggcgcttgaagatgagcctgcgtcctattagctagttggtggggtaacggcctaccaaggctcagatgggtagccggcctgagagggtgaacggccacactgggactgagacacggcccagactcctacgggaggcagcagtgaggaattttgcgcaatgggggaaaccctgacgcagcgacgccgcgtggaggatgaaggccttcgggtcgtaaactcctgtcagaggtgaagaatgcccgcaagggtttgacggtaacctcagaggaagccccggctaactacgtgccagcagccgcggtaatacgtagggggcaaacgttactcggaattactgggcgtaaagggtgcgtaggcggctgggaaagtcaaggatgaaatcccgtggctcaactgcggaacggtccttgaaactactcggcttgaggataaccgaagagaacggaattcccggtggagcggtgaaatgcgtagatatcgggaggaacacctgaggcgaaagcggttctctagactactcctgacgctgaggcacgaaagctaggggagcaaacgggattagataccccggtagtcctagccatcaactatggatactggatattcctgcactcatgtgggagtgtcgaagccaacgcgttaagtatcccgcctggggagtacggtcgcaagattgaaactcaaaggaattgacgggggcccgcacaagcggtggagcatgtggtttaattcgacgcaacgcgaagaaccttacctgggcttgaactgtcggtatagggacccgaaagggcgacgatcccgggcaaccgggaagccgatagaggtgctgcatggctgtcgtcagctcgtgtcgtgagatgttgggttaagtcccgcaacgagcgcaacccttgtctttagttgccagcgagtcatgtcgggcactctaaggagactgcctcggataacgaggaggaaggtggggatgacgtcaagtcagcatggcctttatgtccagggctacacacgtgctacaatgggcggtacagaaggacgcgagaccgcgaggtcaagccaacccttaaaaccgttctcagttcggattgcaggctgcaattcgcctgcatgaagtcggaatcgctagtaatcgcggatcagctacgccgcggtgaatacgttctcgggccttgtacacaccgcccgtcacatcacgaaagctggttgtacccgaagtcgctgagccaaccgcaaggaggcaggtgccgaaggtatggtcggtgattggggtgaagtcgtaacaaggtagccgtacgggaacgtgcggctggatcacctcctttcaaaggagcaaattgcgcgaaatccttcgctccgcttttttttattttatttccgccggggtcggcgtgggccgaatgacgctgcgctgggcctatagctcagttggtaagagcgcacgcctgataagcgtgaggtcggtggttcaaatccacttaggcccaccaatccctccgcggaaaacggaaccgagcgggaacgtttcggccggggctgtagctcaatgggaagagcgccggttttgcacgccggaggtcgccggttcgagcccggtcagctccattgaaaaaaattttttttataagggccatcgcccccgggtcgggggtcttggatagatgtgcgaacggttctttgacaatcgaacaagcggcattttttgtcttgactaaactttatggtcaagttattaagagcatacgggggatgccttggcgcaggcaggcgacgaaggacgtggccagctgcgaaaagctccggtgagccgttcaacaggctttgacccggagatttccgaatggggaaacccaactaggcaaaccctagttatcccggtctgaatccatagggccgggaagcgaacccggggaagtgaaccatctcagtacccggaggaaaagaaaacaaccgtgattcccttagtagtggcgagcgaacggggaacagcccaaaccgtgtccatgtaagctcgagcgcgttgtggatgcggggtcgaggggctccacgggcttcagctcgatgaagccacggagttacaaaagaccgatctagccgagcgctctggaaagagcgaccagagaaggtgatagtcctgtaggcgaaaggtccggtctctccggtggagttcccaagtaccacggggcacgtgaaaccctgtgggaattcagggggaccatcccctaaggctaaacactcgtctgcgaccgatagtgaactagtaccgtgagggaaaggtgaaaagaacccctgttaggggagtgaaaagtacctgaaaccgtatgcttacaagcagttggagccccgggcaaccggggtgacagcgtgccttttgcttaatgagccggctagtcattttacgcggcaaggttaaccgtcacagacggggagccgcagcgaaagcgagtctgaatagggcgattcagtcgcgtgaaatggacgcgaaggtgggtgatctacccttggccaggttgaactctgggtaacaccagagggaggaccgaaccggtgttggttgaaaacagctcggatgagctgagggtaggggtgaaaggctaatcaaacccacggatagctcgttctctccgaaatagctttagggctagcctcgggtgaatggcatgggaggtagagcactggatggcctaggggttcgaaagttcttccaactccaaccaaactccgaattcccataaccactgcccgggagtcagactacgggggctaagctccgtggtcaaaagggaaacagcccagaccgtcagctaaggtccctgagtacatgctcagtgggcaaggatgtgaggatacgaagacaaccaggaggttggcttagaagcagccatcctttaaagaaagcgtaacagctcactggtcaagcgttcttgcgccgacaatgtaacggggcttaagcatgtcaccgaagctgcggattcgtcctgccttcgggcaggatgagtggtaggagagcattctgacgaggccgaagccgcgccgcgaggcgcggtggacttttcagaagagaccctgccggcatgagtagcgataacggctgtagaaaccagccgcgccgaaaatctaaggtttcctggggaaggtcagtccgcccagggttagtcggatcctaaggccaggccgaatggcgtagccgatggacagcaggtcaacattcctgcaccacctgagaagcgttaccaccgatggggagacgcaggagggtagatatacgcacgtttggaagtgtgcggtcgcctagtagagggaggttccaggcaaatccggagcctcgttaacctcgagtgtggcgaggaagtggggtttcggccctaccaacttattaaccccaaactgccgagaaaatcctctaggaagtttcccgggtgtccgtaccgtaaaccgacacaggtagatggggagagaatcctcaggcgcacgtatgagccctctcataggaactcggcaatctaacctcgtaacttcggaagaagaggtgcctcggtagggtgaacgggcctgcgcccgcgagcccgaggaggttgcaaaaaaatggctctggcgactgtttagcaaaaacacaggactctgcaaagtcataaaaacgacgtatagggtctgacgcctgcccggtgctggaaggttaaggggagaggtcagcgcaagcgaagctttgaaccgaagccccagtaaacggcggccgtaactataacggtcctaaggtagcgaaattccttgtcgggtaagttccgacccgcacgaaaggcgtaacgactagagcgctgtctctgagaggggtacggcgaaattgtggttccggtgaagacgccggatacctgccgctggacggaaagaccccggcaccttaactgcatcctagcattggattctgggatcgcacgcgcagcataggtgggagactttgaagctgggcccccgggtccggtggagtcatcggtgagataccactcttgcgattctgggattctaactcgctcccctgatcggggaggaagacagtgttaggtgggtagtttaactggggcggttgcctcctaaaatgtaacggaggcgccctaaggttccctcaggctgtttggaaatcagccgtagagtgcaaaggcataagggagcttgactgcgagagagacatctcaagcagggaggaaactcgggcttagtgatccggtggtcccgcatggaagggccatcgctcaacggataaaaggtacgccggggataacaggctaatagtctccaagagctcatatcgacgagactgtttggcacctcgatgtcggctcatctcatcctggggctgaagcgggtcccaagggtccggctgttcgccggttaaagaggtacgtgagctgggttcagaacgtcgcgagacagttcggtccctatccacggcaggcgtaggagatttgaggggggtggtccctagtacgaaaggaccaggacgaacgaacctctagtgtgccagttgtcccgccaggggcatcgctgggtagctacgttcggaagtgataaccgctgaaggcatataagcgggaagcacgcctcaagattagatctccctcccgcaagggctgaagggcacaggcagatcacctgtttgataggccgggcgtggaagcgcagaaatgcgttgagcttaccggtactaaccgcccgtgagacttgaccataaagtttattcaggcaaaaaatgtcgcattcataagttcgattgggatttagtaacttaaatcccggcaaccataacagaggggaaacgcccgttcccattccgaacacggaagctaagccctccggtgccgatggtactgccaggggtgcctggtgggagagtaggaagttgccgggtttttatttctcaaaaattaagccacgctgacgcgtggcttttttttttttggcagccatttccgggacggtcgctccccgtcaactgcggttgatgttttccgacttgatttcggcgcccgggcttggcaaaaagccatattttctggggagatccggttttccggctgatcttggcccgaatcttgagtcttttctcccaccatggcgggagtctatcgtcctcggcatccggagcggtcggtgctccacagggtattgtcccatcatttcgagagattcctggctgagtatgaaagccgctttgagcgggaatatggatatttccggccggtggtcaaggaggtcgttgaaaagtatctggactgcgggaatccccgctgcggcttcgcccgaattcgttgtcctgcctgccgggaagaatatctgttaacgttttcctgtaaaacgaggggattctgcccgtcgtgccaggcgaagcgggtcgaaatgtggggcgaatgggtgagggaacggctgctttgggatgtcccgcatcgccaggtcgtcttcacgattcccaagatgctgcggatcttcttcaagttcaagaggcggctgttgggcgatctatcccttgcggcgttgcgggccttgaagctttattttgaggcggcggccggggaacccctgattcccggcgtcatcgcggtcattcagacgttcggggatcgcatcaattttcacccgcatctccattttttagtgacatgcggcggcctggacgcggcgggagttttccacgaaatcgcccggatcgatgacgcccggttgtcggggctctttgcccgggaagttctggcgattcttgtggccaagggattgctgagcccggagtgggctgaacgccttctctcttggaggcattccggattcaatgtgcacagcttggtgcggaccgaaaccaaggccgaagcggaacgtgtggggaagtacatgatccggccggtcgtctccttggaacgactcgagtttatcgagccggagggccgggtgggttaccgtattggcggtaaggacggggagcgggagtcgatggattatctggagttcatcgcccgggtgacgtcccatattccgaataaaggtcaggtcatggtcaggtattacggcctatatgccaatgcgtaccggggaagggcaaagaaaggcggctcgtcgattattcgagtgctgcgagagggaaatcggtcgttttcctcaaaaggctgggccgtcctgattcgtaaggtgtatgaggtcgatccgctgaaatgtcctaagtgcgggggtcggatgacggtcatggccttcttgacgcgggcgtccgtgatagaccggattattgatcatctcaagatatcgtttacggccgagcggccgccgccggcaagcgaacttcaggatcttcctttgatctcaattatcctcatttcgaagggaatgatggggtttcatgacgagacagggaatgtcgttggggcttttgataaaaggaaatttctatccatgaatctgcgggcgatgacgatatggacgaccttatcgatttcggcgataagcttctccgtccagattgccgatctgtctgccatctcgtttccagggaaaaggcccgaccatgataggaaataagacggttctttgcaaataaagaatagaggattaaggaaccaacagagacgaaattagctatcattaagtaattaaagggattagcgggaaagcgtattaatgggctgggcgggtgatttcaataatttgtcgtaataacgggaaaaaatagtcgactttgggctctttatcagtgggaaccggatcgtggggctttatccagccggagagataatcaaggacagcaaacggggaaaatcggaaaggagagttgaaatgcgtcttaaaacctatgtttgtttcgccctggttctttttttgttggcatcatttgcttttccccaagccgaggttaaaggaatcaaaatcgaaatttacgcatcaaaaatggacatctttgatgctgcgagccaagttttaattgaaaaaggctttgccttgcttacgacaaatgaacgagtcggattgatcacgacggattacatcaaggccgaagaatctttcggtacgtctcttttactgtctttattcggtaaaaaggatatcgaaatcatgctctcgacgaatattgtcggagtcgggaataagtgtactttatcgatattccctaaagcgagagtaaaaaaagacagtcgattgaaggtcgaatatcaagagatgacgttatcggataaatccgtgaaaggtttctattccatcggcgacgaaattaaagtgctcgccgagggtggatcggttgcccctcctgcggctgaagtcagtagaccaaccgaaacgatttctcctccgcgtggggaagttgggaacaagcctctgaaaaaatccggtaaagagatcaatgtcaattttatccgtgtgaaagtagcgacggcaaatgttcgtaatgcgccatccatgagtggagcggttatcaataaggcttcggttggaacggaatatcgagtgatcggaattgaaggcgattggtatgaaatcgtgttgaatgaaagccagaccggctatatgagcaatatggtctgcgaactattcgaaaaagcaatcatcgcggaacaatatgaagacatcagggaagcggctgaggaagtcccttcggaaaggatcagggaaaacccggaacggcaggtttatcggcccggacgttcgccttccgaaacagtcggtgaagatgaggaagtcgaaaagaacctgtttttcggcctcggcgcgggtttatcgttcattatgagcgacgtcaacgaattattacccgtcggcttcgggatcgatttcaatgcttattatcgtcttttaagccgcatttatttaacggccggcttaagcagctattatttcccaggaaaagaagattggacgatggcaagaattcaaccgatggtggggatccaatatcgatatcccataagccgaaatatgatcatttttggcggtctgagtattggattggcgatcgatgtcctcgggtggagctatcatgactacagcatctccgatacgtataccggatttgccacggattttgtctttggatttcgcatgaactcgttttatctcaatcccagaattcgcctggtcggtcacgagggtgattctttcagttcgtttgatatcgccttcggattcattttttaaatcggtgaagtcattttcatagctcgcaattgttaaaaatctgtttgaggaaatgattcccaaatatgaagggaaaatcattcacttttagggagatctaatggaccgcaaaattctgtttcccatcggcggcttgatcatcctgatttgtttctttttgccatggattcgggcctgtgaggtggagatcacgggccttcaattgactaccgatgaagatgttggagaacccatcttttggctgattccggcagccggagttcttattattatcgccttcttcttgaaaaggcagcaggcgaaactgctggctgccgtcgcctcgatcggcggcctcttgcttctcctctggaaaatcatcgttcccttcgctaaaggcgaagcgcgcgagatgggcttgagcatccaggcaggagggatcggaacgatcttgggattattagcggctttaattggcgctttgaacggagcttcgtcttcggaagaaaagaacgacccaaaagaaaaccaatagatgataccgagcccatacagataaaagggggagcaggatgaatactatgcctggtttgaaatggtttgaaatcgttctcatattttttcccctccttgccgggatcctcgttttcctgctcaacaaagaatccattaacataattacggagaaggtcgaatcctggtttcgaaaaaagaaggataaaagcgctgaaaaacaaggattattttcacgcttcgtgatccggccttttctaacggtgatcgtgaaattatgcgattggacggattccttgtctcatcgcgggctcaagaatggaatcaggatcgccctttctctatattttcttgctctctggatttaccttttatatgtcgccttcattgtcatcgcggcgatcgccataatgataggggtcctcattatattgttcaaaatcctgacgggaagcgaatcggaacctcccgatgattcattgccccgctatacaaatcgtacggtgcaagaagataaagaaaatattatgtcttcggttggcatccggggaaagaaaatttatcaaggaacaagctggttcaatgaggagatgaaggggagaatcgatgatgatggaatcatctataaaggggcgagttggctcaatgaagaaagaataggacggattgacgagaatggctcaatatataaaggaaccaattttttcaacgaagtgaaaatcgggcatatcgaggagaacggaacagttttcaagggtagcaattggttcaatgaagaaagggcgggccgtatcgttgaagacggaaatatttacaagggatcgtccaaaatgaacgaggcaaaacaaggacgagcaggggattgaagatcgggaaaatatttatcccaagcccttgagagtcaaatcgtagatgaatatttgacaacctattccatccagagcaggacgaacgaacctctagtgtgccagttgtcccgccaggggcatcgctgggtagctacgttcggaagtgataaccgctgaaggcatataagcgggaagcacgcctcaagattagatctccctcccgcaagggctgaagggcacaggcagatcacctgtttgataggccgggcgtggaagcgcagaaatgcgttgagcttaccggtactaaccgcccgtgagacttgaccataaagtttattcaggcaaaaaatgtcgcattcataagttcgattgggatttagtaacttaaatcccggcaaccataacagaggggaaacgcccgttcccattccgaacacggaagctaagccctccggtgccgatggtactgccaggggtgcctggtgggagagtaggaagttgccgggttttttttattttcaccaagaatcggccggacgaaagtccggccttttttttatccgaaaagcatccggcttcccctggcagcgaccatcggccgccgatggccctagctccgaaacgtcgcgtaggactgcgaaacgcttgtactgccaggggtgcctggtgggagagtaggaagttgccgggtttttttattttcaccaagaatcggccggacgaaagtccggccttttttttttaccattttacccgtcaaattttactctcctccagccgcaccccgaagggtccatcggcttccggtgtaccctgaaacgaccagcaccaccatgttgccggcggcgatcgcggccgccttgccggccagcaccgctttcttgtttatcgaggtaaacggtgtaccccagagcctccctcattccaaaccgccgggagccggaaatccggcgcccagcgtcgtttccgcggtccttccggccgctctgcaggagcttgtttcgcgccggcaccgggcgtagaatggccgttcgattggaggcgcgatgaaaacgattaggatcttccacgtcttgagccatgctcgctgggtcttctttgtctggtcggtctacctgatgatccaggtgttccgcgatcccaaccgctacgccctggccaataccggcctggccgtcttcctcatggggcttttcctgggattcctgggcttcagcgacatccagcggctctcccggcgggagcgtaaggagttcgccaacccgaagggcatgagaatcacgatcgcgctgctcctgtcggcggcggggttcaccttcttcatgggcgtgtatctcatgaacgtcgacctgctgcgcccggggctgaaggaaaccgttttggtggagatgaagaccgtcggctatcactgcttcgccctgggtttcgggttcctctgctacctgaagctcatcagcgacaaatatatgcattacctgtcgtcatccggcagggagaaggacgccggccgcggcagctgagccgatccccggccggttccggtcagcgcctcaggcgcagtagcttctccgccttggaaaagacgcagccgcagtagttcctggcggcggatccccgcctcggcgtcggtgttcaacaccacgtcgttctccaccaggccggcgcgcgtccccctgtcgatcagcccggcgtaagggaagtcgacgttgacggagatcaccgcgcccggcacgcaaccatgacagagaggaaacgcccgttcccgttccgaacacggaagctaagccctccggtgccgatggctccgatttgccctagctcggcggcctcgcgtaggaccgcaaagcccgcaaggctcatgtagggcgacgaggcgtcgctgccaggggtgcctttggataggcgtttaagtacggccgggacaggtcgaagccctgtccgggaatggctatgcggcccctaaaagcgcggcctttttgcttgggttaaaacccgccgattatcccaaggaggcatttcaagctttttcctctttctccgcccggtcgaggttttcgaatatgcggcgaagataagattcgaagcgctcgatttcctcgtctccaaatccgcgatagtataaatcggtcatctcccgggagacggccgtataggcgcgctccagggcgaggtctttatccgtccgctcgatcaaaatctgacgccggtcccgaagagaaggccggcgacggacgaagccggcctcttcgagtcgatcgagcatgctggtcagggtggatttctcgagggacgttcgttccttgagcgtttgaatcgggatgccgtcctgctgccagagggcgaacaggatccggccctgggcgggattgatttcgatgccggcgccgcgcagccggccggcaaagacgcggccggagacttgatggatcctggccatcaggaaaccgccctgacgcagcttgttcaacgtttcccgctcaagtcgaaaaagtaattcacgctgccgttccaaccccggccgtaacgagaatcaaagcgaagaaccgtatagtcgggatcctcgggtccggccgggtaataggtttcccaacctggacgccagagctcccggcgaaggaccggatcttcatcaaccgtcaaatcgccggcgagcatcaggctgaagaaaatctccggccggcagaaaaacagcgacgcctgcggccgggagcggacgtcacggattttcgaggaggacgtattggtgtccaggtaataccggaacgtcccatcgaaggggcgcaggtactcctgaagctcggaatagcgcggaccgcgcaggttgaacatgacccgggcctgggggaagccgtcggcgccgatcgttgtcaggacgacgtcagggcaggaggcgatcagatccaggcaggctttttttatcttgtgttcgctcatcattttccgggggtcacttgattcggggtttggtgatcgaaaagtgggaatggacgagtccccatcggccgtcacggcgaacgtagacctccgtgacattcatgcggaaggcgttgatacccttttcatcgtaatcgaccatgttgtaggagaggacggccgcctcgccgtaaacctggacttttggatcgatgatttcataacgcggaacccgaaacgtgcccttgagcggggcgagaaacctttcaaacgcttcgcgtccgttcaggcgtttttccaagctcgggtcgaaataagtgatttccggggcggccaattcgatgaaactgtacgtatcgccggttccccatcggtcgagcatggctttttccagggcgatgatttcggccgtcggatcgtcggccggattcgccgtttgagccgctccgatcatcgcgaaagccggaaggatcgtcagaagcagcagggcggtcaacatgaacaggctcctttctaggttctatgtcgaataatactatatagtactaataaaccgcgttgtcaaggtctgaaccgggccgaatcgcgctgtaaaggcaaagtgaacacggccggtttagccaagaggcttcaatccttctgagatgggctttatgttgaagaccgggcgatggcagcgccggggatgatcgggcggagggatgaaccggcgttagcggcctgggcgttgtacgacggcggaccttcctcccggacccaaacgctcctccccatcctgcaatcacgcgactggaatcgctcaccgcccgccgtccggcggttccgctcgagtcggcgcaggcggatcaccggcttgatagaccggatgtggaagcgcggaaatgtgttgagcttaccggtgctaaccgcccgatcctattcctcgctcttaagggtcgcggaggacgtccaagggttgttgccagggcaagcacgtgtttaactggtaaagaggccggcttctataacttattcttttccaatttttcccggaacatcctgaacttctcccgcgcgccttcctttttcgaccatttttcgacagcctccaggtcgatcgggttgctcccggcgaccatcaaggcttgcttcaacgcctgcaggtcgttccagaaataatatgccgccaagcggtcgcggaccgagtcggtcgggatcagcagcctgagcgccattttctttacggtgatggtgttcgtctcagagatcttgttttcgccgatcgaaaggggtggatttaaaatgtcgacggaataccggaccttgctgttgacatagatccttccttcgggcaggaagccgatatcagccaaggcggcgtcaatcacgttcaccgaagcgccggaaacattgacgaagtccaggtccgtggacttataacgattgcgggtatagatcgtcacgcaggcgcctccggtcagcaccgcgtcgactccacggccgcgcaggtgctggcaaatgaacgccgccagttcccggtgggaaaaacgggaaaggtctctcacagcggttttcctggcaagcgcggccggcggcggcgaacaaaggatttgtccttctcggcatcggaaaggaaatcaaaggctttttgcagcaatgcctgcaattccttgcggaagggatatcgcgggtcgagcccgtacagacgcaccctgccccgcaatcggctgtagagaacgccggcttcctccagctttttcagctggtactggacggcattcaggttaaaggaaaaattgcgcgcgatctcgttgggataagagccctcattgaccagcagatagaggagaagcttctccttcacgggcgattccagcagcgcttccagcaatttagatcaccaatctaattggttatacaaccaatatagtttaatgataaggcccccgtttcatgaatgtcaaggaaaagaagcggacagtagagagaaggagcggcgccgccccggctccctggggtcgcgcaggacggcgaagtatcgccgccaggggcgccggtctttcccgggattcagttggttttcgtccgaacggggaccggcacgttgcagagctcgacgcggccgggcttgaacagaaaccacggctcgttgcggctgcggcgcgactcgaccagcttgcggaaggtatcggtgtcggtgcgcaggatctccagattcgttcgctcggccggcggcatgtcggccgcgacgcggagggagcggagcggaatgaattgttcgggtttttcgatgaagcccatctccccagaggcgcgcggcagcgaggagagaagctccatccctaggacgacgcggccgaacagggtgcaatttcggtccaggtggcgaggggcgtggccgatcacaacgtagtcctcggcgcctccgccgctgtcggcggcgtcgccgcggccggctccgaccatgccgtagcagtggacgagccacaggcggccgctctgcgcgtcccgggcggcggggaagccgttcacgaatccgacttccggcgcatagacgtccccgtcgggaagcggggcaaaggaaatcccgtcgctccaggggcggtcgaactcggcgggcagggtcgcccgagcgcgcaggatcttgcgtgccttctccggattatcggcgttggggtcgccccactgcaccacgtagttgtcctggacgcggacgatcgacaaaccgtcgaagtacttttcccgggccagggctttgacgttggccgcgtgctccggggcgaagagcggggccagctcgatgaccacccttccgccgtccagctcgagataaagggcgttctccggatcgagcggccgccagtcctcggccttcgccgcggccagcacctcggccgtggtcggcgccttttgcatctcctccgcccaaaccggggaagaagcggcaagcaggcacatcgctccgaaacagagtaaaatcctattcccattgcaagatttcatcacgcgctccttatcattttcctcgtattatacatcgtccgcgggtgcgaccgcggccttattcaaccgtcagtcccggggaacgcttgaaccggccgcctggattgccgcgaggtcgaagggggcccgacacatgtcctgacggtccccctccatcgggaacttgcccccggaacggtccaagccatctaccgtccaaccgcccggctcgtccccgaacaggatcttcatcctcatttcaatggaaccgattgatggctccggtcttgacggccgcggccggcatctcgaagtcgccgggggccggagcgtccgaacggcgggggccgggatcacggccccattcgcgtcccagggattccacgggggcggcctgggcgcggcgggcggtttccatgagattccgtggataaacgatttacgatgggcagagctatcggcccgggtggctttgacgatgcttatggtcaaaggactgccgagccctggccgtggccgagcgcctcctctcttggcggcctttataagaatacggagttacgataagattctgagacgacgcgggccgtcctcaatcagccttgacaggccgcgggagtaaaaatatcctcagccccgaggataagaaacgaattcctatcatgatggggccggccagcgcggccgggagaaagctgaaatcgcgcgggaggagaaaaacatgaagagaagaatcgccgttttcgtcgccgtctttctcattgtcttggggtttgtttacgggcagaaaaagccgtacagcctcggacagcgtcccgggcagaacgtttcggacgatccccgacgcatccccatgcccgaaccggacctgtccaaggccgcggtccaggttcttcggggagcgactctcattgacgggaccggcgcaaatccgatcagcaacgccgtcatcgtcatccgggggaaccgcatccaggaggtcggccgactcggacaagtgaccatcccggagggagcggccctcattcccgcggaaggcaagtacatcctgccgggaatgatcgacctccacacccacatcacctacccgacgaatgtgctagagtttttcacggacacagacatcacggcgacgctgagggccgtcgataagatcaagtattactccaatcatggaatcaccagcctgcgggacgtcggttcccgcgacgacgtcccttttcggcttaaggaggcggtgcggtccggcctcgtaaccgggccgcggatattccccgccggcaagctgatcacgggcacggggggacatggagccgaaggcggctacctgatcgtcaacggcatcgtcagggaagccaatggcgccgatgatttcagaaaggcggttcgagagcaaatcaaggccggcgcggattgcatcaagctggccagccactatacgcttgaggaggcggccgcggccatcgatgaggcccatcagatgggccttcgggtgaccgcggattcccataccttctacatcacctgggcggtccaggccggcatcgacggcatcgaccatccgctcccgcgcgacgaggagaccatccgcctgatggccgagaaggggacctgcgcggttccgacgatcgtggcttactatcatatttttcaggaacgcgggggatactggggcacccagtcgaggcgcttttattttgaccatgcggcaaacatggaattgctgcgtcgcttgaaaaaagcggggatcaagacgggcatcggcaccgacgtcatcatggactatacgacgcaactgccgaaatattatctcatggagctgcgtttctttctggaggccggttacaccccgatggagacgatcatcgcggccacgcgcacgggggccgaaatcctcgggatggccgacaagcttgggaccatcgagaagggcaaattggcggacctgatcgtggtcgaagaaaatccgctcgaaaaaatcgacgcggttgtgcagccctcgctggtcatggtggacggcaaaatcgtcaataaacacggtgaagattaggggcggcatcacctcttgtctgaagtgccggaaaccgcgagaacgacccttccgtccaaggaagggcgaacacaagagcccccggagggggaaggaactttcctcccgcgtttttcgtctacgagagagggtttcaaataaggagtctgtatgagaaccagagcccgttccctcatcgtcctgatactggcgaccgccctcgctccggcggccgcccgcccttgcacgacgttttgcctgaagaccaaggacggcggcgttttttacggccggaacttcgattttccgacgggcttcgggcagatccaggtcaacccccgaggcctgaaaaagacgtccctggccaatcccccggagaagccgttgacttgggtttccaagtacggaagcatttccttcaaccagaacggacgggagtttccctatggcgggatgaacgaggccgggctggtcatcgagcagatgtggaacaacaacgggacctaccccgagtcggacagccgctccgggctgggggagctgcaatggatccagtatcagctggacatgtccgcatcagtcgcggatgtgctggccagcgatcgcctcgtccggatatcaaacacatccctggccccgctccatttcctcatcgccgacgcctggggcgatgcggccacgctggaatacgtgggcggcaagacagtcgttcacgccgggaaggacctgccttatcccgtcctggccaacaacagttatgacgtgtccctggacttcacgtcgcatggggagaccggggatccaaaggcctttgacgatgccacccgggaatcctccggccggtttgcacgggccgcggcgatggtcgaggcggacaagggcggaagcgaaggagcgatcgaccggaccttcgcgatcctggccgcggtgacgggaacgaatacccaatggagcatcgtttacgacctggggaaaaggacgatcatctataagacccgcaataacaagaacctccgccgggtggagatggaccgcttcgacttttcctgttcgcggaattggctctgcgtcgacatcgaggacagtgtccggagctcggccgatttcaagctctacaccgatgaaggcaacgcgaagctgatcgacaatgtctgggaaagcgtggaattcttgaaaggggtccccatggaggtccgagcggcgttcgtcgggtatccggcgaccgtccgctgcgccgaggactgagccggccctccgcccggccttgagatcccttgatcggtcttgaaggcccgaatgagcgcggcgatatcatattattccatccggagaaaggcgttggccacgtgccccgctttgcgcaggtcgaggttccggagcatatcctctagagcccggatcgacttggctggacagtccgaacccgcttgacaatccggaatcgcggcctattaatatcattaaacgaggaaggggaatgcaaaggctcttcggagcgctcctggccttggtctttgcgtcgccggcccttcccggccggcaaagcccggcgccggcggggaatccgcaggcggaaagcgccgcgccgtatgtactcccccggatccagggcaaggtgacgctcgacgggctgagctccgagccggcctggaaaggcatccgggcgctccccgtcctggtccacacgccgaacacgggggcggagccctccgagctcacagagatcctcgtggcctatgacgacgaatttctctatgtcgccgggcggctttatgaccgcgagccggaaaagatccaggcgacatccaaaaaacgcgacgacatgaagctcagcaacgactggctgggaatcgtcctggatacgttccacgaccgggaaaacggcctcgcctttttcacgacccccgccggcctccggctggacatgacgatcttccatgacgccgacggggacttccccgtgaatcagaactggaacacgttttgggatgtgaaaaccgtccgcaaccaggaggggtggttcgtcgaaatgcggatcccgttatccagcctccggttccaggaagtcgaagggcgggtcgtcatggggctcaccgcctggcgatatatcgcccgcaaaaacgaagtgatcacctttcccgccatcccgccgaaatggggcttctggggaagctttaaaccctcccagacgcgcgagatcgtccttgaaggagtgtccagccgcaagcccctttatgccgctccctacctcctcggaggcgccggccggaccgaggcgctcaacgaggcggaaacggcctacgtcggcacgaccaagctcgtccgcgaagccggactcgacgtcaagcttgggctgacgaacaacctgaccttggatctcaccgtgaatacggatttcgcccaggtcgaagcggacgaccagcaggtgaacctgacgcgcttttccctgttcttcccggagaaaaggctcttcttccaggagagggcgagcgtcttcgacttcaattacggcgacgaaagcagccttttctacagccggcgcatcggcctccacgaagggaagctcgtccgcatctacgggggggcccgcttgatcggccggatcggtccgtgggacctcggccttctcgacatgcagaccgccgccgtcgaggatctgccctcgcaaaacttcggcgtcctgcgcgtccggcggcaggtcttcaatccgaattcctgggtgggggcgatggccacctgccggatcggcgtggacgggacgttcaacacggcttacggcttggacggcatcgtcaagctcttcggcgacgattacctgtcgtggaattgggctcagaccttcgccgcggggaagagaaaccgcctcctttcgctcgacccggccaaggtccgggtcaactggcagcgccggaccgtcgagggcctggcttataacctggatttttcccgggcgggcgccgggtatgagcccggcctgggattcgaattccggagcgactacagccgtttcggcgaccgtctcctctacggctggctcccgggcgaaaagtcctggctcctgcgtcacagcgtcttcctcgacggattcctctacctgcggaataaagacggggccgtcgagtcctccgaggtcgggccgggataccagttcaccgcaaaatccgacttttatgtcatggtccggccggccttcttcttcgagaacgtttcggaggccttttccctgtccgacgaggccgagatcccggccggccgataccgcttttttacgacgaagctggccttcaacacgccgaccgcggcgagcttttacttggaaggctcgctggaggccggctcgttttacgacgggaatctcgtctcggcgggaatttcgccgcgctgggacgtttcgagcggcctggaagtcggcggcttctacggattcaaccgggcggcgttccccgaaagaaaccagaagttcatcgcccatatcggacggctgagccttctggttatgctgagcacccgcttttcagccgccgctttcatccagtacagaagcgaagccgacacgctgacgtcgaacatccgcatccgatacaacccccgggaagggaacgatttctatctcgtctataacgacggattaaacaccgaccgcttgagggaaaggccgccgctgccccggtccgtgggccgcacccttctcctgaaatatacctacaccttcaacttccggtaggatcgccgtgacctacgaagaaaacccgtccggcgagggccaggcttaggcgtctatcggcccggcagatccttcggatcctccgggagttcggtttttcggccgtttcgatccggggcagccacgccaagttgaagcgcgaggccgaagggagcccgacacatgtcctgacggtccccctccatcgggaacttgcccccggaacggtccaagccatttaccgtccaaccgcccggttcgtccccgaacaggatcttcatcctcatttctatggaaccgattgacggctccggtcttgacggccgcggccggcatctcgaagtcgccgggcgccggagcgtccgaacggcgggggccgggatcacggccccattcgcgtcccagggattccgcgggggcggcctgggcgcggcgggcggtttccatgagattctgtggaaagacgacttgcgattggcagtattcttggcccgggaggtcccggcgacctggttcgtcccgccgcgcgacccataatcatcgcggcaggcttcgatctggtaggtttcgcccagggccgggtcggtaaggccggcgccccccggcgcggttcctcatttcacgagcgccttggcttctcccgatcgatcctttcccctcacgagtcagaggagaggagggaatgaacgacggactgaagccggagacggcggaatcccggggaaaggggcgaggccgcggaagaggaggcggtcctcaggcggaccgggccagaacgccggaccggagaaattccaggatgaacgctttttccttggccgggtcctgctcgccgtggaggatgaggtttgaaaccatgccctccaggatgtcgaacaaggtcgaggcgaccatggccgagccgtagcgcttggcgatgtccggccggaggatcccctggaggcattgggccagcatctcctccatttttttgcggctttcgacgtgccaggacatgtgttcttcgatgttctcgtggacgaccagatgctgttcgcggaagtacattttcaaaaagtcctttttagaggtcatcaagagaaagtaaccgaggatgatctcttccaggacctgggccttgtcccggttccgtccgaggatgagcttgaacatctcattgaggctccggtagagccgctcatacaggctggtgaacatctcgtacttgttcttaaagtatttgtaaagcgtcggcttggacaatccgcactcccgggcgaccatgtccatggaggtcttgccgtatccgtgggtgacgaaaagatgctcgctgtgttcgaggatgaactggcggatggcgtcctcgcggccgcccggcggatagggattgcgggccttcttcgccgccgtcgttccggttttcgtccgcgccctggttttcatcggcaagcctccctcaaaaatatacccggaaagaaaggaaaacgaaatccgggtagcttccgaattccgaatcaaggaccggcccggtcccggttgcatcgaacggggaccttaacggcggacggccgactcccacgaatgctccggctccgaggtagatattttcggcgatattgtattccgcctggggcgaaagcgccagcgagccgtcggtcgcattccagaggaggagcccggaaacggggatcagcggcgtcgcttgccaggtcaagcccgcggcaaggtaatgacggcccatcagatacgcggctcccctcgtataagccggccgggaaaagagggcggtgtaatccccgggctccgaggacccggccgaattgtaatgatactcgaagaaggcataagcacggtcgctcaggctgcggtcgataccgaccgtaaggcgggcatagcttgaagccttgggcttttttccgttcaaggcgtccggaaagacgcaagccccctcgagccaaacgccggccccgcccaaggagcgggccaggtcgaggcccaggagcaggtcttcgcgaaatccgagaaggaggagggccgcgtcggtctccagaacattgaccttgccccgaaggaaaaaggcgctccgcttgaactccaagtcccggccgaaaacggcccccgcgtcgagctcgctcaaggcgcccaggggaatcctcaggcggacggcgtccacgccgaaacgctcctccttgtccaattcctggaaggagaatggagcgatgagatcggttggattcgtgatccggccgcttccccaggccaccggctggcggccgaggatgagatccccgaacgtcatcttgaccgacagcgacaggcggtcgaggttgtgatagaagccgaagcttccggccggctttcccggcgccgggacgaggcgcgagcggaaatcggccgcccggtaatcgcccgcttccggggacggaataaacggcgaggcccgaaaaaaaagcgtatcctggatccggggcgaaaggtcgtaagccgcttggaacgagacatccggcgacaggtccccggcgaggaacacccggaggcgaaattgggagatccccgggagcggcaggtccgaagcggccgtcttcgattcgggcaggcggaagacgaccgaatgatttttcaggtagccgccgagcttgagctctccttccgccgccgggggaagggccgccatggccagggcggcggccagcgctccggccccgattgatgcccgcggtcttctcatcgcggcctcaattccgggtttcatcgctcgcgacgatcccgtcgcgaatgacgatcacccgcttggctttatcgacgatcatccggtcgtgagtcgagaagatgaaggtcatcccatgctccgcattgagatggcgcatcatgtccagaagatccgcgccggttttcgagtccaggttggccgtgggctcgtcggccaggatcatcaagggatgagagaccatggcccgggcgatggccacgcgctgctgctggccgcccgacagccggttgggatagcgatgggcatagtcctcgaggtccacgtcgcgcaggatgtcgtggacgcgccggtggcgttcttccttgggcacgccctgaagaagcatgatgtactcgatgttctcctcgaccttgaggacggggatgaggttgtaggcctggaagatgaatccgatgtgatcgcggcggaaatcggacagctccgccccgctcatgtccgagacgagccggccgtccagccagaccttgcccgacgtgggtttgtccaggccggagatgatgttgagcagggttgtcttgcccgagcccgacggcccgacgatggccgtgaattccccggcatgaatggtcagatcgacgccccgcagagccgggacctggaccccgttgtccgaatacgtttttataagtccctccgtttcgatgaggtgccggtgttggggattcatggttgttctccttcacatcgttcttttcatggcccgggtgacggacatccgggcggcgaagccggccgggtataatcccaccagcagggtgaacagaagcacgccggccgggaaaatgacgtactgtttgagatggaagaccggatagatgagctccttgatggtcaccccggcgaattcgatgttctgataattcactccggtcagggaaacgatcagggtgacaaggaatcccagcccgacgccgagagcgatgctcaacagggccagcgatcccgcttccaggatcacaagccggcggattcctccgggcctcgttccgaccgcccgcaggacgccgaactcgaacatccgctcgtagatcgacatgaacatggtattgacgatgccgagggcgaccacggtgaagagcagcaagccgaggatcaggctggccgccgtcgtcatctgataaacggatttcagggccgggaaaagccggggccatcccagggcttcgttccccccggtcgaatagtccgtccagaaaggatgggtctcgtcctgggagacgcgaggatccttgaacgacaaagcgatttcattcacccggccggccaggccgagcatgtcctgggctttttcgatccggacgaaggccaacccgtcgtccagatcgtcggtgttgaaacgatagatgcccgagacgcgaaacaggtcctgggagagctccccgcttcccgcccgggagacggtcaccacgacccggtcgcccacgccgacttcgaggagatcggccagtttgcggccgatgacgatgttctgcgggtcattcccgccgaagtaatcgccggcctcgatgacgtcgtccatctggctgagagcccgctcggtgtccgggcggaccccgacgaggaggacgggattgacgttggccgcggaggtgaccattccctggctcagcgtccgcggggtgaacgccttgaccagcgtatcgttcctcaagtcggccaggagccgctcgctcccggccacggtcaggttcgcgtcccgggcgagcaggaaatcccgtccgtggatctgcgcctcgccggtgaaggaagccgtggccgcggcgatcatattatcggccatgccgatataaagcgcgtccaggaacatcaaggcggccaggccgacggcgacggcgattccggtgatgtaggtccggcgcttgttgcggaagatattgcgccaggcaagtcgcgaatagaggctcatgatggtcctcctagaagatgcggatcgagcgggccggctcggtccgggcggcccgaacggccggccacagactgacgaaaagcgcggagaaaagaacggtcagggcagggatcgccaacgtccgagcattgacctccgtggtgaaggatctcatctccattcccccgaaggtgacccccttggagaaaatcacaatctcgtgttgagcgacggcggaattgattaaaaacccggccccggcccccaagacgacgctcgccgcggccagaagcaggacttcgcaaaggatcagccggaagacctgccggggccgcgtccccagggccttcagcacgccgtattccctccgccgctccaggaccgacatcagagtcgtgttcagaacgccgaacgagacgacgataaacaagatcaggagcatcatttcatggccgcggctgtcggcttgcatggcgttgtaaaagcttttggcgaactcctgccaaggttggacgtcgaccggaaaggcggccagggattcgcggagggaggcgttcaggttcgttgcttttttcagggaacgggaaacgacgacgatctcgtggaccgcttcctcgagaacgaacaagctccgggcgtcctcgagatgaaggtaggcggaagtccggtcggtcgccatgtcgccggtgtcggccaggccgatgagccggtagacgtcgttggccagggatccgtcagcggcttgagaaaccagaacgacctcgtctccaatcgcggctttcagcgcctgggccaaacccgggccgagaatgatttccttcgagggatccggagaaaagctccggccccgggtgatctttctctcaaagcgggtggccgcgttctcccggaccggatcgatgcccaggatccgggccgtatccgtccgttctccgaccgaggccagggccgcggcgataatccgaggggcccacgcctccgcgtcccgcgaccggtcgatttcaacgccgatctcgcggccgttccggatgactttttggagggtcgggcgttccaggtagccgcgggcgtgaatctggatgtgtcccatgcggcttctggtgaactcgtcgacgatccggttgtacgttccgtcgatgactcccagggccagggaagccaggacaaagccgccgaacatcgtcagggtggtcaagagggaacgccgcttctggcggaaaatattgcggaaagccatttttatcatgggatatcctctacttgccggattgcagcgcccgcagggaaaagagatcgtccttcaaggacagatcgaattgaatctcccggtagcgcaggacggttttgcagcccgttttcgtccggggaaccatttccatgacagcgggaacggtccgccggccgaaggttcgcacctcgctgtagctcatgatccgagccacttggcccttttcgtcatagaatttctgccagaccgggagcgtatcggcttcagcgacggcgatgacgatcttgtcccagacgacggccactcccggcttgggccggcattccaggtagagaattcccttttcggcctccggcggagtcaccattcggaacgtgaaatcatcaacgaacgtgaattccttgaccagatcatcgttcgtgaagtccgagcccatccaggagctcatcatcatggatggcggaatcttgatgaccttgtcggtcttcggcaggtagttccacatttcgttgcccaggcggagagtcccgatcccggcttccttcttgggctccaggatgcggatcagcgttttcgactgtccttgggtccatcccttcaaggccagcgtcctccgccaatcgggggtgacgatttccatttcgatgcgggcatagctcgaatcgctccggtaaaggtcgtcgatcttgcgggccagctcccgcactttcgggtcctccgactggcccggggcgaacgccgccccgagaaaaaccgcgatgaaaaccgcgaatggaaagagtttcttgctcatcatctcctcccgttcaaatgacaaatactaagagtataataatattactaataatcaataatattaacgccgagtaaaatctaaggcttcgcgctccggatgtcaagagttttatttcgtctgtaaagacaaagtgaatacgccggttttctgcaacgtcaaaaggcccggtttagtcaaggggccaatcctttttagatgggccttttggcgaggacagggcccggagaggacggccaagggccgtaaaggagggcaaagctcatggaggagggcgtccgctgccgcgagaggggcttcctggcaaacggccttttcttttcttgacaactcctcaaacgctcaattatcctcattcccgatggcaggatgggatttcaagacaagacggggcttttcggcgatgatccgcggagaaaagaaaatcctatccctcggccccgccgccggaccgcctgcgaccctcgagatcccggccgccaatccccgccggccgccaggcaacggcttcatttcaaaaagggaaaatagatgcgaggttatttactgagaaatcgtgtcccggccgccgccgttgcggcgcttctcgctttggccctccccgcccgcgcccaggttctcccgttcgaggtcttgggcttgaaggaggggattccccagtcgcaggtttctgccctggctcaggaccgcgagggttatctgtgggtggggacctggggcgggctggcccgcttcaacggagctgagttcaaaagcttcttccgcgaggacggcctgccgagcacccggatccaggagctgctggtcgcgtccgacgggaccctgtggatcgccacagtggccggcgtctcgcgaatcgccggccgtcgcctcgaaatcctccccgatcaggccgtgagcatggttcgctgccgggccttggccgaggacgcccgaaagcgtatctgggtcggaaccgacgacggcccggcggtcttcgacggggaaacctggttcctcttccatcccggaagcggggagaagggacccgtggtctatgacatcctttccgaccgcgaaggcgttctggtcgcggccgccaacggcttgtggcgcttttccggcgacgcgccgcccgatgcggtcgtttctccggccgggctcgaaccggcggacttccgggccttggcggtcaccgccgaggggctgtggttgggcacggccggggccggcgtctggctgcgggacggggcggactggcgcaagataaccggttcccccgttccacgggccgtatacagcctgaccgtccagccgtcaggaacgctgtacgcggccacggtcgacgacggcgtgtttctcaagcgccccggcgcgtccgtcttcgaacactggggggtcgaaaacggccttccctcgaacctcgtcagcgtggtccttgaggaccgggagaaaagcgtctgggtgggcacggacatcggcggcctggcccgcctgagcaacctggccgtgatcaaccacaccggcaaccagggattgccgagcgcttgtgttttcggcatcactccgggagaggattccgactcgctctggctggggacgatgcgcggagcggcccactacctggtccggccgcatccccgggttctcgaaacgattcgggcggccgacggtctggacaacgagtgggtctggaaggcgctccggaccgccgatggaaccctttggattctgaccgacaccgccctccatttccgccggcccggggaaaaggccgtccatcccctgcctccccatgtctccttcccgcggacgaatccctacgacatcgttctcgacggagcggggaatctctgggggtgcggcgagtggagcggcggcggcctggcccgccgcgatgccggcggaacgtggcgcatttggaatacgaccgtgacgggggaacctctgacagccgtccatcacttggcccggagccggcggggcggcgtctgggccgtggccaagagccggttcttttattgcgacggcgaaaccgtcgccccgctcgaaacccgttgtcccctggagaccggggtcaacatctcctccatcctcgaggacagcgccggccgcctctgggccggcaacgacgccggcctggccgtgctcgaggccggcggccggtggcgcctgttcaacgcgaaggatcatcccggctttgccaatcatcacgtgttctcgatcggcgaggactggaaggggacgatttgggtcaacacggcccgcggcgttttccgcttcctgtccgagtaccgggtggaggccttcacgcccgacgatggcctggccgactgggaaaccaacgcccagggctttttcaacgattcacgcggagacatctggatcggaaccgtcaacggtttgtcccagtacaatccgaccggccgcatccccaatacagaaccgcccgggcttgcgatcgaaagcgtccgcctgcccggccggacggtggaatacccggccgggctcgacctggcctggaacgagcggacgatcgtctgcaacgtcgccgtcctctccttccgaggccgcagccgggccgcctaccgcgcccgcctggagggattggagggcgactggctgcccttgagccggcgggaggagctccgttacaccaacctcccggccggcgatttgaagctccttctccagccggtcaacgagtcgggcgtctggggcgaggtcgttaccctgcccatccgcgtccggccgccgttctggatgaccggggcgttccgcgcgggcgcggttgtcttcctcctggccgcggccttcgccgcctaccgctggcggaccctcctgcttctgcgccgcaaccgcgagctccaacgtgaggtcggcaagcggacggccgagctggaatacctggccgcgtatgacccgctgaccgccctttacaaccgccgggccgtcctggccttcctcgagcgggaattgaagccggagcgcggcgggaaccgccgcctgggctgcatcatggtggacctcaaccgcttcaagcaggtcaacgacaccctgggtcatgccgccggagatcaagtcctcaaggacatggccgggaaaatcaaggagtgcctgcgtcccggcgacgccctgggccgcttgggcggggacgagttcctggtcgttctgcccggggccgacggggcggccctgaaatcggttgagggccgcatcagcggcttggcctgtcaggcgggcgagggaagcgcggccgtgaccgtcaccgccgcctgcggctcggtggaggttcctccggcgacgaacgccgccgtggccgcggtcctggccgcggccgacgacttgcttttccaggtcaagcggtcgcgccgctgagggaggtttgcggatgcatcagacgacagaccgaagggcgatcgccgtctgggaagcggccgaggcggtcttcatcatcttggccggctcggccctccatttcgtgttcgtctggagcgggaagcaacgtccgatcgcttggctggccgcggtcaacgagagcacgtgggagcatttcaagctggccttctggccggccctgctcttcgccctggtcgagcttccgtttctgaaaaagcggaccgggaatttctggaccgcgaaggccgccggcctctgggccatgccggtcgtcatcggcgccgtcttctacgcgtaccgggcggtcctggggaggcatttcctttgggccgacatcctcttgtttgtcgtcgccgtctgcgccggacaggcggcgagcgttcggatcctgaccgctcctccccagccccggacgcggcggcggctggcttatttcgccttggttcttcttttcctcgccttcgccctgttcacttattttcccccgaagatcttccttttcgccgatccgcgaaacgggggatacggaatcctctgacgcttgtgcggaattcgacccggcggatttcaaaatcgcccggcaaggcaggccgtttcccggcggccggcgcaatgatccgcccgcgggagaaaacccctcgtattcaacgaggccgtgtcctttcccccgatgaatctcgtcttcctctctagacggaatataaaacgaggataaagctgaccgtggaaaccaagttgcataaacaatgaaatacgatggcgatggagatgttgttttctttccaggccatgtacgcggccggtaaaaacgcgctgatccggaaaaggttttgaaaaggcagccacagatgatacagggaaaacaggacggtcatgatgatcggcgcgcgtcttccaaatcggctgatttttgaagtgaggtatcctctaaaaaaaagctcttccacaaccgggccgacaaacacgttgaaaacgccgtacccaatgcaggtccacaacaccatattcttgggatactgtctcaagagctcgaaattcgtccagtcaaaatacgcgggcaagacggcccctaattttccggatatcggcgacgtcagaaggctttccaagggcttcacgacaatcgacagaattcccgccaagccaaagagcatgactccgatcagaagggtccgcgccgctttcggctttttctgattcacaagggcgctcttcaatgaataacggccgaactcctttttcccggcgaagaggatgatcgccagttcagcagggaaaaggatgatcgccgctaaaagaaagaacaataagagcgaaggaatgatcttctgcagatgaccgatggcccaataggcggccgtcaagacggttgcggggacaaagatcaaaatcatcactttcgacaaggaaagatcgcggcttttcattgaatcgatcgttatcggcttttcgacatgcattgtccgagatttctcctttaaagaacgggctttgcgggcgattgacgatccgcaagatcgaagaatgcggagcaaccccatggaaagagacgatcatcgttcggcggatctgttgattcacgggaccggcgggcggatagatcgaaagagacgcggtctcctcggatttcgccggagatccgagggaagccatatcccggtcttctctttgacttgcttccgcgcgcaccaagccggcctttcagatacccgttcaggctttctcgagctcggaacgatgagaacgaaatccgttgaataaatagactcccagaacagcgttgaatccggtcgcggcgaacaggctgagacgctcaaagagggcgaaatacccgcgcggggccacactcgttcccaccgcgcccgcgcccatcgcggcaagagcgatggacgcccaaatcgccagggatcgataaccattcctccgataccctccgaccatgatcaaaatcagcgaaacgagggaaaggatcacaaccagcgtcgtgaccacgtacacgtgcatcatatcctggaatgatcccgcatatccgctggtggaaagcggaaacaggggatagccgaccgcggaaacccaattcatcgcggcaaaagcataaattccgattcgcagcgttttattcaattttccctggatgaaaacacacgccatcatgatggaaaccagtccgcccacgccgtaaaggcagctcaattgattccacagatcttttgagggggcgttggccgcgctcaaatcgctgaccgcctgcctcatccagtcatacccgggataggccgatggagcccagacaaccgcggcggcgtaggaaagcaggctgacgacgcccaataaacccagtccgttgatgaacggccttttcattttttgtttatgccgtttttatgcttttctatccctcgatgcggcttctcctccgcgggacacggcaggctcctcgagatttccgccttggattcttttcattgcccttcgcgtctccaagcccccgcggttatcacgagcgttttccgggcgtggaaacaccgggatgactttatcatagaatcgcccccccctggaaacaacctgttttcccatgagcgtctttctgcgggcgccgtccgccgctttggccgggttgagacggaccgccggcccggaggcgctgaagtttcgattcctctctccaggccctccatgatccggggcggatcggatttgaatctgttctttatggtggattagagaaaacgggcgatgggatggtcggccggtcattcaaccccttgaatgatccgctccggttttgacatccccgccggcctcgcgtataaaactcgttgaagcaatcgttttgaagaaaggatagcgcggcatgagcatcactcggagggatttcgttcgtttggcggggatgggggcgacggcggcggctgccggccttgcgacggcgtccgcgaatacgggacagcccgagccgcaggccgcttccgggggattgagccccgaggagcggggcatccacccgatcctggaaaaggatcacccgtatattttcatcgactcctgcatgcagatatggcccgacgcgcccttcgccgacgcccatcgctacggagccacggtttacggcgtcaccgcctgggatccgcacctggacgtggaccaggccctggaagggctgatgttttggcgcgccgcggcccgcaagcatccgaacctggccgtcgtcaccacagccgccgagatccctgatctaaaaaaagccggccggtccgggctgctcttggcttcccaatgcggggattttatgggcgacaagctccataggctcgaggccttttaccgcttgggcctgcggatgctgattttcgcttacagccagagcaatcgcctctgcggcggctgcctcgaccaggccgacgggggattgacctcgctgggcgagctggccgtagccgaatgcaaccgcctcggattgcttctggattgttcccatgtcggggcccgctccgccctggagatcatcgagcgaagcgctcaaccggtcgtcttcagccactccggagccgaagccgtctcgtccaatccgcgcaacatcgacgatgaccggatcaaagcctgcgcggccaagggcggagtcgtggggttgtgcccctggggcccgatgcttctcaagaagggccggaccacgcggccgaccgtcgatgatttcctcaaccacatcgaccatgccgcccagcttgtcggcggcgtcgaccatatcggcgtcggaacggacatgagcctgggaacgtatccggagcataaggtcgacccgtggggcacgccggccctcaaggacgtgaccggatcttatgacaagcatatcagcgcgaatatgcgctccccgcttcggatggcggagggtttcagccaatatgccgatgtcgtccatttcgccgaacgcctgggaaagcgcggctacggcgacgccggcatccgcaagatcctgggcggaaatttcctccgggtcttttcccaagtatggaagtgagccgggaggagaaccgggtccctcgtcccatgctcttctccctatctttccggagccagctcacggtccaataaatcgtcgtaacccggaagccagggggagttgccggcgatatatgtttctcccccgaaaggcagcttttcccaaaaatccagggaggagcgggcttcgaagcgggccatgcggctgtcttcgccgccgtcgcccggagcgtccagaaattttcggcagacgcggccgtgagctccggcccaagtaaataatatctccggacaagcgcggcgaagcgcctcgaccagctcccgcagccggagacgcagcgaatcggcccgccgccgaagcgtttccatttcggccgcggcctcccggacttctccggcttcgggccggccgcggtcgatgaggtcgcccaggccgccggccgagtcctccagcaaattgatctcgcggcgccgttcttccagggcgcgggcttgggagaagaggaacgaggccgattggtccggattcaggcgcgtcagctcctcgctctcttcgccgccgttcatgtgatattcataacagctgacgtaatcgtagagcgtgccgcaggcggggcagcgccgggtatggcgtttctccgggtcttggcccgagggatcgggaagaacgaccagccgtccggccgcttcgggaagcggattgtcgagctgcggggcgagatacttggaaaaggaggtttcgacatcccggagccggctgcagatcgggcattcgcttgcggcggccatggcctcgattatacggggctcccggcgggacggcaaggacacaaggaagcggcctcgatccgaccgccgccggccctgaatcgattcgcctatgatgccgatcctctcgtttaaccaagatttttcttgccggcggcccgggaatgcgctaaaatgccgcccgtcatgacgatcgacagccaaagaaaccgcggaatcctatcccggttctccgttctcggctgtctctgctgcgggcgacccgccgcccgctgaatcccccgcccccgccgccgtttttctttccatgacgttgtccgtcaatcgacaggagcatgatgaatatgaaacgccttgtgaatattttagaagccatcggccgaacgccgctggtggatatcagcgggctggttgaggcgaaacacgggatccgccttctggccaagatcgaaggcctcaatccgggcggatccatcaaggaccggacttccctgttcatgatccgggaagcggaggatcaagggcttctccggccggagcggacgattctcgagccgacgtcggggaataccggcatcgccctggccatgatcgcttccgttctcggctatcaagcccatctcgtgatgccggcttgcgtttccagcgagcggcgggcgataatcgccgccttcggcgcggaggtggacctgactccggccgaagccggaacggacggggccatcgcccgggcccgggagctggcggccgccgatcccgggaaatatttcatgcccgaccagttcgccaatccggccaatgtccgggctcattacgaaacgaccggaccggagattttccgccaggcggaaggggaggtggacgttttcgtggccggcctcggcacgggcggcaccttgatgggcgcgggggaatacctgaaggcggccaagcccgggatcaagattttcggagtcgagccgcttcccggccatcgcattcagggcttgaaaaacatgagcgaatccgaaaagccgtccatcttcaaccggtcccttctggacgggatcatcgccgtcgacgatgaggaggcgttcgtcgcggcccgggagctcgtgacccgggccggcgtcttcgccggcctgtccagcggggcggcggtggccggcgcccggaaaatcgccgcggattttcccggcgcggtcatcgcgaccgttctgcccgacaggggcgagcggtatctcagcacggaaatcttccggtcttattgcggccgctgccgaccgtgaaaactaaggaaatttccttttcctcggctttcaggataggccgcctgcgactgtaatgtcgcttccaaagcctcgagcaagccgcccggcaagatcatttttatatcatcttcttgggtcgggagataaaccaatcgttcatcaccgcgcaattgctttgactgtcatcgataaagatattaaaatcaaacaataagcagtggatacgcaaatcgtttcgaagaaacgggtcgttgatcacggcgaggtattgaccgggaagcgggaggtcaatgccatgctcgatctcgtgaagcaggaaacggagcggatcgagtctcgttttctcgaacccgcttgcggaaccggaaacttcctgatcgtgattttggaacgtaaacttgcgatcgtggaaaaacgctacggaaaatcgcagcttgatttcgaacgttacgccgtcctggccgtctcctcgatctatggtattgacatccttgaggacaatgtccgccagtgccgacaccggctctatggactgttcgattgcgattattattcccggctgttcaaaaacagcgccaagaacgagtgccgcgaggcggttcgattcattcttgaccgcaatatcatctggggcgatgccctgaccctcgagacggtcggcgaaaaaccggattatattgttttttccgagtggtcgccggttaacgggagcatgctcaagcggagggactacacgtttcatggtctgctgacacacgaaaccaggaaggaactgcctcttttctccgatcttggtgaagatgtgttcatcccgacgccggagaaagaatatcccccggttcatttcatggagatcgcccatgtccaacaatagtggttacaatcccgatgtcctctcctgcatcgcaaacctgagcagcgatgaagtcttcactccgccccacctggcaaaccggattctagatctgctcccggcggagctttggcgcgatcaaaaggcgacgttcctcgatcccggctgcaagtcgggcgtgttccttcgcgaaatcgccaagcgcttggataaagggctggagcaggaaatccccgaccgccggaagcggatgaatcacatcttcaaaaaccagctttacggacttgccgtcaccgagttgaccgccctgctgtcacgccggtccgtgtactgctccaagaccgccaacggtaaatattccgtctgcgaaactttcaacaggtccgatggcaatatccgattcaagcgggtggaacatgcctgggctaaggggcgctgcgtttgctgcggggccaataaggaaaattatgcaagaggcggtgaactggaaagccatgcttacaattttattcatactaacaaaccggaggaaatcttcaacatgaaattcgatgttataatcggcaatccgccgtatcagttaagcgatggcggttttggtcgaagtgcatcaccgatctaccagaactttgttcaacaagccaagaaattgaatccgcggttcttgaccatgattattccctcaagatggtttgcaggtggaaaaggtttgaacgactttcgatctaaaatgcttgatgacgataggatccggaagattgtagactatgaaaatgcctctgaaatatttccaggcgtagatatagcgggaggcatttgttactttctttgggaacgcgattcccgtggtccttgcgaagtcatcaatgtccgcaatgaggaacgctttgtttcagtacgcccactcaacgaattcaaaaccttcgtaagacacagccaagcactccctatcattcggaaggttcttgccaagaacgagaaacggatgagtgagcaagtgacgagtcgaaaaccctttggcttgcccacaaacgtgcgtcctatgaaacaaggagatcttgtcctgcgatggaacaacggcgagggtccctatgcccgcgaagacataaaggtcggtattgatatgattgacaaatggaaagttattacgtcgaaggtctcatatgatcacgcaggacaacccgacaagaacggaatgcggaaagtcttgtctattgttgatattctgccaccgagcacaatatgcaccgaaacttacatcgttgcgggtgtgttcgataaacgagccgaagctgaaagcttattacaatacctaagcacgcgattcgttagattcctagtcgcgcaactctcattctctcaggatatcaccaaggatcggtttttcttcgtgcctgttttaaacatgaatattcaatggactgacgaaaaactctacaatcgatatggactgactgctgacgagatcgccttcattgagtccatgatccgcccgatggatgcgagcgatgaataagaaaaaccttccatgaatggcgtagagggatatttggaaatatcatggcattgaatcatcgacatattgatggccgttgagattaacatcgatgattgaggggggggaatgacgaatcataatcaggcgctggccgtctttgagaattttaagattcgccgtgtttatgatgagaattctgaaacatggtatttttcagtcatagacatcattgcggctttaattcagcaaccggattaccaaacggccaggaaatattggaacaagctaaaggagcgactaaaaaaagagggaagtcagttggtgacaaattatcaccaactgaagatgccggcgacggacggaaattattatcgaactgatggcgctgattcaaaaacacttctacggttcatccagtcaatcccaagcctaaagcccgagccaatcaaactctggttggcgaaggtgggttgcgagcggattcaggatatgagcaacccggcacgttcgatcaaccgcgccagggaattttggagacagcatggccgaagcgaaaagcggattcaacagcgcatgatggggcaaaaaacccgcaacaagctcaccgagtactgtaaaaatcacactatcggggccgaggaggaatacgccatcctcaccaacatcatccaccaggagtggagcggggtctcggtcaagaatcataagcagatcaaggggcctgagcatgagtaaggatttcttcccgctccgtccggtaacgcggcccaccctatacgcctacgaggacacgaacccgcaatacgcaggccttctgaaggtgggttacacgaccgtggacgtccagagccgtgtggcgcagcagtatccgacgaagaagcccggcaagccgccgtatcggatcgttcttgaagaatccgccatgcggagtgacggaacggcgttcaccgatcatgacgtacaccggatgctgcggctcaacggtatcaagaatccggagggcgagtggttccgttgcacggtggatcaagtcaaggccgcgatgatcgcggtgcggaccggtcaattgaacgaggaaaaccggtcgctggatttcgagatgcgtccggaacaggttgaggcagtcgagaaaactgccgcctatttcgccagttggcgcagggagaggggcaaccggaacaaaccgccgcatttcctctggaatgccaagatgcggtttggcaagaccttcgccgcctatcagttggcaaagaagatgggctggcggaaggtgctggtgttgacattcaagccggcggtgcaaagcgcctgggaagaggacttgaaatgccacgtggatttcaagggctggcaattcatcaagcccggcggactgacctatgaacagactgacaaaaaacggccgttcgtctgtttcggttcgtttcaagattacctgggacgcaatcccagcaccggcggaatcaagacgaagaatgaatgggtccactcgacgcattgggattgcgtgattctggatgaataccactacggcgcatggcgggagaacgccaaggaactctttgagtcggaagacgagagagagcgcaagttcgctgaaggcgaaggcatcgaggatttcgacgaagacatcatgccgatcatcacggacagttatctttacctgtccggcacgccgttccgggccattgcttccggcgaattcatcgaggagcaaatcttcaactggacgtattccgacgaacagcgctcgaaacgggactggaaaggcgccgacaacccctacgccgctttgccccgcatggtgctgctgacctaccagctgccggacgcgatccgggaaatctccatgcggggcgagttcaacgagtttgacctaaacatctttttttcggccgaaggtgtcggcgacaaggctgaattcaaatacaaggatgaagtccagaaatggctggacctgatccgcggctcgtttatgccgaccagcgttgacaacctgaaacttggcgcccagaagccgccgatgccgttctcggacgcgcgtttgctgggcgtgctttcacattccttctggttcctgccgagcgtggcagcctgtcatgccatgcgaaacttgctggcaaagaaacagaaccggttctatgatgactacaaggtcatcgtggcggcggggagcgccgccggaatcggcgtggacgcgttgccgcccgtgcaaaaggcaatggatgatccccttacgaccaaaaccattaccctgtcttgcggaaaactgaccacgggcgtgacggtaagaccgtggacggggattctcatgctccgcaactcctcgagcccggaaacctactttcaggctgccttccgggtgcaatcgccctggacggtgcgcaaccctgacggcgcgtctccgaacgaggaacagatcatcaaggaagagtgctatgtcttcgacttcgccccggatcgcgcgttgagacagattgctgactacagttgccggttgaacgtgaacgaagccaacccggaaaagaaggtcgaggagttcatcagcttccttccggttctggcctacgacggcagttccatgaagcagattaacgccgccggcattctcgatatggccatgagtggcacgacggccaccctgctggcgcggcgctgggaaagcgccctcctggtgaatgtggacaacgacaccttgcgccgcctgatgtccgacaagaaggcgatggatgccctcatgagcatcgagggttttcgcaacctgaaccgggatatcgagacgatcatcaacaagtcggaggccgtgaagaaggcccgcaaggaggccaacgacgaggagctttccgcgaaggaaaagaaagaactgaccgaggaggagaaggaatacaaaagcctgcgaaagcagatccaggagaagttgatcaagtttgccacgcgggtacccatctttatgtacctgaccgactatcgcgagaggacgctgaaggatgtcattactcaactcgaaccggacctttttaaaaaagtgacaggcttgacgaaactggacttcgaggtgctcgtaagccttggggtcttcaacagcgccttgatgaatgatgccgtttacaagttcaaacgctacgaggatgccagccttcgctataccgggatcgacaagcacgaaggagaggatatcggcttatacgacaccgtcatcacccggaaggacgcgcaaagagtattcgagaacgtaccgatgagtgagcgatacggcaagtgataaatcgaccgataagcggccggattcgctcgatcatttacgccaaatagatccattcgagccaagcggcgatctcagaagtcacttccggacttctttcggctctaatgctttgtgagaatgacaatcagccaaggcgttaaaatatcgatgtcgtgtcgactctatcacgacgagtcaaaataatcagggtttcggcctggcatgcttttggttcccgaagactctcgtttaaggttgcttgaaatattaaagaaagcttgatgcaattcagggcaccggatgccgcttgggataaagatgttgatgatgcgggccttgcttcctgctccgagcggatctccccacgaggccgcgggcgtgatatcatgggcggagcggcggccggcacgcttcggctcatgtccgcaaatcgtgataaggagtggattcccatgatccacaggaaaacgatctcggccgcgatcgcggccgccctgattatggccgcgcccatggtccaggccatggaagcggaagagatcacggccgtcgtcggagcgcgcgttctgacggcggcgggccttgaaatcgacaacggcgtcatcctgatcaaggaagggaaaatcgcggcggtcggagcggccggcgacatctccgtccccgccggggcccggatcatcgccggcgccggcctcgtcgtcacgccggggctgatcgactcccactcccacttggggctgggaccctcgggcggcgtcaccgaggacaatgaaacatccgatccgattacgcctcagctgcggatcatcgattccattcaccccgagggcgtgggccccgatcagcaccagttccgcaacgccctggccgagggcgtcaccaccgtcgcggccaggcccggcagcagtaacgtcatcggcggccaatcagcggttctcaagctcaggggaggaacggtcgacgatatgatccttcgtttcccctccgacatgaaaatggccctcggccggaagggatactatgcctccaagggcgtcatgccgacgacgaaaatgggggccgttttcctggcccgcaaggctctcgtcgaggcggaagagtacgggaaagcgcaggatcggcggaagaaggccggaacggccgactcgaaagacgtcccggcccgcgatcttaagaaagaagccctgctcaaggtgatccggcgggagattccggtccatatccacgtcaactcggccgatgacatcatgacggccgcccgcttgtccgacgagttcgggttcctcaggctctcgctgggccacgcggtcgatgcctacaaggtcgccggagaactggcccgccgcgggatcatcgtcgtcgtcggcccccagatgatcacgtacgacgaccaaggccggctggtcaacttggcgggctatctcaaggacaaaggggttcaagtcgacatcatgaccgatgccgacgtcgtccagcaggcgttccttcgctgtcaagccggggtggccgtgaaatacggaatgctccctcaagacgcgcttcgctccatcaccatcaatcccgcccgcaccttggggcttgaagaccgcatcggaagcatcgagcccggcaaagacgccgatctggccttcttcgacggcgatcccttcgacccggcttcccaagtggtcatggtatttatcgacggccgggcggtttacgaagcggaaaaggaaccgaagtgaagaggaacatgaaaatgaaacaaatgggcgcgggtttgatcctgttgatcatgatgacggtcgcggccgcggccggaaacgtcgaggagacattcgccgtttgcggcggccgcgtcgttccgatcgccggacccgaaatcgaaaacggcgtcatcctcgtcgaaaacgggaaaatcaaggccgtcggagcggcgtccgaaatttccatcccgccgggaatcccgatcatcgacgcggccggcggctggatcctgccggggctggtggattccttcgcctcggccgggcaggcgggcggcgacgagatctccgatcccgtcacggccggcctgcggatcctcgatgacttgaatcccttcgacaagcggttcgaacaaacggcccgggccgggatcacgacgctcatggtcgggccgggccgggtcaatgtgatcggcgcccgcacggtggtcatcaagccccgaggcgtcacggccgaggacatggttcttcttgaacccggcggcgtcaaaatctcgttgggcgagggaccgaaggccgcgttcggggaaaagggccgcctgcccgggactcgcatgggcagcgcctacgttgtccgcaaagccctgttggaggccgctgagtataaccacaaacgccggcaggcggagacggacaaagccgccgcggcccggaaaaaggacgcgaaaccggcgtcgcccctcgcccggaatctcgatctcgaaccgctggccgatcttctagagggcaagcttccggccttcatcgaatgccaccgggtcgatgatattcaaaccgctcttcgcctggtcgacgagttcggctttcgggccgtgctgttcggggccgaggaaggatggaaaatcgcggatcagatcgccggccggaatattccggtcgttgtcggatcgatgggcgtgggcccgaaacgcgaagagacgaaaaacgtcaagctcggcaacgccgccgagctggtcaaggccgggattaaagtggccatcggggccgaggactcgctcgggatcggcgcgagggaggagcttgtcctgtcggcggccttggccgtcaaagccggtctcgaccggccgacggccctccgggcggtgactttgacagcggctgagattctgggcgtggcctcccgcgtcggaagcatcgagccggggaaagacgccgacctggtgatcttcacgggcgatccgctgcattaccagacgcgcgtcgcccgcgtcttgatcgaagggcggccgatcccggttcctgagcaactgcggaagccgaggccgtagaaccgccggtttcgtccagcccgaggcggcctatcctccggccgcggaggaggcggcccggcttcccctcgtttgggggatgacgtccgccccccgcggcttcgggccggcggccgagggatcttcatctcctggcgttgatatcagccgagctcctcgagggccttcttcgcctccgcgtattcgggatcgagagcgagggctttacggtaagcctctttcgccttgtcgttcaggccctttttcttataggcttcgccgagatgaaaataagtctcggggcaaggcttgatgagggccgcttcgaagtcctcgatcgctccgtccaagtccccgccgaatccggggggggcggacatcctggccatgccccggccgaaatgagcgtccgcgtttttcggatccagctggagcgcggcttcatattcacgcatcgcgcccattccgtatttcatcatgtcgagcggattgccctgggccatattccccatgatatgtcccttccaggcgtggaaatcggccttgcccggctctttggcgatcagggcctcgatcatgtccagggcttggggatattttttctcctcaaatagttttttggcctgatccagggaagcgtccttcgggagagcggccgccgccgttcccgccgcggattcggacgtcgggggcgttgtcgtccccggcatcttgttcccgatcatttggggcagggcctcgagcagaatcgggagaagctcctgcagcaaggacggcttcggttcttcttccgggaaaacctcgactcggacgttctcgccctcgatgatcaacacgcccagagggacggtcttgccgctcatcccgccgccgaacgacatcatagctcctccgccgccgagaccgaacttgatcttggcgaaggggacgatgaccgtgtcctggaccgtgaccggctggccgacaacggcgccgaccttgaggccggagacaaggcggtcgaaatccgcgaggggtttctcgagcggagcctgagccatcaggatgcccgcgccgaaaaagagcgtgaaaaaagagacgatgagaactcgttgggcgttcatggcatcctccttacttgcgcggtatcttgccgacgcttacgaatcgcgttccggacttggtgacgacgatgaatcccaacggccgggcctctccgcccatatagaagcccttgccttccatttccggattctggggcgcgccgccgcctccgcccccgaagccgatatcgatcatgatgatcgggacgagggtgactttcccggctttgatcggatcgccgatcgcggttttaacctgaagactctccgccaaccgctgggccatggcttcggccagctgttccatcggcaggggagacttggccggagcgggggcctttttttccgggggtgcctgggcgagcgcggccgaaaagacgagcccgccgagaaccaacagagcgagtagctttttgctcaaaagagcacctcctccatggaaaaatttagatatcgccgcggggatgaaaacatatcgcggtccatattttccctctctacaggatagtacgaaaaaatcgacgctggggtttatcccggccgggttgattgattcctgcgggaaggcggccggagagaaggaggtccgcgcttcgatcggcgcgggggggggggcgacaaagcttcccgccccccgcggatcgaggaaatgaaaagccccttcggatttcgtccggaaggggctttttactcgaggacagggagatcagatattttttttcgggggagtctccggctttccactgaaacctttcagatagagcgaatagagcgttccgctggggcaaagaggcaggcattcccggcacatcgggcactcggaattggaaaaatccgagaggaagacgacttctttatcgatgccccggccgatgaagcaggtgacattcttctttttcacctcggcgcagtagcggacgcacagcccgcaaagaatgcacttgggccgttcgatctcaaaccgcgattcctccaagccgtatttcttggccaagctctccagcggccctgtcgaggattcggccaggagcagctcgaggatcatccggcggagcttgcggatcttttcggtttccgtccggaccgtcaggccgtcctccgccaggtaggcgcaggacgccaccaggcgttttcggccgtttttttcgatttccaccaggcagagccggcaggcgccgtagggcgcgagccggtcgtcgtggcagagagtcggaatgtcgacgcccgctttccgagcggcgccgaggagggtcgtccccctctccgtttccacctgttttccgtcgatcacaagtttgatggtttccatggcggactcactttctcctctggaccggggtgccggcagcaacgggcgggggcaccggccggccggagatccggatcacggcgctgaagcgggaggggcagacctccaggcaggcgccgcacttcgtgcacttggcctggtcgatgacgtggatcgcgcccttttccccggtgatggcccccgtcgggcagttcttggcgcaaagcaggcaggcctggcacttggcgggttcgatgtaataacggatgagctccttgcagacgcaggccgggcagcgcttctccttgatgtgggcctcgtattcgctccggaaatatttaagggtcgagagaagcggattggcggccgtcgtgcccagggcgcagagggaggcttcggtcatgacctcgccgagctcctcaaggagctcgaggtctccttcccgtccttgcccggaacagatccggtcgagaatgaggagcgtttgctttaggccttcgcggcagggcacgcacttcccgcaggattcctcggacaggaacttgacgaaatatctggccgtgtcgaccatgcaggtgccctcgtccatgacgatcatgccgcccgagcccatcatcgaacccgctttgtccagctcgtcgaagtccacgggcaggtcgaggcattcggccggaatgcagccgccggacgggccgccggtctggaccgccttgaatttcttgtcgccggcgatgccgccgccgatatcgaaaatgacctgccggagggtcatgcccatgggcacttcgaccagtccggtgtttttgacgttgccgaccagggagaaaatcttggttcccttgctgctcttggtcccgatgccgttgaaccaggccgctcccttgttgatgatcgccgggacgttggcccaggtttcgacattgttcaggttggtcggtttctcccacaggccgctgacggcggtccgaatgtacttcagccgcggttcgccgactcggccctcgatggccgtcatcagggcgctggattcgccggatacgaacgccccggcgccgcgatggatggtgacgtcgaagctgaactccgagccgaggatgtggtcgccgaggaggcccagctcccgggcctgctccaaggcggtggtcaaattggccacggccaggggatattcctgacggacatagacgaacccctcatgggagccgatggcatacgcgccgatgatcaggccctcgaggacgctgtggggattgccctcgaggacgctccggttcatataagcgccgggatcgccctcgtcggcgttgacgatgacgtatttgggttcgccgggagcgttgcgggtcgtttcccacttggtccccgtggggaagccggcgccgccgcggcctctcaggcccgattttttgacctcatcgaggacctcgacgggcgtcatgacgaaaagggccttggccagggcggaatatccgcccagggcgatatagtcctcgatgatccccggatcaaccagccggttggggcccaggatgatccggttctggtgtttgtagaacgggatgtcgccctcgtggacgatcttccggccgtcctcgtcggcaaagaccagccggtcgacgaccttgtcctcgatgagcgttttttcaacgatctccgggacgtcgcccggggtcaccttgaggtagcagatttccttcgggaagatgaccaccagcggacctctttcgcagaagccgtggcagccggtccgccggatgtcgaccttgccttcgaggccctgcttgcggatctcctcgacaaatgctttgtggacctcgtcgcccttgcaggccaggcagcccgtgcccaggcagatggtcacgcagactttgccggcgtcccgcccgtccagaatagtctgcctgaattttttcagttcagccgctgatttcagtttcgacatgttcgcctctttccttgtgatccgggcctcagtcgcaggccgcggcgatcttttcgatgtccttgaggccgggcttgctgtaatactgcccgtcgatcctcatgaccggaccgagagcgcagcagcccaggcagttgaccgtcgataaagtgaacttctgtttgtcatcggtctggccgggctcgatgcccaggacgctgatgacgttgtccaggaggcgcttagcgccgcggacctggcaggccgtgcccaggcagacctggacagcatggcggccttggggctccaagctgaacgccttgtaaaatgtagcgatgtggtagatccgggagagcggcacgttcaacctttcagaagcccagatcaaggccggcttgggaagccagtggttttcggtttggatatcgaggagaacctggatgagggcgttctcccggccgtcgtatttgtccagaatcctgtcgaccgcggcaagctcctggaccatttggtggatggcttgctttttgtcccggacttgcttgagggactcggccaggtgcatggcttccgtttcgaggctgcgaagatcaaagcttagggggggcttgtcgaggtccagcgagtagtactcgctcaagagctcaaggcctctgagcagaacatcgctcttgctggctttcgagtctttttgaaggcggctcaacgcttcgttctgtttttcgctcaaacgcattccgacgaacttggatttcttttttgttgaacgcggcatttgatactcctggcgtttaaccgttttacataattattctaatacttcttgtttttgttgtcaacaaggggacgccttgggaaatatccgagatgaatttaacgtaacgtttaacgtttatttaagagttggaggtcgcttttcggatatttttttaagtaaaagttgatgttcattaagcgtcgatgatgagaaactcggccttgcccagccggttcatgcgcctctgatgaccgatcaacgacagaagctcggcgagaatagcggtttcccggtcgttattccggagaacgggatcgttcgtcagatcgcgcagggcgacttccagcgcttccaccggcgtaccggagggaatgctcaggagaaaacgcgtgggggcgatttcgatcaacttcaaccaggggatttccttcagggctttgctcggtccgacgacgatcagggatttgccctgagccatctccgtgagcttcaccggtttgaatcgatccgcctccgctccggcgacggcttccgcggctttggccacggcttgagcgcggtccggatcgatttcagcgaggagatcaaggatgcgcaccggcaaggtcattgtcacggggcggcggggctcccggaatttcgggggccggccgctgcgattcgatttcacctgttcgggcatagcttcctgcttcattatagcaaatcgtcgaggtcttttcgacgcaatgaacggaaaatccgtctccgccgtcggcggatcgcggctctcgtcttcgttaaatcccccgggaccggcttcttgaattataacattgaaatccgttgacaaatacaataataacacaataaactaagcgccgtgtcgtcgacgatttttttcgataaatccgggaaagggccttccggatgagatggacgaagcaagttaaaagaggaggatcagatgaaaaaactgtccggacaaatcgcgccggcccttttcgcggtgggcttgattttttttaacgccggaatctcgatgagccaaacgacttccgtcctgaaggaaatgtcccttcaaaaagacggagcgcggctcaattttttgttcaaagtcgaaggagcgtatgtcgtcgaagcctctttcctgccttcgccgccccgcttgatcgtagacatgacgccgatatccgagatgcagattctccccgtcacgcaaatcggcgatatgggcgtgctcgacgttcgagccgttcaatccgggccggataaaattcagatcattttcgattttggcccgatgattcccgcgtatggaatcacccaaggcgccgaaggattgaaaatttccttctggaatgaaggagaaatcgccgcgatttcggatcctcgtccggccgaggcggccaagccgattgtctcaacggcgcccgccgcccccgtcgctccggttcaggcgcggtccgcggctcttgagcgttccggctttttcatcgccggccgggccggcctgtccttgttcgtgggggaggatctctccgtcgaaaaaacgtttgacctttacggggaaacggcgaccctggctgaatcctattccttcagaacggtccccgcgtttgagcttcaattcggacgatacttcaaccgaaccaaaatcgggatcggtatcgggtactacagcccgctgaaaaacccgggatcgttcacggccggccttccccatcccttcctcccggagacgccgcgcaacgtctccttcgaaagcgatggcgggaaaaacacgctttgggatttttccgtctttgctctcttctccttcctgaatacggaaacgctttccgtcgcggccgggccgatgatcggcttgagcctgggggccatgcagagcatggaggactttgatttcaccgaggaatccccttatgacgccgcccatgtcacggtcgcgaatatgacgtacgcgaaggatcaattcacggaattatcctttggaatgctcctcagcttggaataccggttgaatgaagggctgggccttctgttcgatttgcggggggtttatctgaatcccaagaacgtcacgctgggaaagcgggccaaccttctccacctccagccggtcttgggaattcagtacagcttttaacgaggcttcggggggaagacgccgaaaacggcgcggccggcggcgggtttcttccgccgccggccgcgtttctttactggaaatacaccttggcgctttccgtgccgccgtagcccagggtactgacggcgaaatacctcttcaccttcagatcggtgaaggtgaacgaggaatcaaacgtgctcggcgagaccgtcagaatcggggcgtactccccgtcgccttccttcatgtaaatcgcataccccttgatgtgggccggggtattggccggattgatccgccaagcgagggagtaggtgatgttcagatttctccgcaccgagccgatgacgatcgtgagctcggcgttgagggggatctgcggatcggttttcttcacctcgatcgttttgccgatttcgtccatccgtccgagattgtcggtgatcttcagcgtgatcgtgtgcatgccatgagtttcgaacacatgggacgtctgacggccggccgcggatccgccgtcgctgaacgtccaggcatagctgacttccgagccgttcggactaaaggcggggacggcttgaatgtcgaccgccagcggcggatatccgctggccggggagaatgtgaaatcggccgtcggcatatcaacccgctcaatcggattcagggaatacacccagaggtcggttcctgacgtcgtgtaggaggactgggtcacggccacattccccagggaatcggccgccaggccgtgaaccttgggatagagcgccgggaaggtttggaacggcttccagatcccgccgacattattggtatagcggaagccgctgccgaagtcgccgccgccggtctggcatacgacgtggatgtcgttcttgctgtcgacgacaacccgcccgaaatgctgcatggcgaaggggatgactctgactggtgttccgccgatcggcaggacatagatttcgcatccgttttccgccggcggaacatcctggtagcagacgatcggggcattgttcgagccgatggagatccaggggtgattggaattggtcggggttttcggcaaggcgacccttgtttcccaagcggtcgagatcgtccgggtggcataataattttgataggtcgagtccgggtctttttcgatccagacggcatggactttgccgtccggcccgatgaccagcgaaccctgcttgccgcggctctggttcaagatcgcgatgttatcccaaaccccattgatcttggaacgggcgaagacgacccctcccgcctcgtcggtgaaaaagacatggatgttgccggcgttgtccatctgggcgatgggttcgtcgccgccgtagttggaggccaccgtctcaatcgggccccagatttttgtcttgggatcccagattcttaagtatgtggatctggtggcgacgactccccaggccacgagaacgtgccctttggacgaagtggtgatatggggacggttggccttgatggccaagctgccggtcatgttgattggtgtcgaaaacgtcgtcccatcgtaggtcccgacccagatcggtccgccgctgttggcgttggtcgtgccggggacccagacgacccagagcctgccgtcgggcgtgaaggcgcattgcgtccagcggattttctccgggctttgaaagagcagcctgccgttgcccaggatttgtccgaattggagattcgtgaggagaagcaggaagcaaatgccgagcatgatgtgttttttcatgttgttcgtctccttcaattccaggattcatatttccaatcacgttttcacgtggccgtccgccgaatcaaggcgaacaaggcgcttatcttattatgttaatattttgcatgtcaatgatttataatgttataattcattcgccgcgaatcttaagcagagatcgatttctgccggggggaaatccggtattccagccgttcttcgaccgccttgagcgcgggggagatgatccgcccggacgtccggaacggacgtttttcgcttgggcgcaatttcctccttttcttcctttccggacgattggagaaccgcattgagcgggaagatgtatttttccggccggtcgtcgagaacgccgtcgcgatgcctcccggccggatgattgtcctgcgcggattcgcttggatccgagcgttccgcgcgcgaggccgctccggatcgacgggtcatcttcacgatttcccggcggctgcggattttcttcgcggataaccggcggttttgcgggaccacggcctgaaggcctcgatccgatccccttgtcctcggttttctctgcgcttttcgcggcgcagggcggccggggagtgccgcgggcgttgaactgggcttgttatttccgcgtaattttgcgtcattcccgcaaaattagatttttccccgcttgaaacggccccgataggggagaaaaaacaggttttcacccatagattcaccccaaagggtgattgatcggaacaggctaggagaaatatatgtaagcaatggaggatatcccatgagcacgatatgggtccgggatatccgatcttcgggaaaaaggcgcggatgatgcagaaaaaagttcttatcgtcgattatgacatgaaggacacgacccgggtttctgagcttctgacgaattacggctttgaagtcgccatcgccggagacggccaagccgggtgggatcagtactcggctctcaagccggacgtcgttctgctcgaaccgatgttgtctaaaatccatgggtttgagctttgtcagagaatccggtcggattcactcggccgcactcaagtgatcatcgttaccggaacttataaggatccgatctataaaaccgagaccctgaggacttatggaatttttcggtacttcgtgaagcccgtcgacaacgataagctcctcgccgccgtcaacggcgcttttaatgtcggaaaggaacatgaacccggacagccggagttcatcccgccggtcgccgcttcctccaagcctccggaggaaaaactccggccggtcgcggaaaaaaaggaatttgatttcgaacagccggagttcattccgccggttcccgcctccttcaagccgccggcggaaaagccccggccggtcgcggaaaaaaaggagcctgaatccaaacagccggagttcattccgccggttcccgcctccttcaagccgccggcggaaaagccccggccggttgaggaaaaaaaggagcctgaatccaaacagccggagttcatcccgccggttcccgcctccttcaagccgccggcggaaaagccccggccggtcgcggaaaaaaaggagcctgaatccaaacagccggagttcatcccgccggttcccgcctcctccaagccatcgctggaaaagctccggccggcggcggaaaagccgaaacaaaggacgcccgatgcggggaatgtggaagtcgatgcgctgttgaaaaaggcgctcaagggtttcgacttggagacggggctgatcaaatccccgggaaaagaacccaaaaaagcgccggctcccgagccgccgcgccgtcccgttcccgccccggaaatccggaagaccgaaccgatcgccccgaaaaaagaagaaagaccgccgaaaccggaaccaccggcggctccgcctccccggacggaatcctccgtccacacggaacggactcccttcggcgacctgtacgaggaaccggcgaaaaagaatttcaagccggttgtgatcatcgccgccgtcgtcgtcttggcggtcgcggcgttcttaattctcaagcccggatcgccgggagcgaccaacgaagtccaggcgggcggctcctctcttctcgaacccgccgccgacttggaaaccggttcgatgcttgactccgagaccgtggcgatcggatccgaaatccaggagaccgatccggaaaacgcagtgaagcctgagccggccaagcccgtcgataagatcgagacggcccggccccggccttccgagcaaccggcggctccgccggccgctcaggccaaacccgtggcccggcgccctgaatctgcgcccgaggcggttcgatccgtcgaacccgaagcaacgaaagttcagcggccggccgaaacggtcggagataagagagaaagcacgcccgcgccggcggcttcaacccccgctgaaaagccggttcaagagagcgcccctcctccggaagtcaaggagtccgttcctcccgcggcggctcaagcggtcactcctccgccggccgaagtcaaacagccccccgccgtcaaaccgtctccgccttccgttcaacgaggccagttagtgcccttaaatgaagtcagccaaaaaccctccgtcgtcagaagggtcatgccggtctaccctgaaatcgccagaaggcttaaaattgagggctcggtcaccgttaacgccttgatcgacgaatcggggaatgtcattgataccgaagtcatcaagggaattaaaaatgacagtggaacgcacagggccgccgaggcggccgtgcggaaatggagattcaatcccgcccttgtcaacggtgttcccgtgaaggtctggatgccggtggctctcgtcttcaaggtcgaataggaggattcgcgaaaaagggagaaatccatgtccatgaccaaagatcaagaggcgctttatcggcggacgctggacgacgtcaaaaaacagctcgatcagctggacgaagaagtggagatcgagctgcagaaagtcaggctcagactggccgaactccaagaatccaagaagtctttgaaaaaggtatacgaaggcatcgccaacctgctcggcatcgagatggaaaaagaggctgacgaggaccaggccgcggcgatctccaaagtttaagcggccgccccggccggcgtcgtgaaccgtagcggccgggacgccccctttcccgcgattcccgcaagatccggtttttcctttgtcgtttccgttgtccgccggcgtccgtgaccggtcccaagaccggccctggagccaatccgctttcgccgtttcttgacttcctccaggcgccgttttatcttttcgtcaaggcgggaaaggcgtcgatcccttatgagcgccggctcgaaaacgattctgtttcttcttcttatcttaatgatattcttcatgttgtctttttctctcgccgggcgggacgccttgtcggaatcgaggcatttcacgctcgaaaagccggccgagggcgtttacgcggcgatccataatgacctgggcggcttcgccatctgcaaggcggggaacatcgacctgggggatcgaaccgtcatcctcgatcccttcatctgtccgacggccgcccgggacttgaagcgccaggccgaattcctgaccggaaggcctgtttcgctggttctcaacctggatcctcacagcgatcccatcggcggcaatcaggtcttcattcccggggccgtcatcatcagtacggcgaacgcccgcgcgtatatcgaaactcatttccagaaagatctcgatacccaaaaagagacggttccgggcgaattgaaaatcgttcaggaccggctcataagggcgtccggaatcgaaagattcgagctggcgttgcgggagtccgaatacaaagccttggtcgatgcgtttcccgagatcgaaatgactcttcccgatatgacgatcgagggcccgatgacgattcatggctcgaaaagaaacatcgtcctcgtgcccgtcggacgggggcatacgacgggagacatgatcgtctctctccccggtgaccgaatcgttttcatgagcgacgagctctttgtcaaacggcacccctatttgggggacggcgatccggagtcgttgctaagcagtctgaagaggattctggccctgaacccccggccatcgccgtgccgggacacggtcccgtcggaggggcggattcgctgcgagagatgatcgattatatcgagacgctcacgaccctggtccaggaggagatccggatgggcgccggcgagaacgatgttccgcgccttcccgatccggagaagttcaaggactggctgatcgagggcttttacgtcgtcaatctccggtttttatatcgaagcatgattccccggcctgatccgaagcggacgcgtttgccgtcgccggggaaaggggccgaatgaatccgccggcacgaatatgctatagtcctttgggagagactcctcccgagggcgtcccgcaagggacggagcggagggcgcggtattggaaggagggcatgatgccagaagaagcgatcggcaaagtgacgcattatttcgaccggatcggagtcgccgtcctgcagttgacggggacggtccgggtcggggacacgcttcattttcaaggacactcgaccgatttcagccaggcgatcacatcgcttcaaatcgagcataaaaacgtgtccgagggaaatccgggccaggacgtggctctgaaggtcgaccggaaagtccatccgcacgaccatgtcctgaaagtgacagcctgatcgcgggatccggggcggatcgttcttgacagccggtcgcggccggagcgttccgtttcccaagaaagaacggcttgggctgtttttcccagccgagggatgagggattcgcccgaagccggggggctgtccctcgtcaagccccgcgtcctggaaagccggtcgccgccttcttgaattcagcccttcgccgcggaaccgatcgcataaagggccggatggtcgcccaagcggccggaggggccgcggaccattcgccaggaaaaaacaccctcctcgaagccgggccaggagcgcaatcggcgggcggccgcggcgttggcttccaggacgccgacgcggaagatttcatctttgtgctccgaggccaagtgctccaggagcggcccggcgtcttccggttcaagagcggcccagggcccgatggccagcaatccgcctcccggccgggccatgatccagccggagagtcgcccgccgcgttccgagacgaggctgagatccgggaatcggccggccctccgccgcaggaaaaagccgcggtcgtcgccgaacagctctcggtccagggcgcacagcggctcgagatcctccggatcgaggcgccggatatgatcgtgctttttgccggcaatccttccccggaagcggagggagcggcagatcttccggaatccttgcgcctcgtagaaggggaccgcgttaagatcgccgtccaggaggatgttttccaagccggccgcgtccaggcggccgagggctttttcgaagagctgacggccgaggcccaggatccgcaggcgcgggctgacgatcagctcgccgatgaagccgttccggccgtaggccgcggcgacgcagacgcccgctcgttcgcctccggcttcggcgatgaaacatccggccgcgtcgctctctaaaaaggcggcgaaggcgtccgggctctcgcttgaccagccctcggcccgggccaaggccgcggcgaattcaatgtcccctggattcatttcccggatggtcaccgccgggatcgggctcacggaacgcctccgactcccggccggccgcgccgggcggaaaacgcatatcgatcttcgccgggcatgggagacaaaattataaaagcttgaggacaaaggcgaacgtcatgacgccggacaaggccaagcggaaacccatagccagaagaaatcctataaacgctccccatccggcccgcagagccgcggggctttccttcccggccgcaagctccccgatcacggcccccaggaacgccccgatgatgatgccgagcggaggaaaggcgaacacgccggcggccatgccgatgaaggccccccagaagccgcgcttgctcgagccgtatcgcttcgtcccggaaagaggaaggacataatccaggatcatgcttccggccgtcagcaggcccatgaccacgagaaacgccgggctgaacgaattccagccgcgggcccagtcgagaaggatcaaaccggcgaaattgagaggcgggccggccatgacgggaagaacgcagccagccaggccggccgcttgaagaactcctcccaggacgatcagaagggcggcggacacggcttcccttcctcctttccggtcgatcggcgttccgggcgcagtttaccatgtccggcggcaaaacgggaagcgccggtccgaggcttcctcccgtcccttttggcgatcccgcgctgccgggatagaaaaccggttgaggattttccttgagccggcggaacagaacgttcgcggtcatttctttctttgttccggaaattcggcggatgatcctggccggggcctcccgtccggtttgactaaatccggcggccggcgacgtccgccggggggccggccatccggaaggcctatccgcggccgggctgagctcgggctccgcacgagggttcccggcgtatgctcccccgaagcgcccggccgatccgcgtttcccaagtccccggctccccctcttcagaacggaggcggtcgatcttctccgcccccggccgattccgaggaaaataaacttgacaatggttacaaatatgatatgattccattatcgatattataaaggagattcccatgaacgacgaaagcaagccccggattcccctgatcggcgagaaagccccggccttcaaggccgtgacgacccagggggaaatccattttccggaggattacaagggaaaatgggtcattctgttcagccacccggccgacttcacgcccgtctgcacgaccgagtttatgacgttcgccaagatggaggaggagttcaaggccctcaattgctccctgatcggcctttcgatcgacagccatttcagccatatcgcctggctccggacgatcaaggaaaaaatcgcctggaaggacatgcggaacattgaagtcaagttcccggtgatcgccgacctgacgatggaagtggccaagagcttcggcatggtccagcccgcggccagcaacacccaggccgtccgggccgtgttcttcattgatccggccggcgtgatccgggcgatgatttactaccccctgtccaacggccgcaacttcgacgagatcaagcggctgcttgtcgccatgcagacatcggacaagcaccaggtcgccactccggccgattggcgcccgggggacaaggtcatcatccccccgccgggatcatgcggccaagccaaggaccgggtcgagggcgccggctcggcctacgagtgcctggactggttcctctgttttaaaaagctgccctaaggaatttcgcctgaaggagacggattccggggacggatccgtctcctttttttcaacgccggaagggcggagatgttcgcggtccccggtgacaggagccgtttcgttgactgtcagcgcggacttgagtaaaatctctcgatccgatgctgctccaatccgtcttttttctatactatttctgccttgttttttgccttgtctggctcacgccgaaatccctccgctggctgccgctcctggcggcgagcttttttttcgtcgcctacggccatcccggccatcttctctttctcgtcctgcccacgctcgtcgcttatgcggcggcccggcgactggccgccttgccgccggaggcgaggaaagcgcggaaacggtggctctgggccgccctgatcttgatcctgggctccctggtcgccgtcaagtacgtcaattttttcatggggacggcggccggcgtcgtttcgctgttcggctcgggctggacctggaagccgctcaaaatgattctgccgatcggcatctctttctacaccttccgcctgatcggctatttgatcgatgtttatttcaagcggatcccggcggaaacccatgccggccgattcgccctgttcgcctcctttttcccccaggtttcggccggtccgatcgagcgggcggggcgtttcctccctttgctgcgtcatcccgagacgttctcggctgagaggatcttcagcggcgcctcgcaggcggcttggggattttttaaaaaaatggtcatcgccgaccgcctggccgttttcgtcgacccggtgttcgccgatccgagcgggcagggattgaacctcgttttcgccgcttggctgtatgccttccagatttattgtgatttttccgggtatacggacatcgccatcgggctggcccgcatgctcggctacgagtcggcccccaacttcaaccggccttatctcagcgtcggcatcgccgatttctggagccggtggcatatctccctctccacctggctgcgcgactacctgttcctgccggtgtcctacaccgtgatgcggcctctcaagcaggaccgcctgttcggggtcaaggtggaatcctgggcctatatcacgtccgctttgctgaccatgaccctttgcggcctttggcacgggccgacgtgggcgttcgttttctggggggcgctgcacggggcgttcatgatcgccggccagctcggccgcaagcgtcgccggcgctgggcccgcaaggccggcttgacgtcccggccggccctcctccgggccctgcgggtgatcctgacgttcaacctgatctcgttcgcctggattttcttccgcgccccgacgctttccaaggccttcgcgtatcttcatttcctgcaattgaagatcaatccctccggttggagcttcctcgtggtcggcgttcttctgattctggtccttctgggaggcgagcggctggcggcaagcgataaatcctccggatggtggagccggcggcccctgccgctccgcggggcggccttggccctgtttgtctgcctgatcattcttttcgccgtggatacgggaaatgagttcatctacatccagttctgagcggctccgatttctggccctcctggcctgtttcttggcggctctgctcgttttcgaccgcggtctttccttggccgtccgggcgatcgagcatcgctcgtatggaaagagcgactttgaacagcggttgggccgctacttagccggccggaatcccgcggttcttgtcttcgggacttcacggacgttcgagggcatcattccggctcacttggaaagctgcctgggaaagaagattttcaaggaagcatactgggggaaggggcctaaatacaattattatttctaccagctttacaaaaagcgcgtcggcgtcccgaagctcgtgatctacggcgtggattatttcatctataacgccgaatccaatgtccgctggatgtcgcgcttcaacctgggggagaaagccgccggattcgacgtcttggccgggccccttcttctgtttaagaacaagaaacacaacgacgaatttcttaacaacctgatgaccgacctcggccggacggccccggccgctgattcgggcggggacgaggacttgttcgacaagatcaacacgcaccccggggcgcccgccccggacgacaatccaaagctgagaaccgagcggccgccccaatttttcaagcagcgcttccccaagccgccgggcaaggagggggactatttcttgcgccttctggatgagctgaaagccgacggcgtgaaagtcgccctggtctcgctcccggattatatcggctccctgcggaccaactggcagatgccgggctttcaccgtcatctgcaggatttgagccggcgctacgacaacgtcaccctcctgatctacaacacgccgcgtgatttcgacttggacaagccggatttgttcctggacggcggttatggaaagaccaattctcatctttcccagcgcggggccgcggttctgggacggaagctttgccgggatttggctccgctgagccggtgatgcccgggccgtttccatctggcggagaaaggcgggatatcgtaccgtgtcatccgggcgttccgggaaaaggacggccgattgatgtacaatatagggggatcatttcttgccaggctggaaggatgtccatgaaccaagaaaaaagaagaagcccgcgcggcgcgcgaatgacggaaatcgtctacactcatgaaggccttcatttcgaaggccggctcagcgatctttccgaaggcgggttatatatcgacacgatcaatcccgtccccgaaggctcgatcatcgctttccgcttcgtcctcgtcgaaaaggacggcgattcgatcatcgagggggaaggccgcgtcgcctggcaacgtccgttccagggcatggggatcgccttcacccggttgtcggatgacgtccgcgaccgcctgaaagcccatttttcccgcgcgtaatcgattttccgccgccgcttcgcgaccgtcccgaatccgcctccagacaccgggatcaggccggccttccgttgtcccggcggcgccgggccgccgccgcgccggcggacgtcttccggagaaaccggccggcctccaattcaaccccgcgtttcggccgcgtcgtttcaagcctccaggccggtctctccttcgggccgggagaagccgcctggaaatattgtcttatgcccgcttctttttcttgtcgccgccccaggcccgtcatccggtcctttcccgcatttcggcgatgatcaaggccattgaaaacgccggttgacaagaccggcgatccttggcactataaaacagatggtcaaggggaggagtctttcatgaagcgttcattccttctatccatcggcgccgtgctccttttggcgacggtctcattcggcctgaccctgggccatccgaagctgatctcaaagacgacggaccgcgtccggtggacgcaatgcgccttcggccccgacggggtcctttgggtggtctgggttcccggggataccaaccgcggcagcggcggtcccgtctgggttgcgtcgtatgatggaacggtcgtccggggtccggacaacgtcaccgagtcaacggccgttctggccaaccgccctcatatctccgtttctcccaagggatccgttatcgtgagctgggggatcgacgccgataaatcgatccatttgcggatccgcgacgtccaggggagctggggcgcgatcgagacggtttccacgggcttgggcggggacgaacccgcggctttcatggacaaggcgggcaacatccacgtcgtgttctccgacgaagtcgggggttcggtctacgcgctctccaagatcaacggcgcctgggaaaacgccgtaaaattgtccacgggtttcgggcagcacggctccctcgccctcgggacggacggggccgcccacgccgtttgggtcgaacggtcgggatcctccggaaacaactacgaaaattattatgccaagcggacggcctcaacttcctggtcgaccggagaagccttgacgggacaatccggaagcgccgcccatccgtgggtgacggtcgggacgaaccatgtgccggttgtcgcctgggaggaccttcctgatccggacaagccggggggaggatccgaaatccgggtgatgatggtcggggaaacggctcgattggcgatcgccgtgggcttgaatcatttcccccgggtcgtcgtcgaccggaacggagcggctcacgtggcctgccagtcgggcaggggcgacgccggcaacggcatccgctatacaaatgacgcctcggggacgtttcaggccgtccagacgatcgccggcgtttatccgaagctggccgggctggcggcggatccttacgggaacgtcgccgcgacgcagtcgtcgtacctgacctcgggcggaaccgacatttgggcctattccctcaacctgatcgccgccgttcccgcgccgatcgccgcgttcactttttcgccgtccaccggctatccgcccctggcggtgacgttccaggccgccgcggcctttggaccgaacggcgaggaggtcaattacgactgggtgttcggcgacgggggaaccgcctccggccgaaacgtcaatcatgtttaccaagcttccgggacgtacaacgtccgcttgacggttgccgacagcatcggccgcacggacgaggaaatcaagcagatcgtcgtcctcagaaccgtgccgctcccgccggtcaacctttcagcctcgatcgccatgacccggttctgggagaatccggagatcacgttcaatctctactgggcggccaacccggacaacatcgccgaacatgtcgacggctacgttctctacatgagggagaacgacggttcttacaaccggctgttgacggtttcatcgtccacgttctcggtttcgttcgccttcaccaatctccaggtcagccgatccttcgccgtcagcactctcggcaagggagggacggaaagcgctccggcctatttccaataagctcgcggaaagcgggatgaaccggcatgacccgcatatcgaagacggccggggcgggcggagcagcggcgggaaaaccgttgcgggttcagctcggctgttttgaccggtcggccgacgggtggctcaacaccgacatcactccccatatccggatcacccgcgtttttggacttccgtggcttctcttccgtttcggcctgatcgaccggcttcgcttggaccagcatcgggccagcgtgttttcccgggtgaaaaaattggatttgcgaaagacatttcctttcgccgacggggcggttgaggcgttcttctgctcccacgttctcgagcatctctacctcttccagacccgggccgtcctggacgaggtgcgccgatgcctgaagccgggcggcttcgcccgtttcgtcctgccggacttggacgcggctgtccgcctctatcgcaaggagaatccggacgatttccttcaggttctttttcaaagagattccccggcggccgaaaagaaccggcacaaatggatgtacacggccccttcgttcatcgctctcctccgagagcacggcttcgacgatgtccgggaacgaggataccgggattcggggtatccgcccttcctccccctggacaaccggccggaggacagcttctacgtcgaagccgtcaaagattgaaggagagtgctcatgccgttgccgctccgccgccttggacgatcggatctcctcgtgtcgcccatcgggctcggctgctggcaattcagccagcgccggggatggaacaagtactggcctaagctccccgagcgggaaatcgagggcatcgtggccgcctccctggacggcggcgtcaattggttcgacacggccgaggcctacggagacggcgcctcggaagaggcgctttcccgggttctccagaaagccgggaaaaagcccggggaaatcatcatcgcaacgaagtggatgccccttcttcgaaccgcggccggccttccccggacgatcgggaagcgcctggaatgtctcgctccctaccccatcgatctttaccagattcatcatccgggttcgttttcctcgacgcggaaacagatggaggccatggcttccctggtccgggagaaaaagatccgctgcgccggcgtttcgaatttcggggccaaaagcatgcgggcgtcccaccgtttcctggccgaggcgggccttcccctcgtctccaaccaggtatcctgcggcctgctcgaccgggccatcgaaaaaaacggcgttctggacgcggcccgggagctcgggatcacgatcatcgcctattccccgttgtcgcagggcgtcctgagcgggcggtttcacgacaagccggaacgtcttcaggagatttcgggaatgagacggtaccggggatattaccgtaagaacgccctgcggcgaagccggccggtcatcgacgccttgaaggaaatcggggcccgccacggggcgacgccggcccggacggcccttgcttggctggttcgtttttacggcgacaccgtcgtcgccattccaggcgcgacccgggcgtcccaggcggcttcaaacgccgcggcgatggccttcgatcttacttcggacgagctggaccacttggatcgcgtttcccgggatttctccttctagaactggaagtagagaaattcattgctcgtgtcggcggccaggatgatgatgaggcaaaggaacaaggcataggccgccgcctggagcggggccggaacccgccggtccccccagagcgctttccggttcatgatcaagacttcggccaggatgaagacggccaggattgatcccagaaagagaatgacgccgacgccccgccggggaagagcccacgaaatgtgcgacaggtaatttccggccgcggccaaggtgggggagcggaaaaagacccaagccagggtgaccaggctgaagctgaagaccgtccggaaaaatccccaggcccggccgctccggcggaggcgaagccgccgggcggttcttttccggacgccctgcgtcgcccgggaggcgacgagataaagggcgtggaccgccccccagacgatgaacgtccagttcgctccatgccacaatccgcagagcagcatcgtgaccgacatcgccgccaggtagaggacgaactcggttttcaggaagaggacgcggccggccttgatcttccgggacagggcgtaggagaccggaaggaaaaggtagtcccggagccaggacgatagcgagatgtgccagcggctccaaaattcggcgatgctccggctgaaatatggaaaacggaagttgtccatggtttcaaagcccagcatccggcccaggccgacggccatgtctgaatatccggagaaatcgcagtaaatctggtaggaataaaaaaccaggccgatgaccaatcccaacccggcgtaatcggcgggcgtctcgaagacgatgttcacatactgggccatccggtcggccacgacgattttcttgaacaggccccacagcaggagccggaatccgccggccgcccgtcccaggtcgaagcggtagtccccgcggagctgggccaggagaggggcggccctctcgatgggtccggccaggatttgggggaagaacgtgatgtacgccccgaccaagacgggatttctctcggccgagatccggccgcggccgacgtcgatgacgtagctcaacgccttgaatgtgtagaacgagatgccggccggaaggatcaagccgaggagcgctccggcttcgccgggacgaaacgcccggaggaggaaatccgaatacttaaagacgagaaggggcgcgaggagcgcggccagggccgtgacgaaaacgatccgccgcccgggccggtcctttttctccagccacagggcgaagccgaaggcggccagggcctctccggcgagaagaatcaggaatacgggccgcgcccagccgtagaaaaccaagctggccgccaggagaatccccggcttgatctttcggggagcggcatgatagacggctgcggacgcgagaaagaacaacccgaaggaatagctgaggaatgtcatgaccttgacctcggggggatttcttccgcgccccgtcgggcgaagaacgggaggacggcctcgacgagatttcgggtgaaccggattcgtccctcctcggacaaatgacaattgctccgggggccctttgtcgcccggaagagcgcggcgtcgttcagatcgaaccggtcgggccgattgaagtccaggacggtgacgttcttataagatccggccagcgtccggatatccgacttgtacttgtcctgctcgaaattaatggcgttcgtggaggcgatgtcggggaggatgacaagatacgccgggacgccgtcctcttccaggacggccagcaatttccgcagatcggcgccttcggcccccggctggggccggtaggggcggcgcggtgccggccggtccgtccgctctccggcgttcaatacgtcgacggcgtcggccccgtcctccccggcgacgtcccttgcccggtccagcttgatcacggcgccgaagaaatcgtcgatgtccggcttcttccggaaaagcagcgaaatccggctgaggagcgaggaggcctcgttgacggccccggcggggtttaaggcgtccgcccgcagttcgcggtccaaggccgcgagctcgttcagcatggattttttttcaaacatgaagtagtcgattccgtagaagacggcccggggcttggcggcgttctccttccggtgccggagataaaagagccgggaaaaacggggaaatcgtccggcggccgcgactttgatggtccgggccttgagccggtcggacatctggaactggccgaacgcgaaacgcgcccgcgaggacccgaagatcaagatgtctccgtttccctcgccgtagatcaccgttttgttcctgagggaggcgtccgcgtcccgggaggcgtaatacgtgttggcccaggacctcaatccgcgaagaagaagacggtcggatagcgtgaacgaaacggcgaagacaagggtcccaaaggccacccggaagatttttgtccggagggaatctcttgccggcatggcggaggcaagtataacgggagccccgtcctccgtcaaaccggcctgtccggccggcggcgggcgccgggcccgcttaccatctccagaggtagctgaccttgaagaagaagcctcgcttggtttccatgtaccgctcgctctcgacatattcgagcccgtcccaccggatccgctcgaaggccgagccgtaacccgcgtaaacgaccgtccccgggatgtacgtgaaggatgccaggaaatcggccgtccagcgcttgtaatacgtgttgtactcggcgatggcccggaggaagagatacttgttgatctggaaggtgttgtggctgcggacgatcgtgtagtcgtagatcttgaccttgtccgaccggcgggcgaagtcacggtagacgaggtcgagagcgaaggtcagctggtcggtcggctggaaggacaggccggcgctggcttggttcgagtctccctggtaaggatcgtcggggtcgtaataaatggatccccggtttcgataaaacaggttgagataaacctgtttggtaagctggctgtagaattgaaagccgtatccgctccgcccgaagcggcgggcctcgtacacctcgttggccagcatcccctcgaagcggacctgggtcgaccggggaaggaagaaccggaggcagaacatgttgaacgtctcgaacatgttcgaggtcgtgtcttggagatggtaggaccagtagaaggtgtcatacctctggatgatcttggactttgggtagaacatgaggattccgcaggccgccaagcgccgcagccccgtccgctcgaggaagcccgtgtccacctggaagttgcgggaaatgtcctggtatccgaaatcgaggtagtaattccgcgtgccctggttgtaacgaaggccgagggcgtggccgccggccgtttctcccccgtccggggccttggaaaacgacccgaagagatggaagtcggcgaaactgatcgggctcagccggaaccggccgtccgcgccgatgacccggttgaatccgccggtcacgtcccgggcggtatagtatccgccgatgaaggaatcgtccttcaaagcgtgcttgagccggaagacggagaaatagggatgctcatcgtcggctccgggctggttgtcgcgggcgaagatggcggcgatggaattggccgccccgattttcccggacagcttgaagccgtatgtcggatcgatgatcgtccgggtgtgaagaagggcatagaggggcgcgtcctcggtgtttccggcgaccgagaagatctcgtttccctcgaggaagaacggcctcttctcggggtagaagagggcataccggaggttgatgtcgacctggccggcgtccgactcgacctggctgaagtcgggattgagggccgcgtccaaggtcaggtcggtcgtcaagccgaccttggccgtcaagctgacgtcggtcgccctctcctctcttttcatcgttccctcgtcgacggctcttcggtcggaatgcgttacggccgggaggatctcgacgacgcgtttgaaccgccacccggtgacggcgatcggctgggtctgagcgagaaagctgctcttgtcggggtagacgggcggggcgctggccatttccgaggttcggacgatctggcggaagtaggccagccggatggtgatcgtcttgcccgaaggaaaccggatgctctgcagcgggacgcggtattcgacgatatagccctggtcgtcgagccggcccttgctgtcccagacgaaatcttgttcggcggtcaagttgccgtcggttgtcatgatgccgtcgccctggacgccgaggggattgaccaggaaagaatagccgttctgcatcgtgttgtaggtgtcgaccacgatcccgacgaaatcgtcggcgtacatgtcgtcccgcttggccagggtggccttgatcttggacggttccgtgtcatagcaccggaaggcgaagtagaggttgtcggcatcgtacaggaaatacgcctcggtcttctggctgggctccttgccgtagtccggctgaaacgtcttgaattccgacatggcgtaagccccgtcccattcgccgggatcgagcttgccgtcgatgacggggggcttggccgtggtggccagctcgagagtcgtcaaggcggaaagaaaaacgggaagaaaaacagcggtcaaggcaaccgcggtgatgagttttctcaagcgggtgttcatgtcgaaatcctccgtaaagcaaccgcgcggcaatcgtcgttgaccgcccgttcattcggatatacggtgcggagggaaaaaaggttcatgtcaaccttttcctccgcccgagagtctttccttctgtgagcttggaaaataacatgagaggatgtcatgaataatcgtttcttccgcatcggagccgctttattgatcctcggcgccgtcggacaggttctggccggcgcggccggcggtcccggcgtcaagaaatgcgcggcgatccggatcggcgaaagcgtcccggtcatcgacggccggctcgtcgattccgcctgggagaacggatcctgggaaagcggctttgtccaaagagatccctacgaggggcgggaacctacggaacaaacgtccttcaagattctttacgatgataaaaatgtttacgtcggcatccgggcccatgatacccgccccgacttgatcgaaaaacgcctcggccgccgggatcaagccggcggggacgtggttctggtcgctttcgacagtctccatgaccacttgaccgcttatgtcttctcggtcaacgccgccggagtcaaggccgaccagatcgtggcaaacaacggcctttccgccggcggcggggaggaagacatgagctgggatcccatttgggacgcggctgtttcctcggatgatcaaggctggtcggccgaaatgaggattcctctctcccagcttcggttcggggtcaaggacgagcaggaatgggggctccaggtccttcggaccctgtttcggaccaacgaaacttccgagtggcagctcattccccgaaaagcccccggctgggttcacctcttcggcgagctgggcgggctggcgggcctggccgcgccgcaccaagtcgaggtcatgccttacgcggtcggaagcctgatgtcctcccgccccgtcccggggaatcccttcgccaccgggcggaaccggaggctgcggagcggcttggacggcaaggtcggggtgacgagcgacctgacgttgaacctgaccatcaatcccgatttcgggcaggtcgaggctgatccctccgtggtcaatctgacggcgctcgagacgtttttacaggagaagcgtccgtttttcatcgagggccggaatcttttcgatttccggctcacgagcggcgacggcgatttttcctacgacaaccttttctattcccgccgggtaggccgctcaccccaggtcatgcccggggggcctggtttcgtcgacatgccggcggccgcgacgatcttgggcgcgttcaagctgacggggaaaaccaagtcgggattttccctcggcctcatggaatcggtcacgtcgcgggaatcggcctcggtttttcacgatgaggtttacaccgatgtggccgtggagcccctgaccaattatttcgccgcccgggttcaaaaggactggaacagcggggcgacggtcctcggggggatgatcacggccgtcaaccgggaggcggccggcggagcgttcgagactcttcaccgggccgcttattccggagggattgatttttcccacagctggggaaaccggaattattacctcagcttcaaggctgtgacgagccatgtccggggaacggccgaggcgatcctggcgacccagctctctcccctccgctatttccagcgtccggacgcgggatatgtcactctcgatcccaggcggacgtccttgaccggcacggggggcaatttcgagatcggcaagcagggcgggggaaactggacgtatgccgccggcgtgacgtggcgctcgcccgggctggagctcaacgacgccggctatctccggcagacggacatgatcatggcgttcgtttgggccggataccgggtcacggagcccttcgggccgttccgccgagtcaatgtcaacttcaacggttgggcgggcttcaacttcggcggggagaccattttcgagggcggcaacgtcaacctcaacctgaccttgaaaaatgaatgggaggccggtttcggctacaatccccaagggccctccctctccgcggcggctctccgcggcggaccgactctgtatttgccgggggggaaccacttctgggggtatgtcgggaccgattcgcgcaggaaggtccggttctccctttttggaagcgggggccggcgggggccggccgagatcgtttcttggagcatgtccccggagttgaccgtcatccccagctccgccttccaagtctccctcgctccgtcctattcccggaacgacaacgtcctccaatacgcgggaacgcggacggccggcggggagccgcgatacgtcttcgggacgatcagccaggaaacgctggccctgaccttgaggatgacctactgcctcacgccggacttgacgatccaatattacgggatgccgttcgtttcggccggcgcctaccgcgatttcaagacgatcctgaattcgcggtcccggatccccgaggagcggttccgcttgctgggcgaggcggccgtctatgatccgtccgcccggcaataccgggtggacgagaacggggacggaaccgtggattacgcgttcggaaatccggacttcaatgtccgtgaattccgctccaacctcgtcctccgctgggaatacactcccggctcggccctctacgtcgtttggtcgcaggggaggacgggatttcttcccgaaggctcattcgattacagccgggatttagggggccttttcgacacccacccggataatgtcttcctgatcaaattttcctattgcttccagctttgagacggccgtcccggagggaaggattcccttcccgccgggatcagggcgtttcctttttctttccgtccctcttgtgttcgaacaggtagtatacgaccggaacgacgaccagggtgatcagggtggagctggtcaaaccgccgacgacggcccgggccagcggggcctgggcttccgcgccctcgcccagggccagggccagggggatcatggcgatgatggtcgtcgcggccgtcatcaggatcggccgaaggcggcgatgaccggcctcgatgaccgcgtcccggaggcccatcccgtcccggcgtcgaagcaggttcgtgtagtcgaccaggaggatggcgttgttgacgacgatcccgccgagcatgatgcagccgatataagattgcatgttgaaggtcgtcccggtgatccagagcatcaggacgacgccgatgaccgccagggggacggaaaacatgacgatgaacggatcgcggagcgactcgtagagcatggccatgatcatgtagacgagaaggagggccagggtgatgctcaagaggagttcgcggaaggccttctgctgttcctcgtagtcgccggtgaagttgatcgcgaaattcgagggcgtcgggatcgtgcgcaaggcgcgccgggcgtcggccaggaccgagcccatgtcccggccggcgatgtcccccgtgacggtgacgacccgttcccgatcccgccgctcgattcggatcggcccccggcggggctggacccgggcgacgttgcggagactgacggcccgaccctcggaattggtcaaggtcaggtcgaggatctcgtcgatggacaggaactcggagtctttcaccttgaccaggacccggtactcgcgcccgccctcgcggaacgtcgtggcctgggtgcccatgaggatggtctggatcgtctgcccgatctgggtgatggacagcttctggtcggccgccgccttgcggtcgacgatgaacagctcttctggattccccaggtcccggctgatccgggtgtcggtcaccccggggagggcttcaaccttcttctggacctggcgggccaagtcttcggcgacgagaagatcatagccgcggatctcgatctggaggcgggccatcgagccgcctccgcgcatcatcatgccttgctggccgccggtggcccgggtccggatgatgacgcccgggatatcgctcaggtcgcggcggaggtcggccgcgaccgtctcgctggagcgcgagcgcttgtttttcggaacgagcttgacggtgaggttgcccgtgttcgaaccgctccgccagcccccgcctccggcgttttcctcgaggctgatcatttccggaaccgtccgccggacgacggccgacacttgtttgattttatcgtccatgaggccgaggcgcgtgccgacttccatctcgacgctcacccggacctcgccctcgtccgtcgccggcatgaactcgttacccacggcccggatgagcagcaggctgacgatgaggagaccgccggcgattcccagaatcacggccttgtgatcaagggcgtagacgagcaggcggcggtaggccttctccagcttggccacgacgccccgggtcgaccggacgaaggcgacgtggaatcccggggccgagcccggctcgattttctccacacggagatagcggctgcagagcatcggaaccaaggtcagggcgacgaagagagagacgatcagggagaagctgatcacgtaagccagctgcttgaacatgatcccggacatcccgcggatgaaaaccatgggcatgaagaccgaaacggtggtcagcgtgctggcgatgatcgccgagatgacctcttggcttcccaggacggaggcttggcggatgggcaggccgccttcgtgcaggcggtagatgttttccaggacgacaatgccgttgtcgaccatcatgccgacccccaaggccaggccgcccagggtcatgatgttcaaggtgaagccgccgaagtaaatcagggcgaacgtcccgatgatggaaatcgggatggccgccccgatgaccagggtgctccggatattgcccaggaagaacagcaggacgaagacggccagcattccgccgtagagagccgaggagccgacgttgttgatcgcccgccggatatactgggcgctgtcgctgacgacgatcagctcgatctggggcaggtcttcccggatcttggccaactcggccttgatgccctcggccacggcgacggtgttcttgccggactgcttgttgatggcgatccgcgtgccgggcttgtcgttgatccggacgacccgggtgatcttgcggaaggtgtcctcgatggaggcgatgtccctgagcaggatgggggaaccgttccgaaaagccacgacggtgttccggatctggtccaggtcggtgaacgcccccgggatccggagaagaatttcatagttgccccgctcgatctggccgatgggcaggtcgaggttttccctgcggatgacggacgtgatcgtgtccatcgggatccccagggccttgatcttatcggcctggaggttgacttggatctcccgctcgcgtcctccccagacgtcgaccgaggcgacgccggggacgcgctcgagccggtagacgatctgctcgtcgatgaggcgccgggttcggatcgggtcgagattgctgaggacgccgaccatgaggatcgggaactgggccggatcgaatttccggagcgtcggccggtccacgtcctcgggcaggcgcccgacgacccggtccagccgctcccggatgtcgtcggcggccgcgtccaagtccgtcccccaatcgaaggtgacccgcacgacgctgctgccttccgacgaggtggaaaaaacctcctccactcccggaaccgcgctcatcgcctcctcgatgggccgggtgatgagttcctcgatctcctcgggcccggtgttttcgtaggagcagacgacgttgacggtcggataggtgatctcgggcatcaggtcgacgggcagccggttgagggcgacgaagccgacgacgacgatgaccagggtgatcatcacggtgaagaccggccgccggatggagaattcggaaatggtcatcgcgttgctccgtggggcttgccggccggatccgcggccggcggcccgcccccgtttgcctgcggcaggatcaggccgaccccgtcctccaggagatgctggccgagggtgacgacctgcccggtcagcccggccggttcgacgacctccgcccattccccggaaacgatcccggtcctcaccgggacgaagaccgccttcctcgtttttaaatcggccagaaaaacgccggccgctccggcgcgctgaacgaccgcgctgagcgggacgatcgtcgcctccgcccgccggtcgtactcgatttcggcggtgataaacatccccggcttgaggaggccgttcggattctcgatctcgatttcgacgcgggcctgccgggacgtttcgttcagcaggggcgacatccgggcgacccgcccgataaaggccgtgtcggggaacgccgtgctcaggatgttggtttcctggccgggctggaggcggtaggaatcccggtcggtgacgaagatcacggccgtgatggggtggagctcgatgatcgacaggatcgcgccgttggccgggagcatcgatccctcggtgacaaagcgttcgccgacgtaccggaccgcgcttccccgctcccaggcggcctggatccgggtataagacagccggaggcgggccgtttccagggccgcggtccggttggcttcctgggcctgggcgacattggaccgggcttcctgggcttcatactgggcccgggcggcgtcgagctgcgaatccgattggatgcccttggcgtggagcgacttggctctttccaagtcccgcttgaccatctccagggagcttttcgcctcggccaggttggcttgggcgacgcggagatcggcctcggcctgggcgacttgctggcgatactcatcgtcctcgagaacggcgaccagctggccctgccggacggtgtcgccgatatcgaccagaagctgcttgatccggcccgagattttgggagcgacggtaaagctcgtcttggggatcagggtgcccgagaacaagcccacgtcgcggatcggcccgcggcggatcgcggcggtttcgacggcgaccatgacgttccggggcccgttctgcgggcctttcttggcgaaaaagacttgataagcgccccaaccggccgcgatcaggacggcggccaaggcgattttcaccgggagcttggcccggcggaggatttgaaaaaacgattgtttaggcatggcggatctcgcttgggaattggtgtcgtttgacggtttatcggtcatgggaggaacagtcatctctccgccggcccgccggattccccgggaagcgggacgcgctccatctccaagcctttgccttgggcccggtagaggccggccagcgaaacattgtaatcgacgacggccttcagttccatggtcagggcgttggccaggtcccgctggtattgaaggatgaaataattggtgctcagcccgactttgagcttctcctcctcggcctcgagcttcttggccgcgttttcccgggcgacccggtaggcctgaatccggaggtaattggtctcgaccgcccggacggcggtccggatatcaaggaaaatctgttgttcctggtttttcatccggagctgggcctgctcgagagccaagtcggcttgggccacgaacgcccgggaaaagaccgtgctcagggggatgttcaagctcaatccgagagaccagttcttgtacctgaaatccatggcatccttcagggcttgaccgccgccggccgggacgaccccgatgatcttgcccgataaggcgttgttgttctcatagatgatttgcgttcccgagatgcccgggctccacagcgaagcctgcaggcgcagatcgggcgccgtctggttccgggcgtagctgaggttgaaccggctcgtttccatgccgacccgggccgcctggagatcgggacggttctcataagcttcgcggagagcccggtcgagatccacgtccggcttggaaaccgacggcgaatcggtcgggatgatgtggagggaggcggcccgcgtattctccgcctcgaggttcatcagggttttcaagaggtcctcgctgttgcggaccatggcctccgcctcgagaatatccgcttcccgggtggagacgtcggcttgggccgtcaagatttcgatggggggcagggtgccggcttcgatctcggctttatttttttccagcagctcccgggccaatttcaaggattgccgccggacattcaaattttcccggctatacacgagattccaataagcgctcttcgcccggtagacgtattcctccatcgtctcgctgaggttgtattcggacatgtcgcggttgttccgggccaggatgaactcccggcggctcattttccagccgaaatccttgagaagaggctgggaaaaattgaaccggagggtgctgccgaagcgcgggttgatggtttggaattgccgggtggtatccgatttatagccgatgaggctcatggagagggttcccccggtcggaagaacctgggaaaattgggaggagtaatcattttgcagcgtggagacggccgccccggcggcgtccaggaatgaatacgaggcggagatattgtcctgccggctgtaggaaagagccagcgaggggatgaatttctctccggccaaggcgaccgcggcctcggcgatttgcggcgtgagaacctcggccgccaggccgaggttgttgttcagggttttctggatgcattccggcaaggacaaattcagattctccccttcctggaccgccggggccggcagggagaggaccgccagaagcagggggatggctgcgcgggtagggcgtttcataatccgttaagacctccaagatgaatccggcccgaaggcgaggtaaaaaccaaccttcatattttagacgaaaagagggccgttctctttccttttttttctttttggataactgattgatttaacgtgagtcttgcggaaaacaaggcttttcggaaaagggagaaaaagcggctcttgaccgggaacaaactcttttccggtctttttggattataatgacaacatgagcaccgcagaggctggagtgttgctcctggccttggccggcttgtttttttccggcggggggccggccccgggccgggacgagaacaccgtcttcgcccggcgccgccaagccatggtcgccgggcagctcgcctcccgagacatccgggacaagcgcgtgcttgaggcgatgggccgggtgccgcggcacctcttcattccgccggagtcccgggagctggcctacgaggattttcccctgccgatcgaagaaggccagacgatctcccagccgtatatcgtcgccctgatgacccagtgcctggagctcaggggcggcgagcggatcttggaaatcggaaccggctcggggtaccaggccgccgttctctcggtcctggccgcgaaggtctataccatcgagtatcacgcctccttggccgggaccgcggccgcccggctcgccgagctggggtatgccaacgtcgaggtccgctccggcgacggatttttcggctggccggaagccgctccgttcgacggcatcatcgtcacctgcgcggcccggcgcctgcccaaacccctgttcgaccagctgaccgaaggaggccggttggtgatccccttgggccgggccgccgatgtccagcggctggtccgggtgcgcaaggtcaaggaaaagccggtcgaggaggaaatcaccctggtccggttcgtcccgatgctcggcgccgataaaaacaagagataaagaacgatcatccccgcaacctttagccgggggaattcgtaatgaaaagtgagcgtatccttccatatcccaaaggagagatcatgtccaagaagtcgtggatgttcgctttgttgttcagcgtcatcgccttgtccgtcatcttcgccgagacgacggaagcccgtctcctccggttcccggccgcgtccggggaagcgattgtcttcagctccggcggggatctttacaccgttccgctggaggggggcttggcccgcaagttgacaagccatccgggttacgagatgttcccccgtttttccccggatggaaagaccatcgcgttcaccggcgaatatgacggaaaccgcgaagtctacgtcatgccggcgggcggcggcatcccgcgccgcctcacctatacggcgaccctcggccgcgacgacgtgtccgaccgcatgggcccgaacaacatcgttatgggctggcggcccgacggccggagcatcgttttccgcagccggatgagggaatgggacgatttcatcggacagctctatgtcgttccggccgagggcggcacccccgtcgcgcttcccctgccgcgcggtggcttctgttccttttccccggacgactcgaagctggcctacaaccgcgtcttccgcgaattccggacctggaagcggtacaggggcgggatgaccgacgacatctgggtttatgatttcgagacgaaaaagaccgaaaacatctcgaccaacgaggctggggatatcttcccgatgtggagcggagagacgatttacttcctctccgaccgcgacgagaacaagcggatgaatctctatgcttacgacgtgaagaccaaagaaacgcgggccttgacgcgcttcgccgatttcgacatcaagttcccgtcgctcggcccgacggcgatcgtcttcgagaacggcggattcatctaccgcttcgacctggcctcgcaaaaagcggcccgggttccgattttcatcgaggatgaccaggtttcggcccggggacggatcgccaatgtcgcctcgcgcgtcacgaactacgaaatctcccccgacggcaagcgggccctcttcggcgcccgcggcgagatcttcaccgtcccggccaagtacggaaacacgcgaaacctcaccaacacgtcggggatccacgagcggaattccaagtggtcgccggacggccggtggatcgcctacatttccgacgcctcgggcgaggacgagatctacctccggccccaggacggatccggcgaggccgagccgctgaccttcaaggccgacacctacaagtacggattcctgtggtcgcccgacgggaagaagatcgcctggacggacaagctgttccggctccagtacgtcgacacggcgaccaagcaggtgaccgtggtcgaccgggccgcggtcggcgagatgggaccgttcacctggtcgcccgacagccgctggatcgcctttaccaagccggaagccgagggaatgccgaaggtttatcttcacggcctcgacggcgggaagacggccgcggtgacggacggctggtactcgagctatgagccggcgttcagcggcgacgggaaatacctcttttttgtttccgaccgggatttcaatccgcaactgagcgagatcgagttcaattattcctattcctcgatggctcggatctattgccttcccctggccgccgacaccccgtctcccttcgccccgaagagcgacgaggtcgaaatcaagaaggccgcggaggcggaaagcccgaagagcggagccaagggaaagccggccgagccgaagaagtccgagccggaaaagccggccggcgtcacggtcaaggtcgacctcgaaggcctgaaggaccgcctgatcggtctgcccgtcgaggcggccaattacggcggcctggcctccgtcggggataaggttttctacttgaaattcagccggggcccgggcggcggaccagccttcaaatcctacagcctctccgaccgcaaggaaagcgacctgggccagatcgacggttatgagatctcggccgaccagaagaagatgcttgtctcccagggccggtcttacgccatcatcgacctgccccaggggccggtcaaaatcgaggaccgactggatctctccggcatggacatggccctcgacctcaaggcggaatgggagcacattttcctggagagctggcgccagatgaagtacttcttttatgcccccaatatgcacgggcaagattgggatgccctgagagagaaatacctgcccttggcccaggcggccggctgccgggccgacctgacctatgtcatcggcgagctcatcggcgagctcagcgccggccatacctacgtcggcggcggcgagatgcccgatctgcccaaggtcaaggtcggccagctgggcgcggttctcgtcaaggacgcctcgggatatttccgggtcgacaagatcctgcgaggggagaactgggaccgctcgctccgctctccgctgaccgagcccggcgtcgacgtcaaggacggggattacatcctggcggtcgacgggcggccgaccaaggagatgaccgacatctacgcctcccttctgaacaccgtcggcaggcaagtcaccctcacagtcaacgggaaaccggaggacaagggcggccgccgggtggttgtggtacccgtcgccgacgagcagaagcttgtctattacacctgggtccgggagaacatcgccaaggtcgacaaggcgaccggcggcaaggtcggctacgtccacatcccgaacatggggctggacggattgaacgaattcgtcaagtattactatccccagcttcgcaagaaagctttgatcatcgatgtccgcggcaacggcggaggcttcgtttcccctctggttttcgaacggctgcggcgggaaatggcgatgatcgaaatgggccgcgacacgatcgcccggcctgatcccggcgacgtcctggtcggacccaaagtctgccttttgaacgaattcagcgcctccgacggcgacatcttcccctaccggttcaaaaaagccggcatgggcaagctgatcggaaagcgttcctggggcggcgtcgtcggaatccgggggaccctgccgatcttggacggcggcgtcctgaacaggccggaattcgccccttataatatggagggcaagtggatcatcgagggcgtcggcgtggagcccgacatcgtcgtcgacaatgacccggcccgcgaatacgccgggatcgacgaccagctgaacaaagccgtcgaggttattctcgaggagctcaagaccaaggaagtcacgctgcccgggattccgccctaccccatcaagaaatagcggcccgccgttccgcggatctcgtttccgccggagcccggctcttcggagccgggttccggcggctttttcgaagccggcccgacagagtcggcgatcctggccggcgcctcgcgaggcacggcggcgggaggaaattttctcgtcagacggggactcctctccctcggaaaggagctgaacccgctccgttccaaggcggaaatccaaggggggaggctcccgcgtccggccttccggaacggttcttggaagccggagcgcggttggatggcagccgatcagcccggccgattcaggcggagcttctcgaaagaacgagctcatcaccgggactcgttccgccggttgacttgccgtccgcccgaacatatgatgctgtgcgtgaaggatatttccggctcgacagacttaaccggaacagacctcaagcattaccgcatcgaggcgttcatcggccaggggggcatgggcgtcgtttaccgcggccgggacacccggctcaatcgtccggtggcgatcaagctcctgagtcccgccctggtcgccagcgccgaacggcggaaccggttcgtccaagaagcccgggccgcggccgccctcagtcatccggccatcgctcaagtctatgacatcgacgaggtcgacggttgtctgttcatcgtcatggagtatatcgacggccggtccgtcggccggctgatcgccgatcgggagttggatctcttgagctccgtcgagatcgccttccaggtggtcgaaggactggaaaaggcccacgaggccgggatccttcaccgggacatcaagtcggacaacatcatggtcacgcgcgacggccgggctaagctgcttgacttcgggctggccaagctgatggaaccggctccggccgcatccgctccgccgtccgatcctctccggaccttgaccaaggacgccggccggaccttgcccggcctggtgatgggaacggtcccctacatgagcccggagcaggcccgggggcgggacctcgacgtccggagcgacttgttttctctcggcgtcgttctctatgaaatggtcacgggcgagctcccgttcaagggcgaaacgccgctggacacgatgcacgccatcgcctacgaggaagcccggccggtgacggtcgtccgccgcaatcttccgccgcaggtccaccgcatcgtctcccgctgcctccggaaacggccggaagaccgctatccggacgccgagaccttggcctccgatctgaagcggttcaaactcgacctggaatcgggaagccggacggaccttcggccgattgaacgcttgcaggcctggtttgaccggatgataagctccgtgccgctgggagccaagggtgtttggatcgtcgccggggtcgtcgttttagcggtcctcctccttttcacgagcttcaattggggaagcctgatcgccccggccgttatcggcgttttcctttaccggggaattcggaacaggaaaaagcggctgctggcggacttcgccaaaaaagtctcccggatgccctccgtcgaggccgtcattttccacgacggcaagatgacgacggtcgtgaaggacgctccagcctcggcctttgtccggatcaccggcctcatcgaggagatgaacggaaagctgtttttcggcaagcccgtggcggccgagatcgcgagcgatctccccgcggaggaatttcaagctctcatccgccggctcggcgtgctgtatgtccggacggagcggcccggagaaccgcccgcgggcaagcaaggaaaaaacaaagaccattctttttcgggaatgaaataagcggaaagagaggatgagcaaaaggacgagatgaatccggatccgcggacgatcggcgacgttctcctccgcagaaacgccgagaactcggcccggttcgatgcctgtccggagaacatcctcaaccgtatcctctggcacgcggtccggggaagcggcgcgccttatccggcctgggcggtctcggcggagcgggaagacgggaagaagggggctccgaccagatgaggagtgtttttcctttgtttttaagtataataataaaagggccggccgccgggccggagccggcggaaaaaagaatgggagggacaggatgaaaagggaattcacagccgcgtttctgttgacggtgatggccgtttcttgggccgccgccgctccgccggcctccgatatggatatttggaaggaattccttcagctgctcaggtcgggaaccctgacggtcgactggattcatccggatgatccccggacccgggaatcgcggctgacgaatctgctggattggaccaaggacgaagattggtcggaatggcgggccactccaaaggtcgtccgtcaagacaatctcgtttcgttcatcatcgaggtggggaaaaagcgccgagctccctggacgtatgtcttttgtttcaccgtcgaagggggccgctggtattaccgattcgtcgagggcgttttcctccggctggatcaagtcgtgtcccttccggccgacgcctcctcgttccccgacctgtccgaggaacggaagaactggatgcggcaggaaatctattggacgaagatcgtcgggctgttcaccgagatgacccgcctcaaggggacggaatacgccttgggatttctccgggacggggcggaatacgtccaggcggcgacgtcctggattccctattttcccgcatcccgggcttttatcctttacctctgctgggagcaggcgaggatgcagggaaacaaggtcgttctggaaaagctgaccgatcgcgaagcggtcgtccggttcgacgatcatcaattcttcgcgctttacatgcagacatcccatctccgggagcaaatcgccttgggggattacatgggcatcttcgaggcgatctggcaggatcgggcccgggccgcgggctggaatctccagatcgacggacaaggcccgacgatttatctgcgcttcagccgttagaggcgcggggggccggccgaaggactcgtcttttccattaaaagcgatcgagtcggccgcctctcttgggagccgggatcgtccttgatccccaaatccgcgatcgtgatcgcaactccgggcggcttgaaatacggcccggggcgtcataagataggccgcgaccggaacgtttgaaaaaaaccgctgtttcccggaggaccgtgatgaacgcacgccggctgaacgccctgatcctggccgccgctcttctttccccggctttgtccgccgcgacccgcgatggccggaatttcgattgttacacgattgttgtcgggaaggccgcttcggccgacgggtcggtcctcctggcccataacgaggacgattggggcgacaatatcgtcaatgtccgccggattccgccgggcgattacggccgggagaggaatgtcgccctcggccggggagcccattaccggacggacggccggacggcgggattcctctggatcgaggtggccccccaggaatactccgacagcttcgtcaacgcgcatggagtcgtcctcgtttcggacagctgtccgacccgggagacggagagcgatctgaccgacggcggcatcggttacatgctgcggaggatcgtcgccgaaaaggcccggacggctcgggaagcggtggccctggccggcgcgcttatcgaacaattcggctaccgggattccggtcgcacctatgccgtcgccgacgggaacgaggcctggctgttggccgccgtccggggacgccgctgggtcgcccagcgggttcccgacgacgaggtcgcgatccttcccaaccacatgacgatccgccgggtggacttgggcgattccgtccgcttccagggctccgccgatcttgtgtcttatgccgaagcccgcggctggtacgatccggagaaggacgggccgtttgattttaaaaaagcctacacccgtccctcgaccgaccttctggccgaccacaatacccttcgccactggcgggggcttgagctgctgaccggccgggaatggcccatcggcgagaattatccgttttccgtgaagccggcggaaaaagtcaccgtcgagcggctgatggcgattctccgcgatcaccacgaaggcacgccttacgacgccacggatggatacaagaccggttccccgaaccgcgcgaaatttcggacgatctgcacggcgacgacggtcacgagcctgatcgcctccctcgacgcctcccgcccgggaccgctcgcggcttccctttggctgacgctgggaaaaccggatacgacggtcttcctccccttgtacggcgccggcggagccctcccggccggcttcagcctgggtccccaaacgcatgacgacgaggccttctaccggcagcatttcgaggaggccgggttcaaggcggctcgagggatgctcctcaatacccgcgtcctcgccgtggaaaaagccgtggaggctgattacggggccaagatcgaggccgtgcggaagggaatcgagattctcgagcgctctttccttgacggccggagcgcgttcgaagccgccctctccgcccaatacgcggtcaacaaggccgaagccctaaagagcgtcgacgattacgtcgcggcggcgttcgaccgggcggctgagatgacggagaggctggccaaaacactcggcctcccaagtgtcccgtctcattagaatcttttccgtgatttccgaggagacgggacacttccaagggggagtcaagctcccccttcggcgcttcgctgaacccctgaggagagccgtgccgcccccctcaaactcccccggcggcgccgcgtcacgatgaggggggatccggcgtgttttttccgagacgcgaggctacgacttgaccatcgtcaggagcatcttgaaccgctcgagagcctggacggcgtgggggatgtccgccggcatgaggatggccgccggggcggagagcggatattcttccttatctatgatgacgagggcccggccttcgatgatctgaacgaaggcgtcgaagggagccgagtgagggctgagcttttggcccttgtcgaaggcgaagagggtgaccgtcccggcgtccttgtcgatgatcgtccgggagacgatcgcgccctcttggtagtcggccaatccgggaagatcgagcggcccggccgtcaattgaggatcggagcctttggattttttcatttcgttctccttaaacgggggacgaagtcccccaaaaactaccacgaaagggtggacaagcgcaatggattcgaagagccggggccgcttcccccgggggcggggttgtatcgcctcgagtgaacgatcccgattaacgcgtttccgcggggaaggaccttcgtctcggctcgatggggggttgatccttcagcgacatctaatggaattcagcgggcggggctgcgccgcggggattaatgtgcgataatgcgggagagaatggccggaaacgaaaggaccgccccatgagcgcagaggagacgaagctgatcgaagtccgccgggtttggggactgaccgaggccgacatcatcaaggcttttctggaaagcaacgggatcgattgcgttttccaaggccgcaacgttctcaccgtctatccttttacgacggacggactgggcgaggttcggatcatggttaaagatgaggatttggaggcggcccgggccttgttggaggaaaccgatcttttttccgaatccgaatagggaagcgtcctccctttgaggaggcggccccgttgcctcaataccggtaatgatcgggcttgaacggcccgtcgaccggaatccccaagtatcccgcttgcttttccgtcagcttcgtcagccgcgcgcctatcctcccgaggtggaggcgggcgacctcttcgtccagtttcttgggcagcgtgtgaacgcccaaagccggcttttccccggccagccagatctgggccaggcattggttggtgaagctgttgctcatgacgaagctgggatgcccctgggcgcagccgagattgaccaaccggccctcggccaggacgatgatcgaccgccccgatttcaacgtccagcggtccacctggggcttgatgttctcccggacgcagccgggcgtgttttccaggtaatgcatgtcgatttcgctgtcgaaatggccgatgttgcagacgatcgcctcgtccttcatcctctccatgtgagctccggtgaggacgtcgcagcagccggtcgcggtgatgaagatgtccccctcggagaccacgtcgtcgagggggacgaccgggtagccttccatggccgcctgcaaggcgcagatcgggtcgatttcggtgacgatgacctgggccccgaagccgcgcatggattggacgcagcctttgccgacgtctccatagccgcagacgacgactttcttgcccgcgaccatgatcccggtggcccgcttgatcccgtcggccagagattcgcggcagccgtagaggttgtcgaacttggacttggtcacggagtcgttgacgttgatcgcggggaagagcagggacccctcggcttgcatttgatagaggcggtggacgccggtcgtcgtttcctccgagacgcctcggatccgggcggccgcggccgtccaacgcccgggggagcggcggacggactctttcagccggtcgatgacgatccggagttcccggttgtcgtacgtccggtcaagcagggaggaatccttttcgaccttgaccccccagtggacgaacagcgtcgcgtcgcctccgtcgtcgacgatgaggtccggaccggagccgtcgggccaggtcagggattgttccgtgcaccaccagtactcctccagggattcgcctttccaagcgaagacggccgccgatccggcctcggccacggccgccgcggcgtgatcctgggtcgaaaaaatgttgcatgacgcccagcgaaggtccgcccccagctcccggagggtctcgatcagcatggcggtttggacggtcatgtgaagactgcccatgaccttcatgttccggagcggcttttggcttccgtatttctcccggacggccatcagtccgggcatttccgcctcggccaggcggatttccttccggccccagccggccagggacaggtcggccactttatagggaagcgaccggtccaggggaagaacggtttttttctcggtgttcatggcattctccttgagcggtgaagccggggtcatttgcgaccccggaaaagaaggattttcaagcccgtgggaagggagagggttgttttcgtccggacggacagaccggatccggtcagccaatcctcgagagtctgaggttcgaagccgagccagcggtcttgaaagcgggtgcggagcgtttcgtcctggtgggcgctccactcgacgacgacgagcgtcccccccggcttcaagatccgggcggcttcggcgaggccccggccgggatctggaagatgatggagggccaggcacatcagggcgcaatcgacttcgccgtcgcggaggggcaggctctccagctcgcccatccgaagctccaggatcccccggcggctgtcggacaggtggcgccggcgggcttcctccagcatgcgcggcgaccggtcgaccccgatcacccggccggctttccggcgcaggacggcgaagagatcgccgctgccgcatcccagatcggcggcgacctcgccgcgcgggacatgccggaggagcaggggatccaaggccgcgtccccgatcagggcgcgcttcatctccccccaatccccggcgatcgcgtcgaaaaaacgccgcgattcccggttccgatcctctaaaattttacgggcccgggcgaggtcccgggcgaaaataccccgatccttttcgccgatcgccgcggcgaaccgggcggccgggccgtcggccgcggtccggtaaaacgtccacattccgtcccggcgggacgtcaggaggccggcctcggccaggatcttcaggtggcgggagacgcgggattggcccatccccagggtttcgacgatttcgttgacgttcagctcgaacgaccggccgagctgaaacaagcgcagacgggtttcgtcggccaaagccttgaggctccgcagcgaatcggacgtcttcccgtctttcatgcttttcaatatatcaagataaattgatattgtcaagggtggggatccgcgattttgcttgactcgaggggggggatgagtagaatgagcggagtaaagccggatcatgttttttcttggattattcgcgggctgggctttccaggcggccctggcggccgccccggcgccggtctccggaggcctggctcccgcgcctttcttctccgccctggcctcgcccgcctcgcttctcgatctggacgacgacgctctgcggcggcgcgttgaggaaaatcccggttccctgggctcgctttcgctcggcacgccggacagcgccgtggttatcaacagcgtttccctgccggccgatccgcgctgggaattccttccgcgggccgagtgttgggcgacggcggaaaccgtggaggcggtgcgggcggtcgtggccaaggtccacgaagcctttcccggcacgcccccgatcgtcatcggcgacatcggcgatcccgacggcggccggctcaagcgccatgcctcgcaccaagccggccgggacgtcgatttcggatttttttacaaaaccgggacggcttccggttttcctgttggaaccgcggcgacgctcgatctgccgcggaattgggccttggtccgggccatcctcacctgcacggacgtggaagtgatttttctcgacacggggatccaaaagctcctctacggatatgccgccgccatcggcgaggataaggcctggctcgaccgcgttttccgctatcgaaagggatcgtcctcggccgtcatccgctacgcccgcggacaccggacccattatcatgtccgtttttacaatccggtcgcccaggagctgggccggcgcgtctacccgatgctggtccaggcgaaaaagatcaagtcgccggttttcacggtccgccatgtcgtccgggacggagagacgctcggccatctcgcccggcggtatggaacgtccgtccgggcgatccagcaggccaacggcttgtcgtcgtcgatgatccgggccggccggtcttaccgcatccctctcaagggcgtttccgcccccccggtcaagcccctgatcgtcccctcgcgccttcttcccccctcggttccggatgttctagccgccgcgtcttggccgtccgccgcggcgttcgaccggcaggcgctcctcaagctgatggaggcggcgatccagggcgcggccgtcgtccgccgggtctaacggttccgttgcttcggaatcggaaaatcgtgtttcgccaggtaatcgcagaaaaagcagcggtcttccgttttgcccggaaacgatgatccctgggcttcaagaagctcccggatggtcgccaggcccgtgtcgaagcaagctcggacgacggggctggcttgggcccggcggagaagctgccgatacccgtcggccgggatgcggccgatgatcaagccgccgttttcattggcgaatccgcagcagacggcgaccgccccgtccggatggacgtaaaaaacgtttccgggtccccggcagaagtcgtcttcgaaccagtgttccgcggtccaggcgttttcctcggccggggccgaataggggacccggatgatgtcgatcgccagggcctcaaacgggccgtctgccgtctcccggggattcatgaacgcgtcgttgacgatcgaataggggattccctcgtcgatgatcagccgtccgtcgaaccgttcggccagtctttcgaaggtctcccgaggctcggccccgtcgggggggatgaccgtgacgatttcacagccatcccgccggccccagacggagaagacggtctcgaaaaagagcgtcagatcccggatgtcctggtcatggtaagcgtcgatgctgactccgaatttcccgtcgaacccggcttcccgcagcccggtcagagtccggcggagatgatcgggcgagtcgaaccagacgccgttggtcatcaaccgcccgaagagcatgtccatctcgacggccgcccgcgagacttcgttgaggaaatccggacggaggaaaggctcgccgccgctgaaaccgacgcgctccaggccggcggcccggcacgatttcatgaaggcgacggcgtcgcgcgcttccaggcggtcggggatccgggtgacccggcaatgggggcaagcgagattacagtcggccgtgggcgcgaatatgatttcttccggtttgaacatcaggctttggaggcgtagagacccgtgcgcgtgtccacgcggatcaaatcgccggtttcaagatactcgggcacttggacggccatgcccgtcgacaggacggccggcttcgtccgggccgtcaccgagccgcccttgaccgaggggcgggtctcgacgattggaagggtgacgagcgtcgggagctcgagccccaggatccggccttcggaggacaaggccaagacgccctccagcccctctgtgaggtaaggccactcctcctcgatctcttccttggccagggtgaattggctgaaatcctccaaatccatgaaagagaagctcaaggcgtcgccgtaaaggacttggacgggccggcgctccagctcggcctcgtcgaaaaggtcgtctccccggacggtcacgtcggttttcctcttggtccgggcgttgcggaagcggaacttatagagggtcgcggccccgcgggcgctcggcttctggacgttgacggtttcgacgaggcaggggtcgccctcgattttaacgacgttgttttttttgagatcggaagccttgaacatgccgaaagattttaccatgttcagccggccggcgccacagagttctcgcggcttgggaaaaaaaagccccgtctcgccgtccagcttcttcgatgggccgaacggcggaacggggcttccggacgccggtcaacgtgcgcccggaacaatcctcaggaggcggccgtggttactgtttcggggggacgatcgcgtccttggccgtcttggcgatccgcattttcacgacggtcttggccgggatgttgatcgtcgcgccggtggccggattgcgtccgacgcgggcgttgcgcttcaccaggacgagcttgccgagcccgggaagcgtaaagcttccggctttcttggtttcggcgatggccaaatcgacgagttcctcgaggaattcgcccgcggctttccggggcatctcgaacttctcggcgaagtgggcgacgatttggcttttggtcataggtttcttcggcatggtccttcctttcaccgggtgaattataagacggcggaaaatatactctacatcgaaatgaatatcaaccctcggacgaaatttccccgtccgacggctggcgcggccgggcggccgcgcatataataggcggcatgatgtcttcgacaaggaggatggacgaaggagcccggatgcgccggacgtttgccgtatcgacggcccggctgcggatcatgatggaggccttccgcggcgagatgcgccggggcttgaacggcaagctgtcctccctgcggatgcttccggcttatgtcgaccgccccacgggccgcgagcgggggacgttcctggccctggacctcggcggaaccaatgtccgcgttcttcaggtggatcttccgggagacggacgtctccccgtctgcgccgaagatcggtttgtgttgagccgggacaaggtgacggccgacggctccgtcctcttcggggcgctggcccggttcatcggccggtttctccgggagcggagactctccggccggctccccctgggcttcaccttttccttccccctccgccaggcgtcgatcgccggcggcgagttgatcgcctggaccaaggggtggacggccgaaggcgtcgtcggccgagacgtcgccgccctgctcaaccgggccttggccgccgaaaggatctccggcgtccgggttgtatccctgaataacgatacgaccgggacgttgatggcccgggcctacctcgatccggattgcgacgccggatgcattcttggaaccgggacgaacatatgctaccgcgaacggacctcggaaatccgcaagcccgtcggcccgcacggccgggatcacatgatcatcaacatggaatccgggaatttcaacgccgtcctgccccgcaaccgcttcgacgtcctcttggaccgctcctcggcgaatcccgggcttcaggcggaggaaaaaatggtttccggaaaatacctcggcgagctggcccgtctggccgtcgtcgagctgtgcggccgcggccggttgttcggcggacggcttccggaaatcttttcccggcgggaggcgtttggaagcgaacgcctctcggagatcgagaaggacgattcggcttcggccgacggcgtccgggagttcctttgggattggggagcccgtccggcggccgccggggacgcccggcttctgcgggatgtcgtccgggccgtctccggccgggcggcgcggttggcggccgcgacgctgggggcgacggtgacgaaaaacgacccggccttggaggcgaaacactcgatcgccgtcgacggaagtgtttttcataaatatcccggattcaaggccaggatggaggaaacgctccgggagctgttcgggggccgggggggccgcatcgctctcgccccgatgcgggacggatcgggattgggagcggcggttatcgccgcggtcgcggccgagtcggccaaaaccggcggaaagaagcccggcgccggctggtgagcgctcggcgaaaagacttgtttcaagcccaaaaaaatcgcttgcttttattttttttctgtttatgatattagcgtcgaaaaaaggaaggggcacgggccctgttcggctgtatactcctctcctttattcgaacaaatccaagggacgtccggagtgccacccggacggagccctcgtcaaaggagacgagtatgaatatctatgttggcaacctttctttcagtgtaagcgaaaccgatctgcgcgaagcgttcgccgcttacggccaggtcgcgaccgcgtcgatcatcaaggacaagttctcgggtgaatcccgcggcttcggctttgttgagatgccgaccaaggaagaggccgagaaggccattgccgccctgaacggcaaggacctcaaaggccggacgatgacggtcaacgaggcgaagccccggactgatcgcccccggacgggaggcggcggacgcggcggcttcggcggcggccggcgcttctgattccggttttgtcgatgtcgttccggcccgggccccgggccggatgtccctaagacaacgaagggcggttcttgggaaccgcccttttttttatttgccgccgggcgcgtcttccgagaccggcggaaaggaggagtaatggcgaaaagcagccgcgcttataaaagcgccaaacgaagcaaggagctcgaccgcctgcgcaagcgggaagagaaacggcggcgccggatggcggtgaaatccggaggagccgccgaggaacaggtcgcttcagccgaaaccgcggcggagcagcccgccccggaggaagatcccgatcccatcatcccccgggactgacgtcctcaaccgtttccgcgtttcccgtcccttctcgcgtcctttcggcccgcctgggacggaaggcctttcggtttcattcggacgcctctatcggccgcgcgcgtcccgtcattcggccgggacgccgcccgcggccttcgcttttcctttgacatgaaccccggttccgcgctatcgtgaagcgcgagcaaggagccgtcatgcccagcaagccgaagaatccccaccttccgttcggggatcaacagaccgccccctggtacgggaagaatatcctctccgtcaagcagttctgccgcaacgacctggaatatatcttcagtgtcgcccacgagatgaggacgatggtcgagcgggtcggcacgttcaacctgctgaagggaaaaatcctggccaacctgttttacgaaccgtccactcgaacctcctcgtcgttcatggccgccatggagcgcctgggcggggccgttatccccatcagcgaagtgaaattttcgtcggtggccaagggggagagcctcccggacaccgtccgcaccctgggctgctatgccgacgtgatcgtcttgcggcatcccgaaatcggcgcggccgccctggccgccaagtatgccggcaagccggtcatcaacgccggcgacggggcgggagagcacccgacccaggccctgctggacacgttcacgatccgcgaggagctggggcgtctggacaacctcaacgtgacgatgctcggggatttgaaatacgggcggacggtccattctttggcccggctcctgacccagttcaacgggatcaagctgaattacgtttcccccgacatcctccgcatgccgcccgacgtcatggaagaggtggcggccaaggggcttcctcaatccgaacactcaaccctggacaaggttctgcccgaaaccgatgtcctctacgtcacccgggtccaaagagagcggttcgaggatccccaggcttatgaaaaggtcaagaacgtctttgttgtaaatcccgcggtgatgaaagcggccggcaaaaccatgatcgtccttcaccccctgccgcgcgtcaccgagatcagcttggacttcgacgacgatccgcgggcggcctatttccgccagatggaatacggtctttacgtccgcatggccctgctggccatggtcctgggaaaagcctaagccgtcttcttctcctctttcaaccggtttccccggcggccgcccggccggccaatgtccccgaggcccaagcccaggagagattgaatcctccgcgcggtccctggacgtcgagaatttccccggcgaaatagagtccgggcgcttttttcgaggacagcctctcccggtcgatttcccccgcatccactccgccgctcgtgaattcggcctcgttccagccccgggttccctgaacggcgaaccgcttgcctttaaggaccgcggcgagagcggccgccgttcgggccggacggggggggccgccggagatcaagccggcgatggtccggccgaatttttccggcaggaggccggaaacgagatccgccgctccccacccgccctccaagcggcgggcgagctcggcggacagggcttcggcgctcatgtccgggagcaagtccaggacgacttcggctcgggcctttttcccccgatgaagagcgattgaaatgtccgtgctgacgtcgagaacggccgttccggaaaggccgtaggcggtgaagaggacgtccccaagcgcctcggccgcccgccgcccgtcgatccaggcttccgcttgggcccggactctctggccctggagaaagtggcaccaggggtcccggacgaggagggggacgcagctgggaacgggctcaatcaggcgatggccggcggtccgggccagggcgtaggcgctgccgtccgacccgagggcgggataggaccggcctcccccggccaggatgaacgcccgggcctcgatcgtccggccgtcggatgcggccgcgcgcgaggcctctgcgctccggatgatggaaacggcctcgaatcccgggatgacgctcaccctccggcggcggacctccatttccaggaccttaagcaccgaggcggcctgattggtcgccgggtagagacggtctccgtcggacacgatccggaggccgagcccttcgaaaaacgagacgatctcccgggttccgaaacgggccaggaccgaggcgacgaggccggggttcgtcgaatgaaagaggcccggatccaggcgctcgttgccgaggttgcaccgtcctccgcccgtgatcaagatcttttttcccaggcggggcatccggtcgacgatcgcgaccgagcggccttcccgggaggcggcgatcgccgccgtcaagccggacgcccccccgccgacaacggcgatatcaaagggcgcgcgcatgcggcaagcatactgcattcgaccggcttcgccaagccgggtcgccggtttgtcaaggcaactggatcaaggggacccgcttccaggaagaggacgtcgaaggcaggacatgatcacgccgccgaaacagatgggccgccggctcagccggacggcagctatgtccgattgttgtccgagccggggcgacggccggaatgattttccgagggatgatccggccgtggccgaaaacgtcccgaagatcatcggcggggtccgctgcgtccttccgggcgcgcgagggcccgtcttgaaggccggattgcctggaattatgatttgcgcggcgtggctccgtcggcgcagggaccgtcctcgtcgcccgttcgggccgattcggcggaaacggggaccgtgcagacgggaaggggctcgggcgtcatggccgatccgcagcaggttggaacggacgccgaggtcggggccgaggccttggccccgcaggcggggcaaacgtacgtcgtttccttcatggtttttctctccaggaaatattatagcaggcttgcttcccgccgtcccgtgctccgcctcgggacgtccgcggcttcggcggagaagaacgccgcccggttcaggctttccgtttgaggctcgaggcgagcagctccgagagggcggttttcatcgacgaaggaagcgaggcctcccggatccgccgggcgcagcgtccggcgatccggcggacatccgcctcgatccgttccgggatcttttcggtccggagaagggcgttgaggcgggagatatccccggccgcggggcggcgttttccgaacagggcggcggcccggggtccacgggcccggctcaagtaaaaataataaagggtctttttcccttcccccacgtcggagccgacgggttttcccgtggttgagggactgccgaacatgccgatctcgtcgtccttgatctggaaaacgagccccaaatcgaggccgatgtcttcgagaccccggatcgcgctctgtccggcgccggccaagatggctccggccgcgagcggcagcgaataggtgtaccgggcggtcttgaaggcatagaggcggtagatgccggctcgggatacgggccggcggatccggccggaatagacgtcctggacctgggccggaccgacatgggccagctcgcggccgaacagcgagagaacccgggctttatccggggcgggagcggccagagaggcgaggatctccaggcccatgaaaatcagcacgtcgccggcgcacagggcggccgcccggccgaagcccggggcgtcgtttacgcccttccgccgggcctgggccgcgtattggacatggatgctcggctttccgcggcggagcggatcatcgtccatgatgtcgtcatggatgaggaaggccgagtggaaaagctccatggccgcggccgccttaaccgcgtccgggccggcttttccgccgagccggtcatgggcgatcaggatcaggccgccgcggatcattttcccgccgaggacgaacggccggatgcgccgggtgaaatccgcgccccaggcgttgaccgcggccaagccagccgcccggccgtcgaaatagcgcgagaggcatcgcgcgatccgcttccggctcttttcgaaatcgcgatccaatgttgatccggtcatcggctttttgtctccctctccaagcggcgccggagccgggcgacggtccggtcgatgacgtccatcggcgtgctagcccccgacagaacatagaacttccggccttgtccgagcggaagaccgtcgacgtcctccggccggctgaccaggcgggtccgccggttccccgcgccggcgatcgacatcaggttgcgggtgttggcgctggccggggagccgatgacgatgacgccgtcatagcgggcggcttggatgcgggcgtcccgctggcggtctgaggtcggtttgcagatcgtgttttcgaaccggacgtcggggacgaaacggcggattttcctcaggatggcgtcggcctcggcccggatgaacgtcgactggatgaccactccggcccggtcgacgccccggaaaaatccccggccggcttcctccggcgtgcccaggatgagagcgttttcgacctgcccggcgattccctggacttcttcgtgccggcggtcgccgatgatgatgacgcggcggccttcgccggccagccgccgggcccgggcttggatatccttgaccatggggcaagtcgtgtcgacgaaggagatgcccgaggccttgatctcgctcaaacgagaggctggtatcccatggctctggatgatcagcaggccgtccccggccaagcggtggtcgtcgatggtcttgaatccgcggcgtttcatccggttgaggacgatttcgttatggacgaccttgcccagaagataaatctttttccccggctgctcgagccggagcttttcaatgattttgagagtccggttgaccccgccgcagaagccgacatagggcgaaacgtcgaccttgggagacgcggatttattcatcggccgtttcctggagctttttgaatgattcgtcatcggggctttcgccgaccgccgggacataagcggccgaggccgccatgatcagtacggcggcgcatcttcccttcggggatcatatccaataaaaatttataccaaaggaatccgacggatacaagaaggccggcgcctcgttggattgcggattgatcccgcctttcccagacaaacgggaaacgctctttatcgagattcgcgaggccgatgacgttcatgccggatttatggaatccccgtccccgggcgatcaacttttcattcgggcgacggatttctttttcggactcaaaacgatgatccgtattgggagaaaaaaggacgcgtccgcccgaggggatcgtcgccaaaggacgatcctcgcgattctcttcagccggcggattgacgactcggcatttcgcccgccacggccgctttttgcgcttcaccgggggctttcccggcttcgacacggcggtggcggcgatttgacttatccgccctgaaaagctagaatcaatgactccctgaaacggaaaatttcgccttgacgagaaccgaacatcagggggaaagaccgtcatcatctcactttcatcatcataggaggagacccgatggagaaacccttcaacgctttcgagatggctcagaaacaattcgacgcggcggccgataagctcggcctggaccaggcgacccgcgaactgctccgcaaccccctgcgcgaataccatgtcctgatccctgtccgcatggacgatgggagcaccaaggttttccggggataccgggttcagcacagcgacgcccgcggtccctgcaagggcggcgtccgttttcacccccatgagaccgtcgacaccgttcgggccctggcgatgtggatgagctggaaaaccgccgtcgtcgacatccccctgggcgggggcaaaggcggcgtcatctgcgacccgcacaacctcagcgaccgggagcaggaaggcatctgccgcggctgggtccgccagcttgctttcaacatgggccacgagcaggatattccggcgcccgatgtcatgacccacggccagcacatgctctggatgatggacgagttcgagcgcatccgcggggccaagttccccggtttcatcaccggcaagcccgtcggcatgggaggttcgctcggacggaaggaagccaccggcttcggcgtgatctttaccgtccgggaagcgatgaaggagctcggcatcgacattaagaaagcggtcggcgctttccagggcttcggcaacgtcgcccagcacgccgtcaagcttttcaaggaatacggcggcaagccgatctgcgtcgcctgctgggaccaagccgaccagacgtcctacaccttccggcgggaaagcggcatcgaccccgacgagctcgtggccatcaccgacaagttcggaaccatcgacaaggccaaggcccgtcaggccggctatgagatcctcccgggcgatgcctggatcgagcaggaagcggaccttctcgtgccggcggctttggaaaaccaaatcaccgcggccaatgtcggcaagatccacaagcgagtccggatcatcgccgaggcggccaacggcccgacgacgcccgacgccgacgccgagatcatcaagcgcggcattttcgtgatccccgacttcctctgcaacgccggcggcgtgacctgcagctatttcgagcaggttcagtgcaacatgaactatttctggccccaggatgaagtcctctccaagctggacgaaaaaatgacggtcgccttcaaggccgtctccgagctggcccggaaaaagaacatttatatgcgcgatgccgcttacttgatcgcggtgacgcgtgtcgccgaggccagccacaagcgcggctgggtatgattccggcgtcccgtcgtttttcctagatcgctgcgcggccccgcccccgaaggcggggccgcttttttttcggggaggtgaggcatgagccttcgcgagtcggacgtccccaaaggcccgctgcgggagcgggtcaaggagttggagtgcctccaggccatcgtcaccgtcatcgaaacgcccggcctgtcctcggacaagatgctccagcggatcgtcgacgtcatcccctccggctggcagcatccggagcggtgccgggcccggatcaagatccataaggcggtttttcacacccctggattcgtcgagacgccctggatgcagcgcgtccccctccgggcccgcggggagacgatcggggcgctggaagtctgctacaccggcccgggcggctccccccaggaaaacgccttcctcctcgaggagaagaagctcatcgacctgatcggcaaccggctcggccgcttgatcgaggagggcgaaggcgccggccgggcggccgcggccggacccgccgaggaattccccggaaaacgaaaacccgaatggcgggtgatcatggatctcttgagagagaccgatccgatgctctaccggcgggttctccggcggctgatgaaccatctccactggcagggcatccccggcgtccaagggttgctgttccacctgaccccggaatcttactcccgggccgaggccggacccgatgaaaaccagccccagcccgtccaaagcgtcgaacgcctgagcaaggtcttcgaggaagccctttggatcgcctccctggccctgacggacgccgagctttcggacctcctcaagcagtggatgcggcaggacaagctcggctttttcatggtggccacggaaaagcgggagatttccgtcgttgagatcaaggagatcctcaaccggttctgccgctcgacgggcgaggacgaacagtccctctctccggccgacgacctccaagcccggatcgccctcatccgccgcttcctcagcgagcgtcttcccttcatccggatcgcccgcgatttcatgaccatccacgatttcgggcggctgctgccccgcgtcttcggcccgacctcgggcaccgggaagctgggggggaaatccgcgggcatgatcctggccgagcatatcctccgccagaaagcccagtccgacccggccgtcgggacgatcaagatcccggagtcctggttcatcacgtccgacggggtgatggatttcatccattataactacttggaggatttccagagcttcaagttccgtccgatcgaggagatccgccacaactacccctacctggtccaggtctgcaagcagtctttcttttcgcccgacatgctcgcccagctcaagctcattctcgacgacgccggcggggatccgctgatcgtccggtcctccagcttgctcgaggacagccggggatcggcgttctccggcaagtaccggagcctttttctggccaacacggggacgaaggaggagcggctggacgccctgaccgacgccgtggccgaggtctatgcctccattttcaaccccgacgcgatcgaataccgggcggagcggggcctgctggattactacgaggaaatgggcgtcctcatccagcaggtcgtggggacgcgggtcggaaagtatttcttcccggcgttctccggcgtggccttcaacaacaacgagttccgctggtcgccccggatcaagcgggaggacggcgtgctgcggttggtgaccggtctggggacccgggccgtcgaccgggtcggcaatgattaccccctgctggtcagccccggccagccgggcatccgggtcaacgtcatgcccgaccaggtgattcattattcccagaaggcgatcgacgtcatcaacctggaaacccgccgcttcgagacgcatgcgatcgaggagctcctcaaggaaatcggcgcggatttccccatctgggaccgcctcttttcggtctgggacggccagtccgtccgccgggccaaccgggtcttggaccagcctgaccaggattccgtcgtcgccacgttcgatggtcttttgaccgggacgccgttccttctccagatgcgggaaatcatgcgcgtcctgaaggagatcttcgggatcccgatggacgtcgagttcgcccatgacggccgggatctctacatcctccagtgccggccgcagagccgtctggacgacgaggaagcgatcgccatcccggccatgatccccgacgaaggcaagctgttttcggccaggaaatacatcaccaacgccgatgtccggggcattcggacgatcgtctacgtcgatcccgagggatacggccggatcgcctccctggccgacatgggagccgtcggcgacgcggtttcccggctcaattccttcctgccccggaaatccttcatcctgatggggccgggccggtggggcagccggggggatatccggctgggcgtgcgggtcgcctattcggacatcaataattcggccatgctggttgaaatcgcccggaaggtcggcgaatacgtgcccgaattgtccttcggaacgcacttcttccaagacttggtcgaggcccggatccgctatttggctctctatcccgacgaccgggatgtgattttcgcctgggactttttccgcaaatcaccgaatgtcctgacccgctacctgccggaatacgcgtacctggccccggtgcttcgggtgatcgacgtgcctgagacggccgacggccgggagctgcgggtgatcatggacggcgatcgggagacggccctcggcttcctctgcgatccgacgaagggccggggcgaggaaacaggcgatgcgggattgctttaatccccggaccgggccgacgggcggtccggaggcaaggaccggccgatgacggcccggctgctgctggtcaactgttaccgggaaaacgcggcgaagaagatcgatccctaccgggaatggattcaagccggggcgagagacttgggcctgaagcttgaaattctcgcgaagttcgacctcgggccgcttcccggcggggattacgacggcctgatcgtctccggatcgcgccaaatgatcggccggggacaggtcgaggccggcctgctcgatttccttcgaaccaaccggcggccgcttctcggcgtctgttacggccaccaggccctggcccgcgccttcggggggttggccgggaaggatgcggcgacacatcggggcgacgagatgatccatctcgaggcgcccgatgcgctttttgccggatttcccgcgtcatttcccgatgagcgaaagccacgaggagatcgtcgcccgcgacgaagccctcgagaaagagttcctcgtcctggccgccggcgactccggccgggtcgaggccgtccggcttctgcgggaggcgttcatgaagctgttggacgcgtccatcgaggaagccgggcagatggatatcatgaaagccctggcccgtcattacggcgttttctgcgatttcgcgaatatccggacgaggacggcgggccggaggcagttcgtcgacctgaccctgatcctgccggccggtctttcgattaaaaaagcccatggccatgccgcggatctgaaaaacgacttggccgcctccattcccgagagcgaaatcgtcgtccacatggagccatgcgccggggactgtgcctacgcggccgagggccgggcctgtccttatctcgtcccggcgggaaaaaacggcgcgtgagccttctcttcttatcatgaaaacatggacggccggaaagaaaacccggatcacccgcgctttagccggccgaagcaacgtcttcctggtctccggcggagggaagagccttctggtcgatatcagcccaaggtccctccgccgccggtcccgccgtgaacccctcgcactccctttccgtatataatagcgacatcaagcagaggaggtttcccatgcgcgccgcccgttttcccgggattttgatccttgttttcgcctttagcctgattggcgccgcctgccgggagagacgcccggagccgaagctggaaacccaccggacgatcccctcccaaggcgaaagccgggccgtcgtcacgatcaaaatggccgccggtgagctggacgtccgcgggggcgcgggcggcgagttgatgaaaggatctttttactacaaccggcggccgtgggaaccccggatcgattaccaagtctccggcggcgtctcccgccttgtggtcgaacagcgccggatgggcccggcgttcggccgcgtccggaacaattggaacgtggagctgtcccggaagatcccgacggagctgcggctggacctcggcgtcggaaaagccagaatcgacctggacggcgtccccgtcaccaagctcgatgtccaggtgggcgtgggcggcatggacctcgatctttccggggcgcggaacgagggcctgaccggacagatcgagggcggaatcggccgggctgaaatcctcctgccgtccgatatcggcgtccggctccggatcgaaggcgggctcggctcgatccatgcgccgggcttcatcaaggacggcgagacgttccgaaacgaggcctgggggaaaaccggggcctctctggacctcgcgatcgaagccggcatcggccgcatcgacctgcggatgaagaacacgcggtccttttcgttctgagcccgcggtttttcccggttgacaagccgtcatggcggcctttcagccgaagtcggctccttttgatccaggctgtaaagtaaatttcgagacgtggtaaaacggctttaccagggacggcgggcgtctcgagaggagatttggcctgaagattgcaaaacgaaggacaaggtcgttttgcgaggagggcccatgagaaagctcgctctgattctttcgtttttcgcggcctcgaccgccgtcgccttcgcccaggacgtcttcgacctgcttcgcaaaggggacgtttcagccgtcaaggcgttgatcgaaagaacgcccgagacggtcaatcgccgggacgacaacggctggacccctcttcattatgccgcttcggccggagatgccgcccttgtcgcctatctcatcgaaaagggcgcggcggttgaggccgaggacgcgtcccgaaaaacgccccttcatcgggcggccatgaacgatcggcgggaggtcgtggcggaacttctccggcggggcgcggccctcgaagcccgggacagctacgagaggacggcgctcgtcctctgcgcccgggaacgcggcggggcggcgacggcgcggattctcctcaaggccggggcggacatcgaggccgtggacaagttcggcgatgacgccctgggattggcggcctggaggggcaaagccgatttcgtcgaccttcttctcgaaaagggcgccccggttccggaccaggggcggaaatgggggcaggggatctccttggcggcttcccaggggttgacgaatttattccgccgcctcgccggtcccggaaaagatctgaaggccgtcgatccttccgggacggagctccttcatatggccgcggccggtggttcggatgtcatcatcgccctccttctcgaaaacggattcgatcccgcccgccccgaccgcttcggctggacgccgcttcattacgccgcccgggacggccggaccggcgccgcccggattctcatcgaaagaaagattcccctggatgcccggacggccgccggccaaacggcctacgacgtcgcccgggagaggggggcttcggccgtggccggccttttggccgaggccggggctgacacgtccggcgtccggttccctgtcctggaaggagattacctcgggcaaaaacctcccgccggcaaggcggagctgttcggtctgggtgtcatctcctcgatctggggcctccacagcacggccgtgttttccccggacggaaacgaggtttattgggcgccgatggtgacttatccgggcgaggcgtattcccggggcggcctgctcatgatgaagcgcgtcgacgggcgctggtccgctccggctcccgctgctttctcccgtcccggcgatgacgacgacgttccgtttttctcacctgagggacaaacgatctatttcctctcccggcgccttctccccggggaaacggcggccccgggggagaggatttggctggccgacaggacgccgggcggcggttggtccgagccccggtttctcgacccggccgtcaacgctcacaatatgcattgggaattctccttggacaaatccgggaatgtttacttcgcgggggagggagccgattcctcggggatgacggacatttatttcgcccgtcggaccggcggaaaatacgaggcgccggtgaacctgggcggctcgatcaactcgcccggaccggaaaccacgccttttgtcgccccggacgggagctatctgatcttttcccgcgattacgacctttgggcgagcttccgggaggacggtggcgcctggtccgcgccggtcaatctcgggccggacgtcaacagtccttccatcgagctctgtcccattgtcaccgccgacagccggtatcttttcttcttgagccagcgggacggcgaaagccacgtctactgggttcgggccggcgtcatcgaggaggcccggccgaaaccggccgaacaaacgccgggcggcggcgcgcgggcggaaatcgagcgctccatccgggcggccgtcggctgggcccaaaccaaggatttcggcctgctctaccgcgtcattgccggcgatgctgatttcctcgaggtgcatccggacggccgggtcgtcaagggaatcgaggaattcaagagagccgaggccgtctggggcagccccgatttcaaggccgtccgctgcgacatccgcgatctaaagatcacgatctcgaagtccggcgatacggcctggtttttcggcatcctcgacgacatcaacacctggaaggggaagccggccaactgggagaacacccgctggaccggggtcctggagaaacgggacggccgctgggtgatcgtccagcagcacttctcctttgctgaaaaggacggtcccggcgccgccgggcccgcggcgatccggccggcgccttagcggcgcggccggagaacgcggaccggatcgggaggctggggcaggagcttgacctcgccggtcttgagcgcttccatggccgcctccacggctttttccaattggggatctccgccggcggctatgcttttcgcgctcatttcgacttcgatgtcgggggcgacgcccttgttctccacgtcccattccccggccgtgttgtagaagcctccgcggggggcggtgatccgcccgccatcgataagagccggcacatcccagattccgacgagcccgccccacgtccgggtgcccaccagcgggccgatgccccgctccttgaacatgtagggcatcatgtctccgccggaaccggccgcgtcgttgatgatcatcaccttggggccgaagatcgcggcgttgggcgccgtccagggctgcttgtcgccgatcgggttgttgaaatagccgagaagcggccgggccaggaggtcgatgacgtaatcggcgatttggccgccctggttccagcgctcgtcgatcaccgcgcccttcttatccttttgggcgaaaaagtaacggttgaagttgatgtaagcgccatcggccgtgtccggcagccagacataggccagcttgcctccggacaaggcgtcgacccgccggcggttgtcctcgatccagccggcccggcggagggcctcctcgctgcggaccggaaccaccgtgatttcccgggccccggccggctccggcttggcgttgactttgatccgggtttggacgccggccgtccgctcgaagtagctgaagaggctccggccgatctcgatctcgcggccgttgacggcgagcaggtagtcgccttccttgacgtcgattcccggtccggccagcggggccttcaggttgggattccagctttcccccgtatagatccgggcgatcttgtagcgtccggagtcgagggtgaagtcggcgcccagcaggccgacggggacggattccacggcgggcatgtccccgccgccgacaaacgaatgcccgatggaggtctcgccgccgaggatgtcgagaagatagttgagatcggcccggtgccggacgtgctcgacccagggggcgtaggcccggtaaaggccgtcgagatcggccccgtggacgttgcggacgtagaaataatcccgttggaagcgccaggcttccttgaagatctgccggccctcggccgccggatcgacatagaggcggaggtcgccggcggcgatcttgccgtcgcccggcttgggcgatccggacgcgtcgacgattccccaagtcttgccgtccaggccgtacaagactttcttgccgtcggccgagacggcgaggtcggacacgccgctcaggtattccttggttttccgctccttggcgtcccagcggtggacgagaaggctttcctctccgggaatcagctcgccgaggaaaagcgttcccgcctcgccgcccgccagcagccggtaatcgcgggccttgacgggaagcgggacgatgcgccgggcgagaccgtcgaaatcgatgttcacggccggaacggccttgtccttccccttatccgcgtccccggcggcttcggctttattcttgcccggctttttgccggccgggcccttgtcctccgccttggccgcggcttcctcgtcgctttcgagggcgagcggatcagggccgtccttggccaaaacgacggcgtaaaggctccgggtgatcggacgctcgaaagaagacaggtcgagccagccgacgttgagaccgtagtcggtggaggcgaggaaatacaggtatttgccggaggcgtcccagaccggcatccggcagtccgacatgccgtcggtcacggccgtcgccgttcccttgtccacggaatagacgaagatcgccccgtattcgttgcggagccgcttggcataggcgagccatttcgaatcgggggaccagcaggggaagatgatccgctcgggatgggcgaagccctcggtgtcgacgcgggtgatcgccttggaggcgacccgggcgatccagagatcgcggttggcgtcggtgaaggcgatcgaggaggaatccggcgaccaggccggagagtagaaaaaggtcggtttgggcagggggataaccgacctgttttcgcctttttgatcggcgatcaccagctggtattcgcccgaggcgtccgagaaccaggcgatcttttccccgtccggcgaccaggccgggctgcggtcggccgcggccggatctccgctgagattccggggatcgcccttctcggccggaacgctgaggatttcgccccgggcgctgaagacggcccgtttccccgtgggggataaagccggctcggtcagcctctctccggccttgatccagtgggggcgggcccaggcgaaatcgccccggacggacacggcgattttttcgagcgtgccgtcggcgaggtccagggtgtggagaccgccgccctgctcgatcaccagggtgccgccgtcgccggcgatctgcttggcgtcgaagtccgtgaagtgggtgatctgacggacctcccgggcggcgaggtcgcaggcccagacattcatggcgtagtcgcggtccgacaggaaatagaccgtatcgccgagccaaaccggtgtgttgtcgttcgctccgtcccagggaagcttctcttcctccaacgtctccaggtcgatgaggcggaggggattgttctggccgccgcggtagttgcggaactcggactcccacggctcgatcatctggtaggccatccgccggccgtcgggggaaaaggcacccttaaagacccgcggaaggggcagcggctcgggcattcctccccccagggcgaccgtccatagtttcgggtacgagagcggggctccggttcgtcccgaggcgaacagcacccggccgccatcgggcgtccagccgcggacgagatcctcgcccggatgccaggtaaggcggcggggctcgccgccggcggacggaaccacgtagacgtcggtgtttccgtcgtaagccgcggagaaggccaccagatttccgtcgggcgaaaagctcgggttgctttccactcccggaaaggacgtcagccgcacggcgtcccctcccgtgcggggaaccgtccagagatcgccgccgtaagcgaagacgatccgcgtcgccgagatatcgggctcgcggagcagccggctttccggcgcggcctgggccgagacggccaggaacaaaatcgcggacacaaaacaggcgactaaggatttcatggggtcctcctcaggggagatggaaatgccgccgcggcggaacgaccgttccccgccggcgtattcgttctcatggatcgatgatttcgtccttagaccggaaagcgattttatcgcctggaaccggccgagtcaacggcctgaaaatccctgtcacgtaaacattaaaagtggactcctcccctcggggccgtagatgccccggccttcgcgtttctttgcggaaattctcttttctcaaggaggcgggattttcctcgttttccggaatctcggaccgctctttccgcccgggatccggcggatcgactgcttgtcgcggccgcgattcaaggccgggcggatgtcttcgtccccggcgatcataagtcgtcggccggcgccgccgggttccccgcccggctggcgacgccgagacggttttgaataacgatcaacccttgaggatcttttcgacctcgtccttgtcggtgtcgaggacataagggatgccgctgatgtcggaggcttccttggtcagggccgcgatgtcgtcccgggtgatgtaggacagcccgaacttgcggttgccggccatcagctgccgcaggccctggctcagccgggcgaagtagctgtagacccccatggccccgggcggcaggtcggcgtagcgcttgccgaaacgccgtttcagctccggcgcggtgacgaagatttcgtccacggagctcccgaaccgctcgacgtagaccgggatctggccctcgtcgacgcgcttgccgatggtcttgccgaccatggccgcggccacgacgctccgggccatgcccaccgccttgacatagggggcccccagggccagggccttgaagatctggtcttcgaaggtgaccccgccggcgaagcagatgtccgggacgtactcgcccttcttgtccagcttcttagcgaattggtgggtcaggctccagagctcgaccgaggggacgccccactcgttcatcatccgccaggggctcatgcccgttccgccgccggccccgtcgacggtcagcaggtcgagcttggccttggaggcgtacttgaccgcccgggccaggtcggccggccggtaggcgccggtcttgaggaagacgcgcttggctcccgcccggcgcaagtcctcgacccgcttcatgaacgtctcctcctcgaccatgcccatgcgggagtgtcgctcgaattccctgaagctgcccttttcgaaggaggcgatgatgtcggggtcctcggggtcgggcaggacgatgtatccgcgtcgcttgagctcctgggcctttttcaagttcttgatcttgacctcgccgccgatgtccttggccccctggccccacttaagctcgaccgtttccacgccgagtttctcgatggcgtattcctggacgccgagccgtccatcctcgatgttggcctggacgacgacgtcgccgtagccgtccgaccagtcctggaagctccggacccgcatctccatgtccggcgagcggacgacccggccgttcttgatctccgactcctcgtccatcccgcagacgttctcgcccacggtcaagacggccccgctgatggccgccccgatggcgatcccggcccagttgttcttagccacgttggtcgagcccatgcccgggacgatgaagggcagcttgagcttgatgtccttggcccggccgatggccgtttcggtcgagaccttctcgaacgtcgccttgtccgaatcggcctcgcagccgtaagccccggcggccgttcccatgatcgagaagtgggacaggtcgaacgggtattccttctccgagccggcggtgatgatcccgaacggctggggataaaggacctcggccgcccggtaggcggatttcccgatttcgcacatcccgatgcagccgtccacgcacgtgacgcacatcccgctgaaggggctgatcgacccttccgtccggttcttcgtcagcgtcgccgcgctccgattgagtctggtgaatgacatgaccggtgacctcctttagatgatctccgtcaacgcttcttttcctggacgcaggagccgcatcgtccgacgtcgtacatccagcaattcagctcgtcgtattgttcgaggcaggtgggctcgatctgcaggcaggcgttgcagatgtcggtgtcggcgttcgggccgccgcaccgggcggagcaggccggacagacgtagaggcagccgccgcacagccggcactcctccgagcggatgtcgaacggcgtcgagattttgcgcttgtagccccggttctggaaaccgatggcccgggcgtccatctgctcgtcgcacatccggatgcagaggccgcagtagacgcattcctcgttgcggggcgggaagcgctgctgggtgacgccgaacttggaggccaggtcctggatcttcttggacatgggcgccgtcgagagcatgagctcgatcatcacccgccgggcttcgatcacccgccgggtgtcggtgcggacggccaggcccttttcgacggggtaggtgcaggacgagacgagtcgggatttcggcggttctccgatttcaaccaggcagaggcggcagccgccccacggcgtgagaccctccatccagcagagggtcgggatctccaggccgtagaagcgggccgcctccaggacggtccagtgctcctccgcctgaacttccaagccgttcatgaggattgggatcatggcttctccttcatcgccttaaggacggccttgccgtcctcggtctccaggtcgcagcggaggcagcggcgggcttcccggacggccgcccgctcggtcaagcccagctccacttcccggaaattattcctccggtccgtggtcgacagccgattcatcgccgggcggcgggctttctgaatctcctcgtcggacaaggccggaggggcggcgtagagggacggccgggacagcttgtaatcaggcttgagggccttgccctcgacgtacttggcgatcatctcggccgcccgcttgcccgcggccatggcgtcgacgaccatgttcgggccggtcacggcgtcgccgccggcgaacaccccggcccgggtggtcatggccgtttccgcgtcgatgacgatgttttctccgtggcgggtgatctcgtcgccttcgccgatgtacgacgtgtcgggccgttcactgatggccaggatcagggtgtcgagcttgtgaacgaaattcgagccctcaaccggcaccggccgcggccggccgctcgcgtcgggctcgcccagcttcatcttttggcattcgatcccgaccgctttcccgaagctcatcaggaccttgaccggggtgacgagaaagcggatgtccaccccttcctcgacggccgcctcgacgtcctcggcgatggccggcatctcggccttggtccggcggtagaagatggttactttttcgcaatcgggatcgcgcaaggcgacccgggcggcgtcgacggccgaatttccgccgccgacgacgaccacccgttggccgatcgggaccgttttccccatgttcacctggcggaggtactccaaggaatgaagaacgccttcggcgtcctccccggggatgcccatccggagggatttccccgccccggtcgcgcagtaaacggccttgtagccggacttaaagagcccgtcgatggtgatgtcccggccgagggtcttgttcaggcggatctcgacgccggcgttcttgatgtcggcgatttccctctggacgagcggcccggggaggcgatggtcggggattccgacggccatcatgccgccggcgacggacaaggcctcgaaaatcgtcggccggaatcccttcagggccaggtaataaccggccgtgaggccggccggccccgagccgatgatggcgatcttctcccggttctgttcgatcttcggcgggacgtaacggattccgttttttcccgcccagtcggcgacgaagcgcttgaggccgcggattgagatcggctcgccggactcgccagcccggcaggcgagctcgcaggggtggtggcagacgcgggcgcagaccgagggaaggggattgtccttcatgatcacccgtaaagcttcttcgtaccggccggaagcgatgagggcgatgtacgtcgaggcttcttggccgatgggacagacgtactggcagggggaggagacgatttccttgcagacctgggccggacatttcttccgccggatgtgctggcggtattcgtccttgaagtaacggagggtggacaggaccggattggcggccgtctggcccagcccgcacatcgaagcgtcccggcaggccgcggccaggtcctccagggtgccgatatcctcctcccggccttggccttcggcgatccgggacacgatttcccacatcctctgcgttccctcgcggcaggagacgcatttgccgcaggactcgtcgcggaggaagttgagaaaataccgggccaggtcgaccatgcacgtcttctcgtccatgacgatcatgccgcccgagcccatgatcgacccggccgcggccaggccctcgtaatcgatcggcaggtcgagcttgccggccgggaggcagccgcccgaagggccgcccgtctggacggccttgaaccgccggcccccggggatgccgcccccgatgtcgtagatgatttccttgagggcgaggcccatcgggacttcgaccaggccggtgttgttgatctttccgacgagggagaagatcttcgtgcccttgctgcccggcgtcccgaccttggcgaaggccgccccgccgccggagatgatgatcggcacgttgccccaagtctcgacattgttgatgaccgtgggcttgccgttgagcccccggaccgagggatacggcgggcgctggcggggctcgcccgtccggccttcgatcgaggcgatcatggccgtttcctcgccgcagacgaaagcgcccgcccccttgacgatccggaaatcaaaggagaagccggcgcccaggatgtccgggccgaggaggcggcgcttgcggagggcctcgatggcgatggtcacatgcttgacggccaagggatactcgtcccggacgtagatgacgccctccgtcgccccgatggcgaacgccccgatcatgatgccttcgaggacccggtgcggattgccctccaagaggctgcggtccatgtaagccccgggatcgccctcgtcggcgttgcagatgacgtatttgacggagccgggctgtttgcgggtcaggtcccacttcagggcggtggggaagccggccccgccgcggcccctcaggccggaggccttgatctcggcgatgatgtcttccggaccgagcttcctcaggaccttggccagggcggagtaaccgccgatggagaagtaatcgtcgatcgaggtgggatcgatccgggcgttgtcgcccaggaccagccgcttttgtttggcgtaaaaggggatgtctctttcccgtttcgccggcttcccggtggcgggatgatggaagaacagctccgggaccggttttttcttccggatggtttcggagacgacgagggccgcgtccttcggatcgaccttctggtagaacaggtcgtggggttggacgatgatgttcggctcggcctcgcagtacccgtggcagccggtgacctggaggtggactttcttgtcgagcttggccttccggagggaagtccggagagcgtcgacgaccttgagggctccccgggcccggccgcaggtgccggccgaaacggtcaggataggcctccggtcttttttccgaagccgctcgtgggcggcgatcgtctgttccaagacagcgagcgttttgatcgggacgactctcatgaggctcacttcttcccgtactgcttgatgatggccgcgaccttgcgggtcgacgtctgggcatggaagtcgccgtcgacgaccacgaccggtccgatcgcgcagcagccgaggcaggccacggtttcgagggtgaacttgcggtcgggcgttgtttcgcccggaccgacgccgagctgccgctcgaattcctccaggatcttgggcccgccccggacgtggcaggccgttcccgagcacaccgtcacgacgtggcggccgcgcggcttcaggctgaaagcccggaaaaacgtggccaccccgacgacgtcgatgagcgggagaccgacggagcgggccacctgccggagggcctcctggggcaggaagctgtactccgcctggacgtcctggaggatcgcgatcagggcctttttctggttctggtgcttccggataaaggcgttcacgcggtcaatttggacatccacgcgtcaaacctccttcggagtttttgctagtcaggaatgaaaattatgaaagggagagaaggagcggaaagatcaggcgaggggatggtctttccccggtgaaggggcggttttctcgaggccgggagccgaattgtcaaagacatgactcctcgaaagccgatagagaatgcgtctctcatatcacacgaaaaaccggttgtcaagagaatattatgaaaataatagattgaaataaaaacgacaagtgtcgtactatgagaagaggaaacagccgcgaaaaggaggatgtcatgagacacgagatcctgtcggatgaaagcctggaaatcatgcgggaaatatgggcccggccggaagcctcgatcaacgacgtctggaccgccctcaacgccgcccggcggaagaaggtccgccggaccaccgtccaggtccaaatgacccgcctcgtgcggtacggctggctcagccggagaaaatccggccgggaatacctctatgccgccctgtacggcaaggacgaaacggtcggcgaccttctcagcgcgctggcccggcgcgtctacggcggatcgttcgtcgagctggtcgggttgctcctggagcgggggattttcagccccgcggaccggcgcagaatcaatgtcatgtggcggaaaataggacggggaaaggaaaccgggccgcggcttttccctgcttgaaaaacggcttggactccgggactcagaggaggcgccaggcgtggaaatcctcaaacaaggtccacgtccggtaggccggatccggacttccgtccgggaagaccggggcgaatcgcgcggaaagcgatgaagggacagggcgggggacgaacatcgtccagaaggcgaggcgtcccccggaccgggaaacgcgaaggattccgccgagcgcccttgcgtactccccggccgccatgtattcaaagatgttggagagattgaatttcgagaaatcgccgggatgggtcgcggcgaggatttcatccaggccggccgtccgaagcttcaaccggtccaatccctcccggatcgccgggaaatgagcggcttgcagccatagcggaagattctccggccgggggtaggcgctctccttgaaaaaataagcgaggccgggatgatcccggacgagacgttggctgagctcccgctccgcccggtcgtagaaaagccgccaggtgtcggccgcggtcacgtagcggtagtgggaccgttgacgaccccaccggccgaacacgcgttttccgaacaccaggcggaacagcgtccgccaccgccgattggtccagacgtcccggtaaaacgccgcctgctccccgaccgtggggcagtcgagcaaggctcgcagcgtcttgcgggaatggatcaagggaacgacataacggatcgccgcccggaagaaacgctcgtaccggccgcagtgaaacaggccgtcccggatcaggtcccgtcggcggtcccaaaaagcccgggccggcccgctcaagcccggcctcaggacgtcgtataaacggtccttgtccggtccgggccgggcgccgagaaagcccagaagctcttcgcggtcgagccgccgggcggccaggaccttcagctcgaccagatgtatctgggccggattccggtcgatcaaggtcaccgagcgcggccgatcgagaaggaaagccaggccgttttctcccccggaagcgatggacaggacatcgtcgtccggtccgacggcaagcgcctcccggctgagacggggatcctcccagcattgggcgtaccggacctccaggcggctcatgcctcccgctcgtacagggtatattctcgctgcggttcgatcttcagccggcggaagaacgcttggatgggctgatccttgggcatttgggcgaagatgaagtccgaataaccgcggcggagcgactcgtcgatcatggcgaagaatcccgctcttcccaccccggtcccccgcgcttcttcttccggaagggaaccggccgcgaagaaattgaagcgccggcgcttccggaggcgggacaggaatcggagcgcgcctaggggcgtgatccggccgttcatggcgcggaccgcgccggccaggtcgcggaagatgacgccgaagctgaccgcccgcccggcttgatcataaacgaaacccgaaacgtccgcggccagggcgaatcccacgccggaaagaagcgctttgaactcggtgaacggaatcggcgtgtaatcgggaaaaccgtcgaacgaccggtcgatcaggccgtgcagcgcgggccattccttccggaggtccaggcgcgtcgccgggacgaaccggtaaccccgctcgaggaggagctcatgccttttcctccacggcgcgatcaaggcctccagcttttcccggccgttgatctcgatcgaattccacgcccgaagcggcgcgaagccgccgagctcgaattgttccgggtaatacgccgggttgtcgggctcgccgtagtacggttcgcggtcgaatcccttggtcaggaaccggtagccgtgccagaggtcgaaattcatgggtccccggatccgccggacgccgtgttccgtccggagccactcccgggccgcctccaaaagctcggccgcgacgccgtcgtcgtccacgcattcatagaagccgacgaggccgacggggagccggtccccgtcccggatctccgcgttgaccatggccgcgatccggccggcgacgcggccggcccgataggcaaggaaacggcgatgatcgtttccggcccgttgataaaagtagaaatcggggctcagctggcggacgatctcccggcggaagggcgggacgcgccgggcgccgccggcgtaaagcgagccgccgaaagcgatgaattcccgggtcagggacggatcgaaccgaaacgagcgaagggacatgattcaggaatcacttccgcccgggcggctgatgtccgcgtgtttatttctcatggggaggatgattttgccagattcagccggagcgaatcaaggcgcggggcgaggattcgaagcggccgcggcccgcccgatcgaatctccgaggcggacatatgtttccattccttcggccgtgcgggcgagaaggtcggcgtcgacctcgatcatccctttccggaaaagaagggcgaccgtcgacccgcccggctcgaaacgcgctttcttgtcacccttggccgccgggacgccgggccggaaaacttggcggatcgagcccacggcgaaggctccgacctcgatgatcgccgcccggccgaaacgttccgtctcgaacagggtgatcatccggtggttttcccggaaataagggaccgtccgtttcagggaatagggtcccgagggccggtattttccggggagcgaaatcgccggggcgggaatcccggaacaggggaaatggacgtagtggtaatcccccattcccagccggctgacgaccagcgttcccccggcgaagtcctcggccaggcggtcgtcccgaagaaagtcccggaggttgaaaagggcccgtttgacgggaaaaaccctgtcgaccgggagatccgggtaggcgagaatccttccgtcggcgggcgcggcgcaggcttcggacccgggaacgaacggacgacgggccgggtcgatgtcgcggacgaagaaatcgcgcaggctcgcgtattcccgggccggcttggccagatcggcgggatcgacgccgtacgttctcatgaacgggccgatccgccgccggctcaggcggcttttctggaaccggccgtagagacgggaggcggccgcccccccgaaaaggacctccccggcccggcacccgagccgcgtgttgtggatccagtgggtcagccgggcggccggaacggcgtccgatttgacccgtccctcccggcggtcgtagtattcaagacgatcggcgtcgctcatggatgatgatccgcggccccccattttactcgaacggccggtccggaaaaagtgcgcggtgccgaggggcgattcggatggtataatggcgggcctggacgcgcggcgggtgctggagaaacagcgtttcccgccggggaggaacacgaacgatgatcagccggatctggcacgggtggacgacgcgggacaacgccgatcaatacgaaaaactgcttaaggaagagattttcgagggtattctcaaccggaacatccggggcttcaaaagcattcagctgctccggcgtgatcttggccgggaaatcgaattcgtcacgatcatgacgtttgattcgctggacgcggtccgcgaattcgccggcgaagactacgaagccgccgtcgttccgaaaagcgcgagagccgtcctgtcgcatttcgacgaccgttctcggcattacgaaatcatcattgagcgaaccggagagaaatagccggcggcctttgaccgcccgcgcgaaataatcggaggaaggtgcattgatgcgagtgtcccgaaaaaccgtttttacgtccggatccgtcgccctgatcctttggctttgcctggccttcgccttcgcccaagctccggccaagcggccgcttgcgatcgacgatgtcttgggcggactggagatttccgatccgcaggtgtcgccggacgggggatggatcgcttacaccgttgcctggatggaccgccaggccgacaaagcgcgaagcgccgtctggatggtcgactgggagggccggaacaacgtcccgatgacctcggggccggagggggacaccgccccacgctggagcccggacgggaaatacttgtcctttctctccacccgtccggccgacggcaagacccaggtctggctgctcgaccggcgcggcggcgaggcccgccccttgacggacgtcaagggcgagctcagcgcctatgaatggtcgccggacgggaagcggctcgtgctggtcatgcaggaaggagaagaaatcccggacgaggcggcggattcgaaagccaagacggcgaagccgatcgtcatcgaccggtatgccttcaagcgggactgggtggggtatctcacggcctcccaccgggatcgtctctacctgttcgacgtcgggacgaaaacgctggccgccctgaccgcgaaaacaaatcatgacgagagtgatccggcctggtccccagacggatcgcggatcgcctttgtccggggccacggggaggattcggaccggaccgggatgagcgacgtcttcatcgtcgaggcccgggccggagccgagccgcgccaagtggcgacgatcggcgcgccggacaggcagcggctggtctggagccccgacggacgaacgctggccttcacccggggattcgagccgaagtactatgcctacaaccaggatcggttggccgtcgtgccggtcgaaggcggcgaaccgcgcgttttgaccgccgagctcgaccgcggcgtctcccaggcggaattcactccggacggctcggccctgaccttcctcgtggaggacgatcagcggacatacgcggctgaagttccggccgtcggcggagccgtcaagcgggtgagcggggggatcgaagtcatcagcgagatcgcccgcggaggcgggcggaccgcggtcgcggccgcgaccgacgccgcggctacggaaatctacgccttcgaaaacggcgccctccgcaagctgaccgcccacaacgacgcgttgttcgccgggctgaagctcggggccgtcgaggacctgagcttcaagagcaaggacggcacggccatccgcgggctgatggtcaagccgccggattacgagcccggggaaaaatacccgacgctcctctggatccacggcggcccgaatatgcaggacgaccattccctgacgttcggcctgtatccgctgcagctggagcggcagctgttcgccgcccggggttatgtcgtcttggcggtcaactaccgcggcggaagcggttttggagcggctttcacccggagcatttttgccgactggggcgccaaggaagtggacgacttgctggccggcgcggacgaagccgtgcggatgggggtcgccgacccggaccggctcggaatcggcggctggagctacggcggaatcctgaccaactacacgatcgccgcggacggccgcttcaaggcggccgtcagcggagccggaagctcgaaccaaatcgcgatgtacggcgtcgaccagtacacgatgcaatacgacaacgagctcgggccgccgtggcgcgccccggaagcctgggcgaaggtgtccaccccgttcctgcgggccgaccggatccacacgcccaccctgttcatggggggggaaaaggacttcaacgtcccgatcagcggcagcgaacagatgtaccaggcgctgcggacgctcggcgtccccacccaattggtcgtctacccggggcagtatcatctgctgaccaagccaagctacatccgcgaccggctggagcggaccatggcctggttcgacgcgtatttgaaagccccgcaaaaatagagccggcgtcccgaggagcgtccttcccggccggcgacggtcagaaccgggctaagacggcggccgcgagcaaggccaagccgtagagcgccgcgaacgctccgtgggacagccgccccgcttttccgaacgcccgcaggaccgggcttttccggacgatcaggccgattgagacgacggcgccggccaaggcaagcacagccaagatgctcacggcgggggcgacggcggcggcgagccggttgtccattttcaggcttccggcggcgatcgcccgggcggtttccaggccggcggggtcgcggaaggccggggcgtaataaggaagacgcgaagcgatccggatgagggctttaaccaggtggccgagcgccgtcacgggaaggaggaggaggccgaacgtccgggcggactccaggagagtcgttttgttcaacatccgtccggccgcggccgggatgagaagcagtaaggcggggaaaagaagaaagagaatcacggcctggacgaagttggccgccccgcccgaaagcccgagggccgcgttggccgcggccggaacggcctcaagagccttgcgggccggaccccattcctcggccagctcccaaacgaccagcccggagacggggacgagcaggaacaggtccgtgttgcgaagccgcaggcccgtgaaaaagtcggacaggggcttgcgcaatgacagccgaagattcctcgacgggcaggccttcaggcattcggtgcagacgaggcaatcgcgattatcccggatcgcggccggatgaagcccgctcgggcaggttgccgccgggccgaagccggcctccggccgggaaaggcagtttttccctccgcaagccgcgcagatcccgggatcccggacgcgccattccagggccgccccgcaggcgtataagcccaggatccggccgacggggcaaaggtgcgagcagaacgcccgccggttgaagagaaatccagccgccgcggcggagcccaggagaaacagaaaaaacagggccatgcgctcgggatagcggtgcgcccaaaatgtccggatgaatcccaggagggcgaggatataaaagaatacgacgccccggcccgaggcgagaaaccgcggaatccgctttttcaagccgatccgggaacacgccgaggcgaccatttccatggggcagaccgtgcaccaaacccgtcccaggacggccgcgctcatgatgaccagcggccaccagagcgaccagacgacgagcgaggccaggctggtgttgcgcaggattccggtcaggccgggggagacgtgagggacggcgagccccccggcgatgagaaggaggaaagcggcgagggtgaaaagacgggcggcgcttgggaaacggggcgaggccgccagccgggcgatgaaaccgctgcggagaaaatcccgacccatgacccgcctcgtcagattttcgacagggcgtcgcgggccgcttcccggaagccttccgagaggctcggatggtgataaatcgagtagacgaaatcctcggccgtcgccccggtccgcatggccacgacgagattgtgaatgatctcggccgattccgggccgaggatatgggcgccgatcagcttgtgggaggacgggtcgaagagcatcttgataaagcccggattgaaggtctggaggctgcaggccttgaccagggaggcataggggcaaacgccgacgatgagcgggatccccttggccgcggcctcgtcctcggtcaggccgaccgaaccgatctcgggctgggtgtagatcccgccggggacgaagcgctcgtcgatcgtccgggagccgcccaaggcgttttccgcggccaccgcgccctcgaggatggctgtggaggattgcatcctccggccgaggacgtcgccggcggcgaagatgcccgttccggtcgtttccagacattcgtcgacgatgatttctccccgcccgccgacggcgacgccgggcgcctcgagcccgaggtcttccgtcgagggacgacggccgacgcaggtcaagaccaggtcggcggcgaatgtttctccgctctcggtcgtcacgaggcgtccgccctcgagaccggcggcgcaggcggagaccgacgtcccgaaacggagggcgactccgcggcgcttcaattccttttcgacggccgcgacgacgtccttgtcctgtccgggaagcgcccggccggttttctcgatcagggtcacgtccgctccgaatgtccggaagatgaaggcatactcgcagccgatgatcccggctccgatgatgacgatccggggcgggcaagaggccagggcgacgatctcgtcggtggtgatgaccgtagcgccgtcgacgggcaggacgggcagatgaatcggatgggagccggcggcgacgatggtccgggagctttcgatcacggcttccgttccgtcggcccgggcgacccggatccgatcgggggcggcgaacgcggcccggccggacacgagcgtgaccttccgcgaccggagatgcgattggatgacgccgatgtcgcatttcatcagccggttgcggctggcgacgacttcctggaagtcgagggacaccggtccgtcgatccggacgccgaagcttttggctttcttgatggtttcgaacatcccggtcgaaatcgagaacgtcttgctgggcagcgtcccggtggccacgcaggccccgcccagctgggagctgctttcgatcaggccgacccgggcgcccagctcggccgccttgaccgcggccgcgagcccggcttccccccctccgatcacgaccgcgtcgaagcgcaaggtttccatgcgcctattctactcgaagccgccggcgcgtccaagcgcggctcggcccgttgacagccggagcgggggcttttatagtgggcggaggattgcatcgcttccggaaaaaagaaggagacgccgccatgtccgcctgccgcctcgcctcgctgaaccgccgggccgcccaaggggttctcctcggactgatcctttccctcacctccgccctggcccaattgcccccggcttccccggccgaagccggcctctcggccgagcggctggaacgcttgtccctttacctgcagtcggttgtggatgaacagaaagcggccggccggggacgatcgggtcgtacggctggggaggcgcgtaccacacgacctattgggtcgatccccgggagcagatggtctgcgtcctgatgacccagcttctgccggcgagcggcagcgacctccacggcaagttccgctccctggtctaccaagccgtcatcgaaagcggcgataaataacggacgcttttttccccgcgccgccggaggcgggtcaaggtctttccggcccggcggatcggcgaagcgctcaacttgatcttccccgctcctctcccggctcaatcttcggggaactcgccggcaagagggggagcggattcgccgatcatagggaccggatcgagccgttgacggggaagcggcggcatggtaggttggccggagatgggatccgaattcaaactgacgcgggcttcggccgggtcgggaaagacctatgccctgtccctaaggtttgcccggtttctcctgacggacggtcctcccggcgtgccccgggacctccctcacattctggccatcaccttcactcggaacgccgcccgggagatgaaggaacggatcctcgactggctcaaggaagggtatcggggcgagggaaagaaagccgaagcgctcagggtcaagcttcaccaggagtttcacgaacgtctcttcagccccgtcgaactgagccggcgctcggaggcggcggtcgagcggatcttggccggatacaccgatttccaggtggacaccatcgacagcttcgcggccatggttttccgggcctcggccgtcgacctgggctacggccccgatttcgagatctccctcgatcccggcgagcttgtcgactacgccttcgcccggtttctccgccgggtcaggccggaaagcgccgagggcgaggtcttccgccggattcttgattatcttcttgtccaggaaagcgaaaaagcgcggtttctttgggacccggcccccaagatcctggaacggctgaaggcgtttcagaaaaagctgacagcccggcccggcgagctcgtcctcgacgatttccaggaggaaaaagcgaagctcgggaaaacgatccgggggacggccggccggctgcggggggccgtggaagagtcgggcctggatctctccgcccgcggccactaccgcggccggatcatgccggcgatcgaggacgggcggttcgccgatctccttgattgctcattcggcacgctcccggttaagggcgggagcaaggccaagggagccgcggccgaggccctcgcgaggatcgagaaggaatggaaggccctcgaggggcttgtcggcgaatacgcccgcctgcacgcccgcgatttttttctgccctacctgcgggcttatcaatcggttcaagcggaaatgaaggcggccaagctcggccggggccttctcttcctcgacgatgtaaaccgggagcttctccattacctcgagcgggggatcgtcccggacgtctatttccggctgggcgaccgcatctatcattacctgatcgatgagttccaggacacgtcgcccattcaatggcggattctcaagccgctgatcgaggaatcgctgagccgggggggaagcctcttgatcgtcggcgacgccaagcaggcgatctacggcttccgcgacgccgatttccggatcatgcgggacctggaggagggcgcggacggcttcgcctcggccccggtatccccggacgatctggagatgaactaccggagcgagggccttatcctggattttgtcaaagaggtgttcctcggcttggcttccgggtccggcggggaaggggaaaaaagcggcgtcgattacgggcgcttggccggattgtccgggctcgatcatttcacccagtccgttcttccggagcgcgaggggcgcggatatgtccgttatatcctgttcgacaaaggcggggcggccgccgaaaccggggaaggggaggaggagaactccggggagcccggcggcgattccgaagcccccgaaaagagcgagatccagacgctgatcaaggagctcttgggccgcggctggcgacgggccgacttggccgtcctggccggccgcaacaatgaagtcgcggccgtcgcctcctggctcaacgagatcgacatccccttcgtctcctacagcagcctcgacatccgccgccggaagatcatcggcgagatcctctcctttctgcgcttcctcgactctcctcccgataacctggctttcgctgagtttctcctcggcgatctcttcacgaaggtcgcggggaaggaattcgatctttccgcccggcgcgaattcctccaaagctgcgcccgaggcgacggcgggccgcgctatgccgctctccgccgggtccggccgggcctttgggaggagtatttcgaaccgttcttcaaaagcgtcggctatctgccgctttacgacctagtgacacggatgtaccggcaattcgacgtgttcgggctcttccccggcgaggaagccgccctgtccaagctcctggaggcgatcaagactttcgagggcgaaggacggaacgaccttcgcgaattcctcgccttcagcgcggacgaggaggattcggacgaaaattggacgatcgacgtcccccgggaaatggacgcggtcaagatcatgagcatccataaggccaagggggccaccatcccggtcgtgatctgcctgttttacggtcagtccttcaggggcgaggaattctatctccatgacgaggaggacggcgttcatgtcctcaaaatcaataaaaagctggccgagagcgaagcgtcgctgagtgccgcgtacggggaggccagggaccgggagtgggtggaccggctgaacacgctttatgtcgccctgacccgggcccaatatgagttgtacatcgtcggggtcaagggcaaaaaaggaaaatttcctttcgatctcctggaacgggcgtttccttcctcgacggaagagccggtcgtccacgcggatggaacccgtttgaaccggagcttccgggaaggcgaaccggccgggcccgagtcttatcttcgagccaagggacgggatgaggaagccggggaatccggactcattcgggaaatcacgcaccgggccggtttcaccgagccgccggtgaacatgcggacctcgttgaagtccgccggcatccggcgcggcgaatggatccaccgtctcctggccggagtcgagctcaaccgggcgggatgggacgcggaggtcgccgcggccttggaaggcctgggcctctccccggccgagcggacggcggccggggaagccgcggatgtcctgcggcgggcgttcgggaaatccatcgccgccgattggtttgaaccccgcccggaccgcttcatccttcgggaggccgacatctgcgatccggaaggcgacgttttccggatggaccgcgtcgtcctcgaccccggcttggtcttggtcatcgactttaaaaccggcggccggacggaggaagcggaagcctaccgggagcagatccgccgctatgtccggctgctgagggatgtccatcccggccgccccgtccggggtttcctgtcgtttgtcgaccgggatcggatcgaggaggtggaatgagcgtcggacggattcggctggtgcccccgcgggagagcctgatcgaggccgtggccggccttctgccttccggcggccgggatctttcccggtcttggatcgtcttcccggaacgccggccggcgtattacctccgcaagcatctggccggccggatcggagcgggattcatccccccgcggatcttctccgtcgacgcgttcaccgatttcgtttacagggagggcctcggacgtcggaaccggccgctcgacgtcctcgacgcggtcgcgatactcctgggcattcagcggagcgccccgggccgtctcggcggggagcgtttcctcacggccgatcatttcttccccctcggcgtcaagctctttcgggacctcgaggagctgatcgcggccggcttcaccggcgcctccttgaaggagaaagggctcgaccaggcggtccaggacgcgatctcgggcccgggggaagacttgttgaccgatcggtcccgcaaccgtctccaagacctctcgtattttttagaaaaattcctcgcggcggtcgaggccgccggcttttccaccccggccctgcgcctccgggcggccgccgacgggatcgaccgcgggcggttcgccggcgccgatcggttcatcttcgccggtttcttttccctgaacgcggcggaggaaaagctgatccggaggatgctcggctgggaggatttcaccctcctcgcgcatcaagcggccggagtcgaacgccttctcgagcgcctcggactagagccggcggcggccgccggcggagggccggcgggcggctcccttccggagatcacgttcacccggtgtcccgatgcccacggccaagtgttcgccctcaattccctcctggccccgaagctcgccgagccggccctcttcaacgagcgccaggtcgtcgtcctgccggcggccgagacgctgttccccctctcccatcaaacgctggacgacctcgccccggaggaatataacatttccctcggctaccccctgacccggacgccggtcttcacgttttttgagcggcttctccaggtcatccagtcggccgacgccgagggccggatctatgcgccggattatctgcgcttcgtcctccatccttatacgaaaaacatccaattcccggggccgggccgccggtccgacttgacccggatcctttttcacgccgtcgaggaggccctgaccgaaaaaaaagggcgggccttctgggcgctcgaggaaatcgctgtcgaaccggccgtccgcgaagccgtggcccgcttgtcccggggcgtggaaggcgcccccgtcccggccgattttctcgaccacctgcggaccattcacgaggcgctgcttgagcccctgcggaccatcgcctcggtcggcgatttcgccggcaagctgagccgcgtcctcgacttcgtgtatgagaacggcacggcccgccgccattatttcttccacccttacgccgaggcgttttgcgcccggctggagaggctggccggctccctccttcgggacatggtcttcgaggagcgggaaggatatttcaacctgttccgcaagatggccgcggccggctccgttccctttttcggcacgccgcttcgcggtcttcaggtccttggattttgggaaacgcgggggatcccgttcgaggaggtctatctgcttgatgtgaacgaggacgtcctgccggcgtcccggcgcggcgactccctgcttccgcccggcgtccgccgggcgctcggcctgcccgcgtcccgcgacaaggaacgggagatcgagcactatctcgacgtcctgatcggcggagcccgccgggtccacttgtttttcgtcgagggccgggaccgggagcgaagccgctatgtcgagaggctgctttgggagtcgcggaagcgggatccccgaaaaaaatcggaaacgcccgtcgggaccgtccggtaccgggccgccctcggcccgtaccggccggacgagatcccgaaaacagacgaaaccgtccggatgctccgggagctgtcttattcagccacctcgctcgacgcgtatctccgctgccctctccggttccactaccgctacgtcctcggcctgagggagcgggaggagatcgacgaggagatcgaggccaaggatgtcgggttgctggtccaccgcgtcctggaggaggagttcgcgccgcttctgggacggccgcttcgaccggaggatttcccggccgggcggctcagcagccgggtggaggaactcttccgccgggcgtttggcccgaatctcagcggccgggcgtacttgatgctgctgcaaacgaagcgccacttggtggattacatcaaccggtgccaggtcgaggtcatcctcgcctgccgggccgaaaacaaggacattgtgatcctggacctggaaaaccggatccgcaaggcgagcacgatccgccgcggggcgttcaccctgtccgggcgcttcgaccgggtcgagacgcgcggcggggagctctatgtcctggattacaagacgtccgccgacgagaaaaaattcgggatcaactggaagacgctcgatccagacgaccgggcgacgtggccgaaagccgtcggcagccttcagatgcccctttacaccgttctgtccgccgccctttatgaacgggcggaagatcgcatccagggccgtttcgtcatgctcgggaaaagccggatcggacccggaatcgaagtctcccccttcgacgtcccggacggccgccggccggtcgagccgtccgtccgggcggaacgaatcgcggcgatggggacgatcatcgatcggttgctggctgaaatcgtcgaccccggcgtccctttcaagccggcggccgaggccgaccgcgtctgtctctattgcgacttcaagggcctttgcaaccgggtctgatcgccggccggttgtccttggatccgaacgtcaatccgggatgaaataaacgtagatcttgcccgtcgacgggtagtggatcttccagtcctcggcgatcgctgaaagaacggagacccggaatttccccggctggacgggcagccccgtcccgaggatctggatcggcccccccatctgcccggtgtattcgaacgtcttggacggccggatcggccgggttccggtgtagccgatgtaattctgccagttggcctggtagacctccggcggcgtctgccaggcattgttcttccaaacctgggggtaaaccgatccgaccgaataaagaacccgcgcggcgtcgtattcgggccggtcctccatgtggaactcggcatcgatgaagatccggccgggggcgaggatggtgatgtcggtgtccgagatgacctccggggagatgtccgtccaggaatatgtccgggaagcctgggaatcagcgccccggcggtaaacagattcgttgccggttccccagatcttgacgtaccaggaggtgaagcgggtgtcgatctcagccagaaggaccgcggtcttgtagcccgggccggcggccgcctgcggctggggacggttcagggcgtagttcagagtcaggtaggtgtcccgccccgatccgagcaggacgacgtagttgcccggattcaagaccaggccggacagcgagccgagccgttcctccgccgggcgctggtcatagtattcgcggtaggcgtagatctcgccggccgggccgcggatcgtgaacgtgatttcgtccacgcggtcggggccggagcattgcatccagggggaatccaagcggaatcggaaaccggaagcggtgcatcccggcgggacttgaaagccgcccggaaagagattgcaggagctgtcccggtaggccgtcaccggcttgacttcgccgggggcggcggccggaggcgtttctcccgagagagcgtaggccagccggacggaggaattccgtccggacaataaatagacgatataggttccgggaccggcggtgatcccatcgagcggccccgggttttccagggccggccgcttgtcgaaatattccgtgcattcatacaacggctctcccgagacggctccgcggatgccgaaggtgatccaatccatgcggtcggggccttggcaggcctgccagggcgtctggaacgagaacacgaagctcgaccccgtctggttcgggggaacggtgaacgttccgagggtgatccggcagtcgttgtcgctgaagacttccaaggttttcagctcgggcagctgggcggccgcccccggccgggatcctccggcgaagaacaagacggcgagaacgcccaagaatgcaaacacccgtccgcggcgatgacgtggcatgatcttttcctccttccggcttcctgcgttgtttccatttttattcaatgttcccccccgatgtcaagccgcgatttcctcgcgggcggccgacggtggattgacatttccgggccgttgaccgaataatgaacccgtcttttccgggagagggaaatccatgacgaagcgcgcgtcggtgtgcttgtcggcgatcggtgcggcggcggccgggctggccgcggtggtcttctattcccggggcatcctgcccctgaccggcgtctatgtgccgaaaaacgaaatcggctaccatctcatttactcggccgcggccgtcgccggggcgtttctcctggccgccgccctgaagcgaaaaaaaccggtgttctggatcggggcgggacttctcctcctggggattccgctctttttcttcgccgtgtcccgcccgcctttcgactacgccccgatccggttgcggatcatcggccggagcttgatcccggcggcgttcgcgctcctggcggttttcgccctcaagggattccgggcggcgttcggcctgctgttcacggccttttcggccctgggcctgtatcacgcggttctgacggggaaatggatcgcccggggcggcccgccggccgatatcgcgatcgccctggccttggccgttatttcgttctttttcgcctgggccggtctccgggcgctccggcgcccgtcgtagcgccggctctcaagcgcccaaggcggcgcgaagcttcgccgtttcgaatccggatttgcgctccgccttcctcaggatgtcggagacggcgaaagcccgggagatcgcccgagccgcttgggcggtgatccctccccggccggagcctgtcgcccggcagacggccccggccgcaaggagccagcgcaacgcgtcaaaggcttcctgatggaagtactcgatcccctgccagcgattgaggccgagcgcccgccggaagcggtcgtcgccggtgatgatgccggccaagcgccgggcgttggccgcggcagatcggttcggatcgattcctcctccgtattcctccaaggcctggaagatcgccgggacattcggccggccttccccggcgcagcccgtttcacgccaggcgtcgtcgatgatccggtccaagccccaggcttcgatccagccggccggactttccttgtccgccgtccgcccggccgtccgcagaaccgcgccgcaaaagagcgaaatccaggccgtccgcggatcgagaccggccttaagccgcgaggcgtgcggcttggctcccggccgcctccggcccggctttttcccgggggcggcggggccgtccagggcggatttcaagaaacgcagcgcctcttggaaggtccgggagccggaagcccggccgcgtttttcgagaaccggcagccggaggatcgtttcgaattcgcgccgggccgcggccgcgatctcctccgggtcgatcgctttccggggccgcggttcgtcctcggcgatcgtccgggcgacggcttcggcgaacgctcgggctttctccccggcttgccgcccgggttcggggtcgagaggccgtccgggtcggaaaatcctcttcgtcatcagccaatcgaagaaaccggcgttggccagctcccggaaggccgcctggacggggcggagccggagatcgacggcggcccgctctacatcgacggttccccggcctcccaaggccgcggccaggcgggcatagagacgccgttcatcgtcccggacgagacggaagccggtgtagacggcccgcgaatacgcggccggctccaggtgcaatccctcgcgggcgagctcgccggctccgcggatgtattcaagtcccgagacggcgtccttgaagacgacccaggccgaggggtcgtcggggaggccgagaccctcggccagggagacggtcttcccggccgcggcggccgacctccggatccagccgcgggtttcggcgtaccggttgtgatacacgacaagagcccgctctccatccgttccattcgagaaaacgaggacgttttcgtcgacctccccgtcgggccggacaaaatcgtagagccggaagaggtcgacgccggcgaagagagcccgcttgcggaagagggggaagatctcgcgccgatgccgggcgacgagatcctcgcggggcgtctcgtcgtaatacgcccggcggtattccatcccgtatttttccctgaatccctcgatttgtccgtggccgatcatcggcaggccgggcagggcggccagcagcgtgcagacgccgaagtatttgtcatggtcgccgaattgatcgatcgccgtccgttcgtccggattgttcatgaagttgacgtagcgcttgaggatttcggggtcgaattccaaggtgtccttgatcacccgccggtaccgggcgttctcctcatcgcggagcatgttcatgaaggcgctgttgtagacccggtgcatgcccagcgtccggacgaagtacccttccatcagccagaacgcctcggccagaagaagcgtgccgggcgcctcgaccgccgtccggtcgacgacttcgcgccagaactccgcgggaaaggctgcctcgaacgccttgcggctcagtccatgcccggcccgggagggaatcgcgccgcccgtcccgggctccgggtaccagagtcgctggaagtgccgcttggccagggtcatggccgcgtcgaagcggatgatggggaagaggcgggcgacatgcagaatcgtttgaaggacggcctcccggacgcggggattgaggaaatcgagctgggcggtgtcgttccagggaaagctcgttccgtcgttgccgtgatagatatagcggacgctccccgtccgtttgtccaggcgctggaagaccacggccgcgtccgtccggtcgtaataccggtcctcgatgcggatggccacccggtcgtcccaggacagatcgggtccgttgaacgtataggaagggaaggggggctcgggaaggccgatgaaccagtcgggatgctcgatgacccagcgagaatcgatgcccatatggttggggaccatgtcggaggccagccgcacgccccgccggccggcccgttccttgagattgaggagggccggctcgccgcccaggtcggcggcgatcgcataatcgaacagggcgtaggccgaggcggccgcctcgggattgcccatgatctgcttgatgcgccgggacgcggggctccgttcccacaggccgataagccacaaaccggtgatgcccgcctcggaaagggcgtcgagctcctcgtccgggatctcgtccagtctccgaatggaacggccgtatttccgggacagctggtcgagccagacggaggcgtttttggcgatgagaacgagggaggacatccaatcgacgtcggggctgaaattctccgattccggctcgtccgggcgcggaccggccggtccgccgaagagagcgagcgattcctccacggaatcggctccaagacccggggcccgggagggaccgggaccgccgccgggtttctcctcctcccggagaagatccagcccgccgacgacgcggggaagcggacggcccagaacggcgctccatcgggcgaggatgtactcgagctgtcccttgagcgaatggggcgaggccaggacgggctcgttgagaacgtcgatgaggttccggcgctccggcccgaacggcggctgggtttcgaaaaactcccggaggcccgagagaatgcgcaggtaagctgtttcccgggacagcgaatcgtcgtcgaagagctctcgaaaggacgcggcggccgggttgagattagtcaggcggagcatcagcagctcttcgagagccgcttcccgccggggaggaaagcccggcgcgtcgaggtaagttcccgccgggacgcggttcttgtaaacggccggcgggggaaattcgtggaggaaaaaggccagcgttccccggaccgtttccggatcgagccgccgggcggacaggtcacgaagcgcgtcccgcaaaacgtggggattgacccggtcgcggtaggcctggaagaccgcgtgccggtattcctcgaggagccccagagcgtaaagatcgccggctcgaacggccttgtccggcggccgggcggcgttgattttatgggcgaaaagccgggccgaccggatgtcggcgaaaatcacccgcccgtcgaagataaacagcgattcgtcgaaatgatagacatcccgggcgcgacgggacacgtgaagggcgaacatgagcgtcgattctccgggcggccgcctcatcataacaggttttcggccgtcttgcatccggccggcggttggtttaaaaaggaaaggagttttatggagggatagccgcatgtcgcaaaaaatcagatcccggatcgccggcgcgctcgccgtcttcgccgccggggcgggcctcgttctggccggggccgtcccgcccgaaccggccacccttgtcctgactaacggaaagatcgtcaccctggacgcggccgtccccgaggcggaagccttggccgcgcggggcgaccggatcgtggccgtcggcccggccgtggagatcgcccgatacatcgggccggagaccgaggtcgtggatctcggggagcgcctggccactcccggctggatcgattcccatcttcatttcatgagcgtcggcgcatccaagctctcgctcgatttgaccacggcgaaaagctgggaggagatcgtcggccgggtcgaggcggccgttcagaacgccgttcccggagcgctcatcaccggccggggctggcaccaggaaaaatggaaccaggtcccccggcccaatatcgatggactgccgttccacgacgccctgagccgtgtctcgcccgataatcccgttatcctgacccacgccagcggccattcctccctggccaacgccaaggcgatggagctttccggcgttaccgcggacacggcggatccccccggcgggcggatcatcaaggacggagaagggcggccgatcggggcgtttctcgaaacggccatggatctcgtccagttggggacgtcccgggcgcgggcggcccggacgcccgcggaagtgatgaccgaaaaccggaagatcatcgagctggccgaccgcgaatgcctctccaaggggctgaccagcgtcggcgacgccggcgtcggctggaccacggttgagctgtacaagaggatcatcgacgaggggcgcctcggcatccggctgaacgtcatgctgagcgaaaacgcccggaggatcgaggccaacgcggccgcttggaagatcgagggctacggggcccatcacctgagcgttcacacgatcaagcgtttgatcgacggggctctcggatcgcacggcgcctggctcctcgagccttacgaggatcttccctcctcggccggattgaacacggaatcgattgaggaaatgaaggaaaccgcccgggtggccgtcgagaacggcttccaggtcgcgacccacgccatcggggaccgggccaaccgggagacgctcgacatctacgaggaggccttccgagcccatccgggcaaaacggacctgcgctggaggatcgagcatgcccagcacctccatccggccgacgtcccgcggttcgggaagctgggcgtcgtagccgcgatgcaggccgtccattgcccctcggacggcccgtgggttcccaagcggctgggggcgaagcgggcgggggaaaccagctatgtctggcggtcgcttctgaagtccggggcggtgatcgccaacgggacggatgcgcccgtcgaggcggcggacccgcttccgtctttttacgccgccgtgacccggaaaatgaacaacggcgaagccttcttcccggcccagaaaatgagccgggaggaagccctccggtcgtacacggtcaatggagcgtacgcggccttcgaggagggaatcaaggggacgctcgcggccggcaaactggccgacgtgacagtcttcacccgggaccttctgacttgtcccgaggaggagatcctttccgccgaggtcgcgatgacgatcgtcggcggaaaggttctctataagaagtaaggggagagcttacgggccttaaaacttcatccccaagccgattccgagcgtcaggccgccgacattgatgtcgaaatcggccggcttcatgctgcaggtgctgtatttcagccgggcgtccagaatgaagctcgagccgaggccgacggccacgccgccgaggccgcagaagccgagcttgctctgtttggcctcgcccatcggctcgttgctttccttgaacatgtacatccccagcccggcgccgaagtagggggagatcatcccggcttcgaaccggtagagggcgccgccctcgaaggccaggacgctcatcttggtctcttcctcggtgtaggtggttttccccgtggccgagcggtagttgccttccacccagccggccaggctttgaccgccgacgcggacttctccgccgaagaccagcccgttctcatacacgtccttgtaggccgcgtcggaggccaggaaatagccggcccgcagcagaaccatggagaacgtgttcttgcctcccgattcgccgaccacctgatccgggagcgcggccggggcgggtttcggggcggccggccgctcaaccggctgcatctcctctggaagcgccggcgcggtttcggccacttcctcgacgacggcagcgctgatgaagcccggcgtcccgtcggccagctgaatgaggtaccagtcgccggctttttcgatgaccgtgaagatctcgcccttattggcccccccgatgacgggagccgaggcgaagcccgactgccggatgttggcccgctcgaccgtgacccggatcttcagatcggcgccggcggtcaagccggagggcagaaacatggcgatcgccgcggccgcgagaatcatgaggacgagttttttcttgaacatggctgctcctttaatccagctcggccgtcaccaaggccggcgctccctcgcggcccgcgctcgtgatcgcggcgatggcgtactgggtggcggcctcgccggcgttgcggcgggaatacgttgtctgatcggcgttgacggtcgtcaacggcgtataggtcgatccggaaaccgtatagattttgaacgaggcgatggtcaggccggtgttgtcggcgctgttctgccacgtcagaatgtcgatgtactccgcctgggagaacgaccggttcaagaccttcttggctgaggcggtcggagcgtagatgtattggtaccaggccttgatggtcttgttccggttcatcaccacggtcaccgggttggtcgttccggtcgcgtccccggtccagccgttgaactgaacatagttttggggaaccgccgtgacggagacgctggcgttggggggataagcgtaagcccctggggcgggcgtcgtcgtgccccaggtgttgtttctctggatggtcagaatgaagctgcccagcgattggagggccttgtcgatttggatccgggggatcccggcgttgtatccgtcgcagacgctgtagatcagcttgcccttcgttcgaagggcggtcagcagggtcgtcacgcccgcggttgggaacgcctgccggagcagggcccaggcgcccgcgacatggggcgtcgccatggatgtgccgttccaggaggcatagcttgaatccgagtccccggtggaggaatagatggacgaacccggggcgtacagccgctgggtcaccgaatcccagttgttgaaggaggaatccccgtccgacttggtcgaggatccgaccgagaccgaggtcgaaatgcaggccggccagctgatccgtccgcaggaatagctgttgccggtggcgatggccgtggcgatcccggccgcccgcagcaggtcgatggccgatttcacggacgagttgacgctgtcgcagaaattcggatagaggcccccgcccaggctcatgttgacggaggcgattttataggcgcttcggagggaatagacgtaattcaatccggccaggatgtccgaatcccaagcggaaacgcagggcgagccgccgcaatcgccggccgtgaacttggagaaaatcttcacggcgatgacgccggcccccttggcgatcccggccagggtgccgtaattgccggtcgcgatacccgcgacgtgggtcccgtggtcgaatccgtcatacgtgctgggataatgaacggccgaccccggtccgttcatgacggccaggccgttgggacaatcgccggcgcccggcaggccgtcccggcccatcgcccggcaggcctcgatgatggttttgccggtgaagaactggtgcgtcttgcggattccggtatcgaggacggccacgtaccaccccgcgcccgtgtagcccatcgcccagacggccgtcgccccgacgagggcggccgtgtcgtccaggaggggatcgacccggatctcgtcggccgaaagcccgcctttcgggccctctccgccgggtccgggcggatcgatcagcttgcgcggaagatcctcggaaatatccaggacattcggggaattttccaggacggccagggcgttgggcgagacccgcagggtgatgtaggggatgtaatcgaagccggtgacgaattcgaaatccgtgccctggagctcggtgaggacccgccaggacgcgtactcgatcgttttcgccaagacctgatcggccagcgaccgctccagggcggtttccggcgtttcatccacgccggtgaaacgcgtcgaatcggcggtcaagttttcgatgtcggggacggtgaagtggacgatcacttggacccgcccctcggcccaggctttctcccgaagctggccgattccggcttggtttttttcgtgctgggcgagccccgccagcggccaggcggccagcacaagagccgcgagcaggtgcacggcggcccgtcgtgtttttttcctcatggtttttcctcctccctaagggccggcgatcccgcttgacccgcgccggcgaagacatccttcacctccgcgggccgaacgtttttccggctaatgtctgctgaaaatatattcttggatttttcccaagtcaagaaaaatctcgagctccgagaaaaatcgttcgaaggaagaaaataatcattgattaatgaaacagatggatattacaatcaagttgtgaaaaccagcgagacaacgaacgaggataccgtccggcgctttcggagcctgctccgcgccctggaacgcgagacgatccgtcccttcgacagccgcaaccggtgctgcggcctgaccttgtcccaatgccatgcccttctggaaatcggccggcggggggagatttccttggtcgatctggccggggtgttcggcttggacgccagcacgttgagccggaccattcaaggattggtccaggccggcctcgtcgaccggcggccgggcgagcgcgatcgccgctatatcgccatttccctgtccggcaaagggcaagcggccttccgggacatcgagcgccgcttcgacgagcgcgtcgccgccgttttggagcggatccccgctccccggcgggaggcggttgtcgaggcggccgccctgatcaccggcgccgttcgggccgaaaacgaatcgggcggatgttgtccgggaagaaaaggaaatgcctctcgttaaatttccttccgccgccggcctcgaaaaggagagctgttgctgcggtcccgattgctgtcgcgggacgaagagcggggagaaggccggtgtcttcgaccggtccatcgaccccgtccggttcgcgtcagggaggcggatgaccgcggtcggggagatccccaccgtcgccgcgcgtctcggcctccgcgaccgatggggggccctgcgcgtgcggctggggatcggccggggccggtatgcgatcgcccccgggctctatgcgctcggatcccccgatccctggtctcctgtctttgtcacagccaactataaattgagctttgacgcattgcggacgaagcttcccgggatcgatgcctggatccttgtgctggacaccgggggcatcaatgtctggtgcgccgcggggaagggcacgttcggcgcggatgaagttgccggccgccttgaagcgtccgggctcaaaaagatcgttttccaccggacgctgattcttccccagctcggcgcgccgggcgcctccgctcccgagatcgcccggcggaccgggttccgggcggtgttcggcccggtccgggcggctgacctgaaagcctttctggacgccgggatgaccgcggctccggagatgcgccgggtcaggttttcgctccgggatagactcatcctcgttcccatggagctcgccggcgtcgtccgcagcaaattttttctcgccgggctggggctttggctggcggcgatgatcgccggaatccgcggcgcccccctggctggagccgccgcggccggggcgattttcgcgggggcggcggcgactcccgtcctcctgccttggattcccgggcggatgttcgcggcgaaaggcgcgatcttgggggttctttgggcgtcggcggtgtgcttgatcggaggattcccgtcgggcggcccggcggatttggccgcggccgcggccgtgctcctgtttttgccggcgctttcggcgttcctggcgatgaatttcaccggttcgtcgacatttacgtcgctctcgggagtcgtcgccgagatgaaggttgctgttccggtcatgctcacggccgccgggctcggcttggcggcggccgttttggcggccgtcatcggaggatgaaggggagaacgatgcccttgcgtcatttaaaaaatgtcacaaccctaaaatatgatccccgcaagtgcgccggctgcggcttgtgcgcggccgtttgtccccacggcgtcttcgagatgtacggccggacggccgcggtgacgggccgcgatcggtgcatggagtgcggcgcctgtgcccgcaattgcgctttcggggcgatctccgttcgggccggggtgggctgcgcctccgccgtcctttggagcatgagacggagttgatcgcccgcggttcgcaggctcgatgacgaatcgcgtggatcttcttgatctgtttgaagacgaaacgtcataaccccctcattctcattgacaagagagggtcctgagcctattttgaaaatggagtccgcggagcggacgacgggctgtttcgaccggggcggaccgagggcctcggcgcatgggagtcggagcggcggccggcgtgagcggttgcggcgatgaggcggccgccgccaaggacgtatctgtttggaggcggccctcggtccgcccgctttgagcggcgggcggtttctcggattgtttggggttttccctttatggtatgacgatctcttgatcgtcggcatgccgttttcggcattccgcaatgaaagggagggccccttttctttttagccatgtccctcctttcctcgtccgcggaccggtcctcccgcccatgcgggaggtcgacaaggcggcaggaatctacgacccaacaggatttccaacagacgacgacgttctcggcgacacgtcactcggcctcgtcccggtgcctgacgacacctctccggtcacgttcaagtccttccccatcatgggaagatcgatgtcccggccggagccgcgatgtcaggcaaggaggaatttccgtcggcccgtatcgacgggaccggcggccggccggattccggccggcggaagaatgtcctataatgggtccttgaattttccccgggcgagcctccccaaggtccgtccggctggaggtgaatcgtgtctttcatgaaaaacaagatcgtctttgtgaccggggccagctccggcgtcggccgggcctgcgcccgggcgttcgcccgcgagggcgcgtcgcttctcttggccgcccgccgggccgcccgcctgaaggagctggcggaatccctggcggccgaattcggagccgccgtcctccccttcgccctcgatgtccgcgaccaagccgccgtggcccgggccgtggggggtcttccggaaaattggaaggccgtcgatgtcctggtcaacaacgccggcctgagccgcggcctggacaagttccaagacggtcttctttcggattgggaggagatgatcgacaccaacgtcaagggcttgctctatgtcagccgggcggtcctgcccggcatggtgacccgcgggcgcggccatgtcatcaacatcggctcgatcgccggccacgagatctatcccgccggcaacgtttattgcgcctccaagttcgcggtcaaggccctgagccggggtctgcgcctggatctttgcggaacgaacctccgggtcagcaccgtcgaccctggaatggtcgaaaccgagttcagtgaagtccggtttcacggggacaagacccgggcggcgaacgtctaccggggattcacgcccctcaccgccgaggatgtggccgaggccgttcttttctgcgccacccggccggcccatgtcaatatcagcgaagtcatcgtgatgcccaccgcccaagcatcgaccatgttggttcatcgacgggagtcgtgaaccaacatggtcgccctccatcgcgacgcgatcagggcgacgaccccggttcatcgacgggagtcgtgaaccaacatggtcgccctccatcgcgacgcgatcagggcgacgaccccggttcatcgacgggagtcgtgaaccaacatggtcgccctcccttttctatttcatgatcttgatcagccggcctttttcgaccttgtcctcgagagccagggcgttaaggaaggcgattgtcggccacttgtcggacggcacgccttgtccggccaggaattccttcagggtttgagccgtccccgcccggcggacggcgagctttttcggctggacggccaaccgcttgggatcggagaggttggcgaagctccggaccgtccggtcgaacgtgttccggaaagaaggataatcagccttggccgccatgctcgtgaacgtgtagatcatgccgttcttggcgatgcagtcgaaatcgacggccgtgacgggaggcgcctgtccctcgccggcttcctcgctgaccagataggttccgcgggcggcgcgcagaccgttgatcatccggttcgttcgggagacttcctggattcggacgttttcgagggcttcaatccgccggccgaggtagaggtccggcgagaggtccgtttcctcggccgtgaggatcatgcccgccttttcgtccttgctggcgacgacgacctggcggggcgtgttttggacgttccagccggccgggatggagaaaacgaatctcatttcgggatggtagaaggcgtcagcctcgacgtatccctggcgcggatcttcgccgtagatcagcccgtccatcttggccagcagttcgttgcggaaaatgttccgttccgcgtcctgcggctcgagcatcttttcggcttcctcgatccgcttttccgtcaaggggtgggtcgagaggaaattcggcagcttcatcccgccgccggccttctcttccagcttctggatggaccggaagaaggggatcatctgggccggggaatatccagcgccgcgggaatagaggactcccaggctgtcggcctggtattcgtcgtcgcggctgaatttcaggaagagcacctgcaggccgaccatcagaaagggcgcgaccttggccacgtcccggctgagaaggctgccgacgactaatccgccggtcagcaggagctgtttgctgtattcccggacggaatgccgggcgttgacgtgaccgagctcatggccgacgacggtcgccagctcggcctcggaattcatcatggccaaaaggccgcgggttacgtaaatataaccgcccggagcggcgaaggcgttctcgaccggcgtgtcgaggacggcgaaatggtactccagcgcgcggcgatgggtgtagggaaccatccgccgggcgactgtgttcaaataggcggagagcgcggcgtcttgatagagcccgtactccttccggatgctctcgtcggtggctttgcccatctcgatttccttggcttccgagacgagcatgagctcctgcttcccggtgacgggattcacggcgcaggagagggccccggacacggcggcgaggacgatgacggcggcgatgcggcggggagggaatctcattccagcctcctattccgatctctgagcgaaatctactcgaaacggaaggcgaattcaacccgtcgttccgcctgggacgcgctgtcgcggaaggggctcgccccgggacgttctttaattttcgcctccaaggtgatatattaccggccagatgtgctgcgaagccgctgtcttgcctcctcggccgggatccctcccggcggacgttcttgacggcggatctgtttctttcaggagaatcattcatgtttaaaggacatcccaagggcttgttcgtggcctttttcgccaacatgggcgagcggttcggcttttacacgatggtcgcgattttcgtcctgttcatgcaggccaaatacgggatgaccgcggccacggccggcttcgtctacagcatgttcatggtctgcgtctatttcttcccgctgctcggcgggctgctcgcggacaaggtcctcggctacggccggaccgtcagcttgggcttgatcgtcatgtttctcggatacgccctgctggcgcttcccacgcggatgaacacggggctttccctcatcgtcgcggccatggccgtcatcgccgtcggaaccgggcttttcaagggcaatctccaggccctggtcggaagcctctacgacgatccgaaatacgacgccctgcgcgaccgggctttcacgatcttctacatggggatcaatatcggggcgatgttcgccccgagcgcctcggaaatcataagcaattgggtccttaagggggccggattgacatatgacgcccgcatccccgctctggccaacggctttttgaaaggaacgctgaccgaggccggcgcctatcttgatatcgcccggacccaggacgccggcgccaccctggaaacgctggggacgttctccgagcgctacatcaacgccttgagcaaatcctaccatttcggattcggggtggcttgcttgagcctgatcgtgtccatgctcgtcttctgggcgttccggaaatattacaagcacgccgatttcaccgaaaaacaaaaggccaagtccgaggccctcaagtcccaggtcgtcgagctcacgcccgcccagaccaaggaacggctcgtagccctggggcttgttttcttcgtcgtcatcttcttttggatggcgttccagcagagcggcctgacgatgacgttcttcgcccgggattacacccagctgaacgtcggggccctgtcctacatctggttcgacatgatcggcctgctggggattttcctggccctcggaggcctgatctttctgttccggaaaggctcgggaaagacagcccgtctggccggcggggcggccttcctcgtgttcggcgccctggccgcctggcggtacgccggttattccgccgtcaacgagttccagccccagcgcttccagcatttcaacccgtttttcatcgttttcatgacgccggtcgtcgttggattcttcagttggctgaacaagcggaacaaagaaccctcggccccccgtaaaatcggctttgggatgctgatcacggccgtctccttcgccgttctcgtcatcggatcgctcggtctgcccagccccaaacggctcggcggcctcgtcgccccggccgaatcccaagtttccgtctactggctcatctcgacgtatttcatcatcacgatcgccgagctgttcctcagcccgatcggcatttcctatgtctccaaggtcgctccgcccaagtataagggcttggcccagggcgcctggttcgcggccacggccgccggattgtatctcatgggcttggtcggcggcttgtggatgcgggttcccctctgggcgctctggctgattttggtcgccgcctgcctcctttcggcgacgttcatgttctccgtcatgaaaaaactcgaacgggcctcggggcaataagcgcgatcagagggagacacgatacccatttccccctttttcaacgtcgtccttatcgcgccggagattccgcagaacacgggcaatatcgcccggacctgcgcggccgccggagcgcgcctccacctggtccggccgctgggattcatcctcagcgaccgccggctccggcgggccggcgcggattactggagcggcctcgaccttgccgttcacgagagcctggaggcgttcttccgggagacgccccccgaacggtgcctctttttctcgcagaaggccccacggctattttcggaaatgccggtcgaggaaagcgtctttctggtcttcggccgggaatcgaccggcctcccggaggagatcctggccgcttgccgggagcgaagcttccgcgtccccatgcgcccgggcgcccggtccctgaacgtgtccaacgccgcggcggtcgtcctgtatgaagctctccggcggcgcggataccccggcttgatatgacatcgttctcaagaatgaggtgactcatgaacatcgtccgcgtgccccggctggtcaagccgggggatttgaatcatcacggctcgctctatgccggccgggcggcggaatggttcgttgaagcctgttatctctgcgccgcccaggccccggatttgccgggaacgatggtctgcctggcgatccgagacctcgttctctccaagccggtccggggcggcgagaggattcaaatcgaaacccggccggtcaaggccggccggaccagcctgacgatttacggaaagatcacgacgcggtccggaccggcccgggccgagggattcgtcacgtttgtctgcgtcggcaaaagcggccggcccgtcgcccatcggctgcgcctcgatcccccgagggatgccgaggaaaaggagattcagcggaaggcgcggaatttctgaccggcgtctcccgcccttccgccggcctcgccttgccggggaaaggcgtccgttttatgatcttcttgatggacggccccgcggacgggacggaaacggtttcgatcctgaaagggaaaacggcggagccgggagggaggaggccatgaaacggaacgattttctcaaggccgtctgcgggatcggcttggccgggcgggcggccgccctgaacgccgggccggccggccggctgaaaccggaagaacaagaaaaggaaagggatcgcttcaaggaagcttggctccggacgctgatggagaacatggaaaagaccttggatcccgccgtccgggaacggttgatgaacgattgcggccgggagtgcgcccgccgcggcgtcctgatggaaaccgccgggaaatttcaaggcgacgtcgccggcttcgtccggaatctcggcccgaaagtcggcggggacctttgccgggtcgagggaaacatcgtccactggggctatccccggtgctattgcgagctggtcgcggccggtccggagcggcttccggacgcctactgcctgtgctcggccggctgggtcctggaagtcttcgaagccgtcgccggccggccggtccgagtggaggtcgtccagacgattaagcgcggcgcgccggattgccggttcctcgtgcgcctctgaagccgggcggccgcgtttccgtcccggttttcggatttccacgacgggagccggagctttggatgcgattggcccggaatcctcgtttttggtacactggcccctcatggtcgactggctgcgtggattatcgccgtttctccaggccttgctggccaccctcctgacctggggagccaccgccctgggcgcttccctcgtctttttttttaaaagaatcaaacggagcgtcttggacggcctgcttggattcgccgccggggttatgatcgccgcgagcttctggtcgcttctggccccctcgatcgagatggcccggagacaggggcgcatcccctggcttccggcggccgccggatttctcctcggcgggctttttctacggttgatcgattattttttgccgcatctgcatgccggctttgaaaaggtcgagggtgtcaagacgaactggaaccgcacggcccttctcgtcttggccatcacccttcacaatatccccgagggcttggccgtcggggtggctttcggcgcgatcggattgggcggcggcgcggccacgttcggagcggccgtcgccttgaccatcggaatgtgcctgcagaacttcccggaaggcatggccgtctccgttccgctccgccgggacggcctgtcgcggtcgaaaagctttttctggggccagttttccggcttgatggaaccgctggccggcgtcgccggcgtcctggccgtgtcccgggccgaagcccttttgccttgggcgctggctttcgccgccggggcgatgatctatgtcgttgtcgaggaagtcatccctgaatcccaagtcggcgaacacaccgacatcgcgaccttgggaacgatggccgggtttgtcttgatgatgatcctggatatcggattgggataaccgcataaccgggaccatgtcccggtcgaaaaacaaggagtccgatcatgatgcgttccgttgtcgccgccctccccccggcggaaatcgatgggtttctggcagccatcgagcttttttccgacttgaccccggccgagcgggaagccgtcgcggcccggttgaagcttgtctcctatgaagccggccaggccctcttcgaggaaaaccagccccgggaaagcctcttcctgatttaccggggagcggttcgtctttacaagaaatccccgctgggcgaggaaaaggagctggcccggttccgccggttcgatttcctcggtgagggagccttgatggacgactacccgcacgcgaccaccgcccgggcggaggagccgaccctcgccctcgtcttctcccggacggacgtcaccgggctcctggccgcggagacgtcgctggcggccaagatcctgtcccggacggcccgggtcatttcccggaggatgcgccaggcgaccaaccaagtcgtgaacgcggccgcccagtacatctccggccgcacccgccgggagcacgatctcctcggcgaacgcgacgttccggccgaattctattacggcgtccagacgctccgggcgacggagaattttccgatcactggaatcgccatcagccgctttccagagctgatcgtcgccttggcccaagtcaagatggccgccgcccgggccaaccgggacctgggactgctggatgccggcgtcgccgcggccattgacggcgcctgccgggagatcatcgacggccggatgcacacccatttcgtcgtggacatgatccagggcggggccggaacctcaaccaacatgaacgccaacgaggtcatcgctaatagggccctggagcttctcggccgggagaggggggattacgcccattgccatcccaacaaccacatcaacctctcccagtcgaccaacgacgtctatcccaccgccctgcgtctggccttcatggccagcacccgcacgctggtcgccgtgttgaaaaagctcatcgcctccttccgggccaagggcttggaattcaaggatgtcatcaagatgggccggacccagctccaggacgccgtcccgatgactctcggccaggagttcgaggcttttgccgccaccctgggggaggaggtcgagcggttggagcagaacgccgctcttttcaaggaaatccacctgggcgggacggcgatcggcacggggatctgcgctccggccgattacgccggccgggccgtcgcccacctaagcgagatctccggcgttacgctccgcctcgctccggacctagtcgaggccacccaggatacgggagcctttatcatgttctcctcggccgtcaagcgcttggccgtcaagctctccaagatctccagcgacctgcggcttctcagctccggcccccgggcagggatccacgagatcaacctccccaagaggcaacccgggtcgtcgatcatgccgggcaaggtgaacccggtgattcccgaggtcgtcaaccagatcgccttcaaggtcatcggcaacgacctgaccgtcaccctcggggccgaggccggccagctgcagctgaatgtcttcgagccggtgatcgcccagagcatcttcgaatccatcgagatgttgaaaaacgggatggacaccctccgtctccggtgcgttgacggcatcacggccgacgaagcccaatgccgcaagtccgtcgagcggagcttcgccctcgtcacggccctcgtgcccgagctcggctatgaagcctgctcggccctggccgaggaagcgatggccacggggcggagcgtttacgccgtcgtctcggaaaaagggctcctgcccaaggaacggctggacgagatcgccaagccggaaaacatggttcggccccggacataagggaaaaaaagggaatcgtgtttcttcggccccggcgactttccggcttatccggggcgtgtttgaaaatcgctgtgcattatgattaaataaggccctttacaaggagaacccatggacatttttgacaagtgcaagacggacggcggctattttgggatgtttcgggcccggaacgattttttcttcacccgtcccatcctcgatcccctgcccgggcgggagatgacttaccaggggaagaaagtcgttcagtggtcgatcaataattatctcggcctggccgaaaacgaggaattgaaagccatcgccgtcgagtcggcccggaaatacggccccggcgccccgatgggcgcccggatgatgaccggcaacacccagaagcacctcgacctcgaggccaagttcgccaagttcatgggcaaagaggacgccatcctcttcaattacggctacctcggcgttctgggcaccatccaggccctttgcgaaaaaaacgacacgattctgatcgataagctggcccacgcctcgatgatcgacgccatgttcatgtcccaggcccagttccgggtttggaagcacagcgatctcgacagcctcgagctccatctgaagcgggtcaaccgggatcgcaagggcggcatcctggttgtcaccgagggcgtcttcgggatgaccggggacatcgccccgctgtccgacatctgctacctcaaggataagtacgacgcccgcctgttcgtcgacgacgcccacggcttcggcgtcatgggaccgggggggaggggcacgggcgagcttcagaaatgcctggacaagatcgacatcaacctcggcacgttcgccaaagcgttcgccgccatcggcggcgtggccggctcgacccacgaggtctgcgagtgggtccggttcaacgcccggacccaggtcttcgccaagagcctcccgatgatctatgtcgacgtcctttcccgggctctcgattttgtggccgacggagaggcccgccgcgcccggatgtgggaagtcaacgccaagctgaaagccgggctccgggagctcggctatacggtcggcgaggtgccttcgccggtcactccggtcctggtccattacaaggacttgcatatcgccatggccgtcctccaaaaaatgcgggaggaggggattttcctcaccggagtgatctacccggtcgttccgcggggcatcgtcctgttccggatgatcccgacggcctcccataccgatgaggacatcgcccggacgctggccgcctataagaaggtacgcgacgagctccatctcgacttgggcgccgtcaaggacgccctggcccagtacgaaatcgaaaagaagtccgcggacaaggacgaggacgaaaacaaaaccgaaatatgattcagggacccgttctcatcaccggggcgtccaagggcatcggccgggctcttgccgccgccctggccgcccgggggatcccggtcatcgggacgtcccgccgccccgaaaccatcgccgatcccgtccccggcgtccggtacctgaccctcgaccaggaggacgacgcttccgtggaggcttgcgcggccgcggccggtccggtggaagccctggtcaataacgccggccaaagccagatcggagccgtcgaggacgtttcgatggagacggtcgaggagcttttccggatggatttcttcggcctcatccggctgacgaaggccgtcctcccggggatgagggaacggggccgcgggacgatcatcaacatcggttcgctgacggggacgttccccccgccttaccaatccgcctatgccgcgatcaagctcggcctggaggcctttaccaaggtcctccgccaggaggtcggccggcaggggatcaaggtctccctggtcattccgggttacattaaaacacatatcgagccgagaacgatcgctccggcggaaagcgtctacgcgaccgatctggccgccttccggctggcccgagacaagaaaatgggcaaagcctccccgcccgaggccgcggccgccaagatcatcaaggtcatggagatgaaaaatcccgggccggtctattacacggggcgccttgttccggcgatgggcttcctcaagcgcctccttcctgaaaagaccgcccagaaaatgatccgggggttttatcacctggacggctgagcttcgtcctttcccggcccgccttctcggagggcggatcggagaagccgtcatttcctcgcggctttccctcccgcgcacgaaacgagtcctcctcgtcgcttgttcgcgtttttcccgtccgcggctttaaaaagagaaccgttctcgaagccagaggacggaaggatcccgcttcccgatcagccgcttctccggatcgtcgggaaaacggccgcggcggcgcgtgcggcggatctcccgccggagaacggcggcccgggcgttcgcttttcaagcgcggataatacgttggcgtttcctcttgacatttgtcttctgataaaatatacgtgtacgtatagatatggttggaaacaaactaaaataaacgtgagggtatggtgggcaaagaaatgatgaccagggcggagctggcggaaaagacgggtatcgagcctgtggaaatcgatctttggacgaaagccaagatcctccggccggtcggcttcgccgaggacaagtcgccgttttattccggcccggacatcggccgcgtcgcccacgtccgcaagctccgggagctcggctacggcctggaggaaatccagaagatcatcaagaaatacggctggcccgggagcggagacgatcagaaaaaagacgccggcaagggcaagctcctgaccgtcggcctgctggccgaaaaagccggcgtcagtccccggaccatcaagcactgggaggacgtcggcatcctcgatcccgatctgcgaagcgagggcggctttcgtctctatgatgaaagctatgtctatctctgccagcttgtccgcgatctccaattgttcggttacagcctggaggagatcaaggcggtttcggacgccgtccgggatttcctgtctctccagaaggacctctccgtctactcccgcgaggaggccggccgcaagctcgatggccttcaagccgcggccgaagtccttttcaagaaaatgaggccgctgcgggaaggtatcgatcgttgggaggacttgttgaaaaagaacaagaaggagatcgccgccctcaaggccaagaacgccaagcggccgccggccgcctcggagaaaacccatgcctaagatcgccctgatcgagccccggtcgcccaacctccatatcttttccaagtttccttctccccgcctcgggaccgtcctgttggggacgatcatgaaacagcggggctgggacgtcgagctgtttgtcgaagatttccgggcgcttgatttcggcgtgatcggaagcgccgacatcgtcgggatttcaacgatcacgtcgaccgccccccgggcttatgccatcgccgggcgcgtccgggagatggggattcccgtccttttcggcgggccgcatgtcacattccttccgggggaaagcttggagcacggcgattacgtcctgcgcggcgaagcggaggagacgctccccgcatttctcgaggcgtggaggacggaggcggacttgtcggaaatcccggggctttccttccggcggggcggcgaagccgtccataacccccggtccgcgcctccccggaacctcgacgcctttccttacgcggatttcgacctgctcaaacccgaccggcggtggcgggggaaaaagatggtccttcccgtccagacatcccggggctgcccgttcgattgcacgttctgttcggtgaccgggatgttcggcaaagcttaccggttccggtcgaccgaacatatccttggggagctgcgcctccacgcggaccgaaaccggaatctcttcttctacgacgacaatttcgccgcccacaagccgcggacccgggagctcctcgaggcgatgatccgggagggattcaagttccgctggacgacccaggtccgggccgacgtcgcccgcgatccggatctcgtccggctgatgaaaaaagccggcggccataccgtctgcatcgggttcgaatcggtgaatccccggagcctccaggaatcccataaggcccaatccgtggccgagctcgaccgggccgtccgggtgttccgtcgcaaccggattcatatccacggcatgttcgtctttggattcgaccaggacgaccgggggacgttccgggagaccgtgaagtgggcccggaaatcgcgcttgacttcgtcgcagttcctgattctcacgccgctgccgggaagcgcgttctataagaaagtgatggacgaggaaaggatcgccttcaaggattggtccctctacgacgcccatcacgccgtcttccggccgagacggctgtccctggccgagcttcaaaaagcccagatcgccggccatcggcggttttattccttgaaagagcaggttcggaacgttctcgagggccgttggctggccatcgccatcaaccaatacgcccgggcgctcaaccggacctggcagaaaaagaaccggacgtttctcaaggctttggatcttctccgcccccgccggggaagccgggtctgggtggattaccggcaggacgtcggcctggattaaggaatcgggccggctcgggcgggcttacaaaatccgccgggcggcctgatagacggcgatgccgacggccgcggagaggataaagagataggcgacattgaacaacgtcaggcgccaggagcggctttcctgcttgaaggcggccaccgtggccgcgcagggaatgaacaggagctgcgaggccatgaaagccagcccgaccgccggaggataggcggatacgatcagatctcctaaagcgaccccctccccggccccgaagagaacagccagggcggcgagggagttttccttggcgatgaatccggcgaaaagggcgaccatcagcctccagtcgaatcccatcaaggttcccgccggctccagggctcggctgaatccggcgagatacgagctttccaccctcccttcggggaaacgggagagggcccagacagccagcgagacgggcagaataacgaccacggccttgcggacgaattcaatgcttcgccgccggacgagatcgcagatcgtccggggatgggggacgtggtaaagcggcagctccatgatgaacggggccgcgtcctggcggaaaaacagccggccgccgatcatcccggtggcgaaaagaaggcccagggcgagcagaatgaggccgatggcgaccagggccgcctgttcccggaaaaacagcggagccagaaaggcgataacggccattcgcccggtacaggggatgaggggaatcaggaacatcgtcaggaggcgggcccgggtcgactcgatgatccgggtgcccagcactcccggcacattgcatccgaagctgatgatcaggggaaggcaggatttcccgtgcagacgcatggcgtgcatgaaccggtccatgacgaaagcggagcgggccaggtagccgacatcctctaaaagcgccgtaaagccgaaaaagagaataaggatgggaagaaacgtcaacagcgtgccgacgccgccgaggattccctcgacaagggcgccccgaatccaccacggggaggaggcggtccagccgccgactaacccttgaagaccttggatgacggatttttccaggaatccctggagagggattccgagcgcgtatgtcagggaaaaaacggcggccatgaccgcggcaaacgcgagaaggccccagaacggatgggtcagccagcggtcgagccggtgggtcagcgagatcggcccggtctggggccggacgagagcggcccgggtcatccgctcgatccaggcgtatcgtccggaagcgacggcgaccagggcgtcgtcatgccgtttcaataaggcgaggatttcctcccaccgcccgggaggcacggccgcggcgactttccggctgatgtcctcgtccccttccaggatcttcaaggcgacccagtcgcggggatagggttcgaggtccgttccctcgagcaaacgtccggtccggtccaggaccaggcgatggtcctcccggattaccggtcgctgaggctcgggaatccgcccgccctcagcggccgcggcgatcgccttgaccagttccttgatcccgccccttgaggaggcctccatgggaacgaccggaaggccgagggccgccgacagcacgccgggctcgatcgccaggccttccttccgggccacatccatcatgttgagaccgatgactacgggaatccgcaggctgaggagttcggcgacaagatagagaccgtgctccagaagggcggcgttgaggacggcgacgacgaggtcgggacgttcccggatgatgaattcccgggcgatcagttcctcgggcgaggccgcggtcaggctgtacgtgccgggcaggtcgatcacccggaaggaggtccggccgtatggaaaggttccttccttgcgctcgacggttttgcccgcccagttcccgacgtgctggtgcaggccggtcaagaggttgaagacggtcgacttgccgacattcggcgggccggccagggcgactttgatttcggcgggaccagagaagctcatgcggggagccgcgcgggagcgataaggatccggtgcgcctctccccgtcctaaggcgacgcgggcctcacggatctggacgatcagcgctccccggccgggattttgaaccatgacgacttcgactcccggaacgaagcccagggataccatccgggccagcagccttcggccgccgtccaatccggcgacgacggcccgccgcccggagctcaattgagccaaggtcatcgggccggcggcccgcggcgtcacggtcggcctcccgtcggccggcagcttcggcagaaaccgccggcataaacatggaattccttgaggtccgcgttcagcgtccgcttgatttccgtcttcaggcggttgaccaggggattctcgcactcgatgacctgaccgcaggcgaggcaggagaagtgcacgtgggcggcccggcgagacgcctcgaaatgcccgtgagattgtcccagccgatgctcctcgatgaatccttcttttttcaataaggccagggttcgataaacggtggacagaccgatgcggggatcaatttttttcgcttccaaaaacagggtttccgcgtcgggatggccgggaattttcctcaacaggtcgaggatcacctctcgcttcgaggtgatgcgccggcccgaggctttcagggcgctcttgatggccgggattgaattcacgtcaggattccttattaagaatgattctcattatcaattatatccgaaaaaatccccttgtcaaggaaaccggatgtcctcaacagcctgattcggggcgggacggccccctccggcgaaatatcccgccgccgggacggcgtcctcctcgtgacgattttcctcgctcggccgtggacgcaaggagccggcgatatccggctcccagacgagagcgaacggcggggtttggagatcctttcagccgtcactccaggccggtgggggcgttgttcaggagaaggtcacgagttccggcccggcgccccttgccgggagaaggccgaaacagccgtctccgaagtcatcatcgatttattcggagaggcaacggaagagcctgcctggacgtaggaaggatgtagatgttaaaaaattagcatttcctcttgacaggcgggaataagggtgctaataatttagcatgctaatatattagcatatcgagccgaaagaacggggaggcccgcatgacgaatgaccgaagcctgagccggcgggaacgccaaatcatggacgtcatctacgagctgaaggaggcgacggttcttcaggtccttgagcgcctgccggatccccccggttattcggcggtccgggcgctgatacgagtcctggagcggaagggtcacctgactcaccgccgggacggaccccgttatgtttattcccctctcgtggccaaggaaaaagcccgtcgaaacgccctccgccacgtgataaggacgtttttcgacggctccacggaaagcgtcatggccgcccttctcgacatttccgagaagaatctgtccgaggacgattatgttcgtctccgggagctcatcgacaaagcccgccgggagggtcgctgaaatgcagggaatcacggctacggcggcgctcctggtcgaaggctttctcaagacaaccctcgtccttgtccccgccttgctgggggcggcggcctgtcggaggcgcccggcttctttccgccatttccttctaagcttcgctctcatcggcttgctgtttttaccccttttccgtcttctgccgggaggatggaagacaccgcttcttccggctcggccggccgcggccgtgtcgtcttccgccgttttttcttccccgccgccggcggcgctttccggcgcttccgcggcggtttccttcctttccgtccgtgacggttcgccgtcttcccgaagcggagaatccgcagccggcccgagcaacgccccgaccggcgggcgggcggttcccgcggcggtctccggcgctgctggcggattttttcccgctcatgcggccgtttttgcctggttcgccggattcctcttcctgctcttgaagctggcgttcggcctcgtcggcgcctatcgtttaacccgggaaggatgggagccgggagaccgaggctggcggattctgatcgcccgttttctggcggtggttccgctgaggaggggcgtccgcttgaaaagtcacccggaagtcgccgtccccctgacctggggctggagaaagcccgtcgtccttatccccgtcggggccgacgcttgggaggaagcggagcgctcggccgccctgttccatgagctttcccacatcaaacgggcggatttcctctttctgctccttgtccggctcagcctggcggtgttttggtggaatccgctctgctggctggcgtacgcccgtcttcgaaaggaacaggaaatcgcctgcgacgagctggtcctccgcgcggggatcaagccgtcgatctacgccgccggccttctggccttccgctcgtcggcggatttccgcggccgggctgccgcggccgggccaggccttttgggcggtccgttcttcaaggaccggctggcggcgattttgaggcaaaaacaaacgttcaaggaggtcaagatgaaatcgagaatcatgctggcggctttggtcgtcctagccatcgccttcatcgggacggcccgcccggccgtcgcgggcaacgcggcgtcatcttcgggcgctcccgtcgacgaaacgttgtccgccgcggctccggccgccgcccaggaggtgaaagcggagaaggaaaccatcaaggaaaaggaaaaagagaagaccgcgctgaaagagaaagagaaaaagaaagagaaggagaagacctctgtcaagacgatcatggtgacggccggcggcgacaaggaccagccgattgaaatcaccgtcacgggagaaggccaaattaaaaaactgcttctggacaagcccctgaccctcaaaaccggcgaggacggccggatcacgttcagcgtggagggaaaagtggtcacggtcccgaagggcgggacgatcagcatccggggcgccggcggcgcgctgcgcttcatcaaggaaggccggatcgtgcagctcgaagagggagaggccgccgacttggccggggacggcgacaagatcgtggtgatcgaaaagcccggggaagggggatcgaagcatacgatcgtcaaggaaatccggatcaagaagggagaggccggccgcgcgatcgagatcggcaaggaaatcaaagccggggagcagcccgtcaaggtgatcatcgaggagcacggaaaaggaaagcccggcgtggtctggacgacggccggagagggtccggcggccctggcggtgatcggcgagcgggatcttcttgaaaaggtcaaggcgatccgggagaaagccgaggcggtcaaagccaagacgctggaattcgaggagctcgaaaaatccctgaagaaccttgaagccgagcttaaggacgccgaggaccggctcaagaacatcacggtccggatcgatcaaggcgaggacgtccggatcgtccgggaggacgaggccgggaagaaatccttcgcctgggtcgaggcgggcgacgcggggaaggacggcgaaccgatgaaagtcgtctgccggcgcgatgcgggaacgctcgaaatcacgctgacggggatgaaaggaccggagggccggtcggtgcatgaccgtgccctggcccggataaagagagagctccccaaggaagccatgcttctcgactcgaatttcgatgagggcgggggcaaaatgacgttcaagctcgaagtccccgcggaaaccgcgacggacaaggacttcgtcgacacgatcatcgacatcgtttcggaagaaacgaagaaatagacggctccggacaagggcgtccctcccggacgggcgttcggtccgatcggaaaggcctttccgggattgcattcggcctcggattcggggatgataggccgagtccggagaaggagggacgccgtggatttaacgaaaatcatccgaaaagaaaaccttgtctactcggggaagtccaaggacatctaccggataccgggaggaccctggaagggcaagtatgccttcgtcttcaccgatcggggcacggggtacctggacaaggccggacggccggtcttcgatcccggctacgactccgtggtcggcgaaatcccggggaagggagccatcgccgggcggttcgcgacccgtttcttcaacctgacggccagtaagagaatccccagccacttcatcgcctcggttcgggacgaggtcatgatcgtcgaacccgccgttcccctcggcctgccggaacaagccccggaattcgaggggtccgccccgcttctgaacctggaatggacctggcggaacaacgctaccgggagcttctggcggagatacccgttcgtccggccgtgccagggcctggaccgggtcgtcgaggcctggaccaagggcgattcggacaccctcatcaccttcgagtcgctggtcgcggccggagtgatgacccgcaaggaggtcgtctggacggaggccttcgtcaagcggatcgcggcggtcgtcacggaggagatggcgtcccgggggcttcatctcatcgacgggaagatcgagctcggccggttgaagggcggcgacgggagaatcgtcctcattgacgagatctccccggacgtcctccgcgtctgcaaggggtacgccccggacgggaagaacggctgccggaaaagccggacatgcatccggacaagccaggcggggaacgtccgcaagatctcggggaaaaacgtcctgaccgccgcccagctggaggaggtcttccgaaccgcgggctaaaggatgaagccgacgcccagggtcagggtcagaacgtcggtccgcaggagtcggccgaattccggccccatgggttcggtccgcaggtcgttaatgtcccggccctttccctcgccgaaggcgtagagaaacccgatccagcggtacgtgacggccgcgttgagaaagacagagggccccaggtcgaggtgaagacctgcgccggcctggagccccgccccgacgtaggaggcgttcaaggtcttgcctcggtagaacgaaccgcccttgaccctaaggaacgggagggtgatcccgccgaggaaatacggccggagaggaagcttcttcagaaaaaaggacctcccgttgagatcgagcgcctcgtaggtcgcggcgcgggatccgttttcaagggcgacggtccggcggagacggaggaaggaaacgtcccaggacccgttgtaggatttcctcccgtagccgacggaccaagccccgccccgttccagccgcggaacgtaaaacgctttttcaaaatgccagagcgtcaggttccggttgagatcgcggttgaagtcgagaaattgcccggagagcaggagaaacgggccgtcgcgtcccgggccggccgccgaggcggccgagacgaaggccaggaggagcacggcggtcagcgcgcggcgggccatgggagacaatgtagaccggaggccggcgttagtcaacacggccggcggatcgacgggaacgtccaggacgatggatcggcttcgttcctcttggaacctcgacgggcggtttgtctttgccttcttccggggaaaccgaccattcccgcggcggttgacctccgcatcgtcttttcccctataatgtccggggagaacaacgatgcgccaatatgaaaccgacattctgatcatcggggccgggccggccggcctgacggcggccatctatgccgcccgctccggcaagaaaacgctggttctggaaagcgagcgggcggcctcgcggctcgccctgggatacgagctcgagaattatcccgggttcgccgcgatcaacagccgcgagcttctggacaagttccggtcgcaggcggccggtttcggggcggaattcgcgacgggcgatgtcatcgccctgtcgctggagtccagcccgaaattcgtctcgacgtccgacgcctttatcgaggcccgggccgtcatcctggccaccggcaagccgttcgccaaggagcggcagatccccggagaggaacggctcctcggctacggcgtgagctactgcgcggtttgcgacggccctctctataaagggcgcgacgcggccgcctacggccattcggccgaggcgatcgaggatatctggatcctggatcagacgggcgtccgggttcattggatccccgggcgggtcaaggatcccgccgccctggaggaagcgttcctcaaggccgagaagcgcggcatcccggtccacggcggggccgagatcaaggagatcgccggagagaagaacgtcgaacgcgtcgtcttgaaaagcgagggcggcgaacggacgctggacgtcgaggccgtcttcatttttcgggaagtcccgaccggcccgctcttcgccaagtccggcctggccctcgaccataagcaatgcctggccgtggaccgcttccagaggacgaacctcccgggcgtcttcgccgccggcgatctcacctgcggcggccttcaagtcgtctcggccgccggcgaaggctgcgtcgccgccctccaggccctggcttatttgcgcaagtagccctatttgcccttcatcagctcccggacggccgcctcgatctgctggtcgcgcccggccgacatgacgtccggatcgttcttgacccggatgtcaggctccagctggttgttctcgcaaagcttcccgtcgggcgtccgccatccgccctgggggatcccgaagcggagagtcggatcgatctgggtttcccaccagacgaacgttcccgtgcccggcacgggcatgcccagcgtttgcccgatccccttgatcttgtattccacggggaaaaggtgggcgtccgagtaattggcttcgcccatcaggacgatcgacggcttgatccacttgttgtacggctcgtagccgacgagctggccgcgaggcacgatgtcgaagacctttcggccgttcaagaaatccgcgagttggtcgtggaggctgccgccgccgttgaagcgggtgtcgacgatcagggcgtccttctccatgctgaggccgaagacttcatcgatgaccgtccggaagctctgatcgttcatgccccggacatggacgtagccgatccggccgcccgaaagccggtccgtctcggcccgccgggccaggacccagcgccggtagagaagggcggcctcttcctccaaggtgacgggcctgacggcctcctcccagcgcgaggacgccgccggatcgagaacggaaagcagggtgagctggccggccttccggttgagcagggcgtaatggtcgatcgtgccgtccagggtccggccgtcgattttttcgatgatgtggcccgcccggatcttgaggctcgccttgtccagcggcccgccgctcaagacctcggcgactttcaggccggggccggcgtaatcataatccaggaacaggccgagcgaagccgtggcgtcggccgacgtcgtccgggccgggttgtaataacagccggtgtgggaggcgttcagctcgcccagcatctcgctgaccatctcggcgtaatcatggttgttgttgatgaaggggaggaatttgcggtagatggggtaaaaggaatcccagtccgccccgtagagatcctccaccaggaacttctgcttgatctgccgccacatgtggtcgaacatgtaagctttctcggcggcctcgtccaggcgcatctcgccggtgatggccaagggctcctgccggccgctgtccggatcgaccttgaggatccgtccctcggctccgatgaagagcgtcttgccgtcgggcgacagctccatcgagggcctctggacgcccagcttggcgagcagcttggtgtcgcgcgtccgcggctcggtcacccataaatcataaccgcgttcgaaccgggccagatagaagagcttctcgccgtccttgctcaagacggcgtcgctgatgtccgccgaatgaatggagaggcggaccttccgccggtcgagcccgtcgagctcgaacgccagttccttcttcggttcttcctttttaaggccggccgccttggccttggcgtccgcggccttttctttctccgttttctccttttcgtccttggctttttgctccgtttccttcagcaaagcgaattcggccttggagaggaggaaccggtcgtacgcctcccgggtgaaaaacatcccgtagatatcgtaggtcatgggattgccgtccgtgtttgtcaagccctcccgggtcgagccgtagtacatcatcgtcccgtccaggccccagcggacgccgacgttgtcgaatccgctccgggtcaggttgatgacccggccccggccgtcgctcgagacgaggccgatctggggggtgaagaggcggacgacgccgaattggaccagaaaccacttcccgtccgggctccagcggtagctctggtcgccgtcggcgtaggagtaattgtacgttcccggcagaatcagccggctttgcttggtcgccaggttgatgaccttcaaggcggtccggttttccaggtaagcgacttccttgccgtcaggggagaattcgggctgaaactcctcggccgccgtggccgcgaccggttcctccttgaggagcgtcgcggcgaagaaatagggctcctccttgcggacgatcgaggtcgcgtagacgttccagttgttgtctcgttcggcggcgtagatgagtgtccggccgtccgggctgaagctcaccatccgctcctgctcgggggtgtcggtcacgcgcttggccggcccgccttcggcgctgacgacgaaaatctcgccccggaagacaagggcgatttctttgccgttgggggataggcgcatctcggtgagcccgctccccccgacgggcagaacccgcgggaggacggcccggccgtcctgggcgatgcggacggcgagcttttggggagccgcgtccccggcttgggtgtagatttccccgtcgtagccgaagcacaggacgccggtatccgagcgggtcaggaaccggaccggattcttggcgaacgaagtcacggcggtcgcggaggcgggacggctcagggagctcttgtagatgttgaacgtcccgccccgctcgctgagaaagtagaagtcgtcgccgttggggtcgaagacgggattccggtcctcgccttcattatccgtcacctggatgttcttcttggccttcaagtcatacacccagatatcgcgcgtcaccgcggacgtgtgatgcttgcgccagacgttctcacggcccttggcgtcgtggtagaggattttgtccccggcccggttggagacggccgcgaccgccggctgggtcaggacaagggacgcttccccgccgtcgacggacacgctgtagagctcgggaaagccggtcatcgggaactggacgttggccgccgtgtcctggcgggccgaggcgaagaggatccgccgtccgtcggccgtgaagccgctggggatgtcggccgcggaatggaaggtcaggcgccgggcttcgccgccgccggccggcatgaggtagatgtcgaaattgccggagcggtcggaggcaaaggcgatccaccggccgtcatggctccagaccggggaataatcgtaggcttcgcccacggtcaggggaacggccgtcccgccggaagacgggattttgaaaatgtcgcccttggcgcagaaaaggatggcttggccgtccggcgagatggccgggtaccgcaaccacaagggattgtcctgggaggcggcgggagccgcgcccagaagggaggcggcgagcacggccagggcggcccagggcgtcgcggaccgatggacgggacgcggccggcggaaacggagggaagggaacggacgaagcatggggattctccttgatgaaggcatctcattatcatacgccattcaataaagaaaagttggcaacagccgccgggccgtgttatcttccgggggacaaggaggcggtcatggccatcatcatccgcggcggatcggtcttttcccccggggcggacggcgcccgcgacattctcgtcgccggcggccggatcgaggcgatcgccggcccggagacggtcgtttgccggggattcgagacgacggtgatcgaagccggcgggaaaagcgtcctgcccgggttcattgatccgcacgtccatatcctgggcggcggaggggagggcggtcccgcgacccgggctcccgaaatcgccgttgaggatatcgtcgccggcggcataacgaccgttctcggctgtctgggcacggactcggtgacccggcatatgagctcgctcctggccaaagcccgggccttggagatcgaggggatctcgacgcgatgcttctgcggctcctacgagatcccggtcaagaccgtcaccggcagcgtccgcggagatctcgtcctgatcgacaggatcatcggggccggggagatcgccctgtccgaccaccgctcctcccagccctcgttcgaggaattcgcccgggcggccgccgaatgccgggtcggcgggatgctgggcgggaaggccgggattctccacgtccacatgggagacggagcccgcggcctggaatacctgcggcggctcgtccgcgaaaccgagattccggtgacccaggtcgtcccgacgcactgcaaccggagccggcggcttctggaggaggcggtcgaatacgccaagtccggggggcggatcgacgtgacggccgggaccgatccggaccgagaatccgaccatgacgtgagcgtcgaaacggccgtccggctgcttataaacggcggcgtgccgctggagcgggtgaccgtcagctcggacggcaacggaagcctgccggttttcgacgcagccgggaatctcaccggtttgaccgtggcttcgccgcgggcgctcctccaaacgttccgttcgcttgtcggccggaagatcctgactctggagcaggcggcccggctcttttccgccaacccggcgtcgatttaccgtctggaggaaaagggggcggtcgccccggggcgagacgcggacctcctggttttcgacaaggagctgcaactgacggacgtgatcgcccgcggccgggttttgatgaaggacggaaagctcctggtcaagggcgcgttccgctgaatcggcggttcgggattggaatctggcgagggagaccagggagctcacgacggccggagcagcggggcgggccttgcgggaggcttttttttcgtcctcaagccgggccgtacttgaacagcaccggcggaatcagcgtcagcagaccgaaaatcacccaggcgatcaccagggggatgagccacttggcccatttctcgtagcgcagcccggccagcccgagaacccccatcgtcactcccgaggtcggcaggatgggattgatgtactcggccagctggaaggcgaagacgctcgtctgccgggtgatcccgaccaggtcgcccaggggagccatgaccggaatggtcagggccgcctgggccgtccccgagtggatgaagaaattgatcccgcactgggacaggaacatcagctgggccgacaggaccgggtgaaggttggaaatcgccgaggccatcccggccaggatcgtgtccatgatccggccgtccgtggcgacgatgaggatggcccgcgtcgtcccgatgatcagggcggcgttgaccatgtccttggctccgtcgacgaaggccttgccgaactcgtctcccgtgagacggcccaagatcccggagaggatgcccatggccaggaatatcccggcgatctcgttgatgaaccaccgatacttgagaatgccgaaaatcatgaccccgaatccggcggcgaacactccaaggaccagcttgtgccgcaagagaacggggagtttttccatggccggcgtcgtccccaggagcttttttcttttttcgaggtcgtccgcgtagaccgggctgatctcgggcttcttgaggacgcgggcggcgtagcgcatgacgaggaagacggcgatggccgtgcctcccgcccaaatgatcagccggtagcccatccccgaataaagaggcaggccggcgatcccctgggcgatgcccacggtgaagggattgaagaaggcgccggcgaagccggcggccgccccgagaaacgggatcgagacgccgacgatggtgtcgtagcccagggaaagggccagggggacgaagatcaggatgaagggcatggtttcctcgcacatgccgaagaccgccccgccgagggagaacaccgtcatcgtgaccggaatcaagagaacccggagggccctgctccgcccgaagaggcaggcgatgttgtggatgacgaccgtgatcgccccggttttctggatgaccgagaacgccccgccgacgatgaggaggatcccgatgatcgccgcggcatcgatgaatccccgggcgggagaaacgaagagcccgcccaagccctggggccggctctcgatccgctggtaggaaccggcgacgggaaccaggcgcccgtctttttccacccgctgatattcgcctccggggatgatccaggtcgcggccacggtcaggacgaccatggcgtagacgaggatgagcgtgtgggggattctcggttttttcacttccggcctccctggaccgccccgatcgccggatcgtagacgtcgccgggaaggaggatatggatggtcatccccgccgcgcccaggagcccgtcggccgtccgggagccggaagcccggcgggcgtcgtagacgacggcttggcggaggccggcgatttcgtacttgccgtcgggacggacccagacggccgtcgattcgtcgattccgacgccgagaagcccgggattctccaggacgacgctcatcagccggttgtgccggcggcgggtcacgaagtgctggtcgatgacggcgccggtgatgaatccgaatccgcggacggtctcgacattgcccgcctcgatcgtccgtccgttctcgtcctcctcccgggttctcttttcgttcccggtgatcatcatttcgctcatcgccgcggccccggcgctggtcccggccacgacgagcccccggccgtaaagctcgagcagcctttggtggatcggcgtgtcgaggagaacggccgtcaggcgggattggtctccgccgcagaaataaacgccccccgctccttcgagaatagcggcgctttccggccggagcgcctcctcccgggtcagatggaaccaggaggcgtcgggcgctccggcggctttaacctcggccgccgtttccgggccggactcctccggcacgccgctggccatggtgaagatgacgattttccccgcgccgaatccccgcgacagggccacgaatttttcagtcaggccgtccggccggtcgccgcccccgatgatcagcagggaccctttgtccgcggccggaagaacgaaggaaacaaggagccctaagacaagggcaaagacgatctttttcaccggatgcctctctctcggatgcgcgggtgaccgcgcggccgaaagcatcctatcttcaggccggacgaagtgtcaagaacggccgggctcgaaatccgggccggccgcgggagggtcgtcaagccggcggatcggagacgccggacacggtgatctccgtccggatgtcgacgctctttttcagcatggcgaagacggggcaatacttgtcctcggccagctgaagggctttgtccacggccgcgggatcgaggcccgggccggacacgaggacatccagccggatcgaggtgaagacgcggggatgctcggcttgcttgaggcccttggccgtgagggaaaacccgcggacgtcctggcgcatcttccggagcagggagacgatgatctgcccggcgcacgaagccaagctgatcagcagcagctccatgggcttcgctccgtggtcgtcgccctcgggcggggggacgtcgatggcgatgggctggccgaaatccgttcggccctcgaattccagttttcccttccagatgacgcgggcggccagctcttcagccatgctcatgtcctttccaaagtgacgctcggcggatcgcccgtccattataacgattgggtgccgcttggctcaactttcctccggccccatcaggccctggctgtctgacttccggtgaacggcgccgccggaaaaatcaatcccccaagccccgggaggcgtcccccatgccgtgacccgggacacaggctggcctggggatcgttttttccgtacaatccattcccaacccatgatggtccggtttaaagactccaccgcggacgagctgcacgccgccctggcgccccggggcatttccctgcgccttgcccgacggcttcaagcggccgtgctgaggcgcgacgccttccctcggagcctgccggaagtctcggaaaaaactctggcctgggtgagggagaacgccggcctgccgaagctcgttcaaaaaggcaaagcggtttcagcgcgggacggattcgccaaatatctcttccaaggcgaaggtcccgaacccttcgaagcggtccggatcccgctgcttcatcgggccggagaagagaaggttgtcgcctgcctgagctcgcaggtgggatgcgggctgggctgcgccttctgcgcgacggggcggatgggccttgtccgcaacctctcggcctgggagatggttgatcaggtcatccgccttgccgccgattcggaacatcccgtccgcggcgcggtgttcatggggatgggcgagccgatgttgaactatgaggcggtggtgcgcgcggcccggatcctgaacgagccgtgcgggctggccatttcggccgaggccatcagcatctcgacggccgggatcgtgccgggcatccggagattcacggccgaccggttgccgttccggttggtcgtatcgctgaccagcgccgatccgttccggcggcgcggcgtgatgcccttggagcggacccatcccctgccggagcttatggaggcgcttcgggaataccacaaagcgtccggacagcgcgtgatcctggcttggacgatgatctcggggttcaacacgcgggaagaagatgccatccagctggccgctctggtccgggggttgccggtcaggcttgatttgatcgatgtgaacgacgccgcgggccgcttcaagcccccgtcgcctccggagcttgccgcgttccgggatgcgctgagaaagcatctgaaaatgccggtggccagacgctacagcgggggaagggacatccacgcggcctgcgggatgttggctggctcgcttcccggcccttccaggcgggaaagccgctcgcctgcttcataaaaatccgttttcgccggggagggaatcccgagccggccgtcgcttgatcaagccggcggcatcgagcttccgccgcttgtcgaacatcgtgaccgccgcgatccgggtccgagaaaaagggattcaaggacggctttcttgatgacctcggcgcatcattgtcgcggcttcattcggcacgacggaaaattcatcaagtcgttccctttcccgattcccgagccgatcatcaagcctcttctctgtggcgttacatctcgatgtccgtatggctatcaatttagatatgtgatatattttatttaacgcgatgatttcattaatcggaggtcccgtgaaaaaatcccgtcgaacctttgtctgcgtttttctcgccttgacgctccttcttccggttttttcgtccgcccaaggcacccgggcggattacgaacgagccggcggcttgcaggagaaatggaaaaacctggccgtcaaccagcccgaccagccggaatggatcgaaaagacgcataagttctggtaccggaaatcgaccgccgctggatatgaattcgtcttggtcgacgcggacgccgcgacgaaaacggccgctttcgatcatgaaaaactcgccggggctttgaccgaggctctcaaggaccggatcgatccgaaaaatcttccgttcacccggattgaatacgtcgatcaaatgaaggcgatcgagttcgaaagcggggaatcccgatggaaatttgatctggccgcggggaccgtcgtcagaatcagccgggttctctcccgatggagcgacgaaagcaactggcaggatgtcggcggacgggccgagccggccgcctcggccgaagcgaaggcgtctcccgacgggaaatgggaggcgttcgtcaggaattacaacgtttacctccgtccggcgggcggggctccggggggcggtccgcagaccgccggcttcgccctcagtctcgacgggatggagagcgattactacagcttccgatcgatcacctggtcgccggattcaaggaacatcgccgctttccgcgtccggcgggggcctcaccggcggatcgatttcatcgaatcctccccggacggacagcttcagccgaaaaccttttcgctcgggtacaccaagccgggcgacgtgatcgattttctccgcccggtgctcttccatgtggacgagcgaaaagccgtggacatcgacaatgctctcttcgccaatctctacgatctttccgagctccagtggagggaggacggccgggccttcacgtttgaatacaaccagaggggccaccaagtctaccggatcatcgaggtggacgcggcgaccggccggccccgggcggtcatcagcgaggaaccccgcacgtttttcccctacttggaaatctccagctacgggaaaaaattccggtacgacgccgccgacggccgggaaatcatttggatgtccgagcgcgacggttggaaccacctgtatctcttcgacggagcgaccggccaagtcaagaaccaaatcacgaaaggcgaatgggtcgtccgcggcgtggacaaagtggatgagacggcccggaagatctggttcaaggcgagcggaatgaatccgggccaagacccttatttcactcatcattactcgatcaacttcgacgggacgggcttgaccgccctgacggacggcgacctgacccaccaggccgcgttttcctcggacatggcgtttttcaccgacctctcttcgcgtcatgaccgggccccgatcctggacgtccgccggacggccgaccgcggcctcgttctccgcgtcgagcaaaccgacatctccggtcttgtcaaggccggctggaaggcgcctgaagccttcagggccaagggccgcgacggccggacggatatttggggcgtcatttaccggccgttgaatttcagctccaagaaaaaatacccggtgatcgaatacatctacgccgggccgcacgattcccacgtccccaagacattcgtcggcttcagtcccctgcaggccctggccgagctcgggttcatcgtcacccaagtggacgggatggggacctccaaccggtccaaggcgttccatgattattgctggaagaacttggccgacgccggctttcccgaccggattctctggcacaaggccgtggccgccgaataccggtattacgacatcacccgcgtcgggatctacggctggtcggccgggggacagaacgccctcgccgccctgctttttcaccccgagttctacaaggcggccttttcgtcctgcggctgccacgacaaccggatggacaagctctggtggaacgagcagtggatgggctggccgatcggccccgaatacgccgcttcgtccaacgcggaaaacgcctggcggctccaaggcaagctgctcctgttggtcggggagatcgatacgaacgtcgatccgtccagcacgatgcaagtcgccgacgccctcatcaaggccggcaaggaattcgagctggtcgtcctccccggcgtgaatcataccagcggagggacgtacggagaccggaagcggaacgatttcttcgtccgcaacctcctcggcctcgagccgccggactggaacgcgccggggccgccggcgaataagtagccttactttttccagaccggcaccggccggccgggcgtccagggcgccccggcggcctccaaggcctcgcccagccggcgcaggtctccgtcgatcaggccgcggagcttttccaggaccgccccgaaggcgtcggccgcgacggcgtaatcctttttcacggtttcggtgaggggcccgatcgagccgagctgccgcgagacgcggtccaggagcgacggcgtccgggcttcggaccggcgcatgagggtgacgtcgccgtggaggtcacggagggcctcccggatcccggtttcgatcgcccgggcggtttccgcgagcttgggatcggccgccggcgtgtcgagcagcgctttccggacgtaggccaggctccgcagggcgctgtcggcggcttcgccggctcccatcatcgcccgctgcagcccgcccgccttttcctggaaggccaggagggcggctttgtccttttcggcgagggaggtcagcgtcagcgattcgacggtgaacgtctccgggccggcgagcggaatcaagacgccgtcgattttttgggccagggaaacagagaacgttcccgggacaacgagcgggcccatcggctccatgtcccagggatcgcggaccgcggactccagccgggtcggctcgacggccggatagcgaaggtcccaagcgatccggtggaggcccggcccggccggtccggtcagccgccggacgaccgatccgtccgcggccgcgacggtcaggatgatctcgggcttttcctcgtcctcctccttgcggagaacgtcccagccggggaaagacacgggttttccttccttcagaaacttggcttcctcgtcgcgccgggcctgagcggccggcttcagcccatccttaagataataggtgaaaatcgcgccgaacggcggattgggagcggtgaagaacgtctctccgagacagcccttgtccggtgaatcgatcggcctccgcggaatgtaggagagggtctttttcaccgggaagagcgcggccggccgggcgagaagggtttcgtcgatccggcgcagcggggagaaatcgtccaggacgaaaaagccgcggccgaaagaggcgccgacgagatcgccttcccgctcctggatctccaggtcccggaaagagatcgtcggcacgccgccggccatcttcagccagcgctttccgccgtccagggtggcgaagacgccgaattccgtcccggcgaacagaagatccttcttgacgggatcttgggccacggcccagacgatcgtccgggccggaagatcgcccgaaatcgagacccaggtccgcccgcggtcgtcgctccggaggagaaaggggcggtaatcgcccgtcttgtgcaagtcgacggcggcgaagaccgtgtcccggtcggtccgggaggccttgatctcgttgacgaagaaattctccgggacgccgggcaggcgatcgattttccgccaggattttcctccgtcctcggtgacctggatcagcccgtcgtccgtcccggcgtaaatcaaaccctccgccaggggcgactcgctgagagtcgtgatcgtcgagaagagggacatcgccccgtggtcccagagggcgtcgacgctccaggttttgcccatgatgggctgggcgaggcggaagatgttccgggtcagatccggggaaatccgcgtccaggagtcgccccggtcgtcgctcctccagacatgctggccggcgtagtagagccgggtatgggaatgcgggctgatgaggaccggcgaatcccagttgaagcggagggccggttcgcccggctcgggcttgggggagatgaagatcgtttcgtggcttttccggtcgtagcggaggaggttgccttcctgccattcgaggtagatcgtatccggatcgacggggtcgatcgcgcaggcgtagccgtcggctccgaacgtgatcgtccagtcgaagttggcgatgccgttggcgttgagggtgcgggagggcccgagctggctgccgttgtcctgggttccgccgtggacgttgtagaaggggaggtcgttgtccaaggcgagcttatagacttgggtcacgggcaggttctcgaagaaccgccatgtccgcccgccgtcgcgggtctcgtaaacgccgccgtcgctgccgttgaggaggtaatcgggatcgccggggaggaaggccagggcgtggttgtccccgtgcttgtttttctccggaacggtgcggaacgtccggccgccgtcgtccgtcacctggagccagtaatccatctggtaaacgcggtcgaagacgttggggtcggcgaagatctcctggtagtaatgggggcccgtgccgccgctgaggtaagaattacgcttctcaaagctttcaccgcggtcggccgagcggtagaaaccccgttcctcgggcgaggcctcgatcgtggcgtagacgacgcgcggatcgaggggcgagacggccaggccgattttgcccatgtcgcccttgggcaggccgacggagagcttgcgccaggtttttcccgcgtcctcgctcttgtagatgcccgattccggcccgccgcccatgaaggcggcgacggaccggcggcgctggtaggcggcggcgtagaggatgtcgggatcgcccggctcgaattcagccgaggcgacgcccgtggcggccgagatgatcaacgacggcgtccaggtccgcccgccgtcgacggacttgaaaaggccgcgctccccgccgggcgaccaaagcggaccctcggcggccgcgtaaacgacgtccggatcgcgcggatcgatcaagatccgggcgatgtgctcggaattcttcaagcccatgttcgtccaggtcgtccccccgttgaggctcttgtagacgccgtcgccgtagccgacgtggcggccgctgacgttttcccctgttccgacccagacgatctcgggacggacgggatcgagggcgagacagccgatggaataggaggactggccgtcgaagaccggcgtccaggtcgtcccggcgttttcggtcttccagacgcctccggagccggccgcgacgtaccacgtcgcccggcgcttcgggtggatgacgatgtcgctgatccggccggacatgacggccggtccgatattgcggaaggcgaggccggagaggatctcggaggtgagaagaggcgttttgtccgggacggctttcccggaatccgcttcggttttccggctccagccggcgagggagaaaacgaacaggacggaaaggatgagggcggcggtctttttcacggcatcctcctgaccgggatgaaaagaacgaggaattaatctagcacaaatcctatggagacgcagcccctccaggggcggcgcgtcgtcccctcatggattttgaagttgagcgaatgcgcctcttcgaaaaaaaggcgttcccggccgcgggtccttgacttctttccggcggcgtgctgcaatgtcaagtcgcggaagcgctttttcgcaagccgataaacaaaccggccggatggatgtccggcccggagcactccattgatgaaacgacgcgcggtttccgacggaaaaaagaaaatccggttcccttttctttcgatcatatcaatccctcaacaaaggagagcgtcatgagcggacatggcattttcgccggcgatatcccccggcgcaaattcctggagatgggcgtcaagggcggcctggcgatcgcggcttcgccgattcttctcaaggatctcttggccaagacaggaccgggggatctcccggccgtcggaccggccctcgataaggccgtgctcgaccgggtcgtggcccgggccctggccaagggcggggagttcgccgacgtctacgtcgagcaccgcatttcgcggaacatcctgatggaagaatccaaattccggagcgccgaattcggcatcagccagggcgccggcgtgcgggtcatcgccggcgacaagacgggcttcgcctacacggacgagatcggcgaggaggccatgctgcgggcggccgaagtcgcctcgttcatcgcccggggcagcgccgcggcgaagccggtcccgatccgggcgggcgcgccccccgtttacatcacggtcaagcttcccttgtccgggatcgccgacgagaagcgtctcgacgtctgccggcgggccgaccaggccgcccgcggccacgatccgcggatcaaaatgacctcgatcagctattacgacgaggtccgggggcggacgatcgccaactcggagggcttgtatcttgtcgacgagctgccgctcctgttcttcatcgtccaagccctgagcgagggcaacgacacccggcacatgggccgcgaacggctcagccggcactccggcttcgagatgttcgccgaggtgacgcccgagcggatcgctctgaccgcggcccgcgaggccgtcgccatgctcgaggccaaggacgcgccggccgggaagctggacgtggtcatgcagaacggctggggcggcgttctcgttcatgaagccgtcggccatcccctcgaggccgacaacatcgcccgcaagatcggcgccttcaccggcaagctcggccagaaggtcgccagcgacgtgttcacgatgatcgacgacggaaccctccccaacttccggggaacgaccaactgggacgacgagggcacgcccggcaagcgcaacgtcctgatcgacaaaggcgtgctggtcaaatacatgaccgatgtcctttcggccaagcagatcaagatggagcggaccggcaacggacggagggagagcttccgctatctgcccattccccggatgacgaacaccttcatcgccgccggaaaagacaagccggccgacatcctggcctccaccaagaacgggatctacgtccaggccctcagcggcggaagcgtcgatccgacgacgggtgtcttcaatttcacctgccgcgaggcctacatgatcgaggacggccggaaaacgacgccggtcaagggcgcgaccctgatcggcaactgcctggacatcatccagaacattgacgccgtcggcgacgacctcgagttcggccccggcatctgcgggaagggacagtcggccgaggtgacggccggccagccgacggtccgcctccggggcatcaacgtcggcggcagccgggcccgggcgtaaggcggaaacgaaggagcaacgaacatggacatgaaaatattggcggaaaagctggtcaaggactgcctcaaaaaaggcgctgacgcggccgaggtgtacatcgagacgggccggagcctgagcctcgaggtccgcaacggcgaggtcgagacgatccaggaagcggccggacagggcgtcggcttccgggtcttcgtccagggccggatggccctggccggctccaatgatttcaaggacagcgcgcttgacgacgccatcggccgggcgatcgagttcgcccgggtcacgacggccgacgagttcaacgtccttcccgacgatccgggccagacggccgtcgaggggctctacgacccggagatcgcccgggtctccacggaccgcaagatcgagctcctcaagacgctcgagaagctctcgatgaaggatccccggatcaccaagagcgccggggcgggctacggggagggagagaacgaggtgttcatcgccaactcccacggcttgtccaagaccaccaagggagccacctgcgccatgggaatttcggtcgtggccgaaaagggcgaccagaaatcctccggcggcgagtactgctcccggcgcttctgggccgacctcaagccggccgaggagatcgcggccgcggccgcccgcaaggccatcgagcttctcgatccccggccgctgaaaacccagaaggcggcggtcattttcgatcccgacgtcgcctatgccatcctaggcggcctcctccaagctgtcgacggcgagcgcgtcctgcagggcgcgagcttcctgggggccaagctcaaccggaaaatcgcggtcgagaccatgactctcgtcgacgacggcacccggccccgcggcctggcgagcgtgccgttcgacggagaaggcgtaccgacccggcggcggctgatcgtcgacaagggcgtcctcaggggcttcttgtacaacacgatcgtggccaagagggccggggtcaagagcaccgggaacgcctcccggggcggattctcgagcatcccgggcatcggtccgcacgcgttctatatggaagccggcccgcacaagcccgaggagatcgtcaaggccaccaaggccggcctatggctcaaggacgtcaccggttatggcatcaatccggtcaacgggaacttcagcggcggcgcctcgggtctgtggatcgaagacggcaaggtcgccttcccggtcaagggcgtgacgatcgccgggacggccgaggagatgctcaacggcatcgatatgatcggcgacgatctcgacctcaaccggggactcaccgccccgacttttcggatcgccctgatgcagatcggcggggaataagcccggcggggacgggacgctctcccgcgaatgaagatgcggcgaggaggtcccgtccccggatcatcggcggcgctccgtccggcggccgcggttgacgtcccctttctcctcgatccgccggcggacgccggccgcgttcccgaaggacgtccgttggggctttccgtcatcgccgcggtttgacagccccgccgtttcggtttataaattctttctcaatcgaggagatcatcccgaagggatggccgcccgcttcggccccggacaggacggattcccaaacgtccgggatctccgagaaaacgcctcccggaccgcatgcccggaaggaccgccaacgccgcggacgccggaaacgatcgaatcgcgagaggacgacatggagattcagcttcaagaattgctcgaccgcatcaagcgcgaaggccaggaagaagcggagcgccgagccgcggagatcctgcgggaggccgaggaacggaaaaagacgatcttggccgaggccgagcgcgaagcgaacgagatccggacgaaggcgaaaaccgcggccgcccgggatgaggaagccggccgggcctccctggcccgggcttcccgcgacctggtcctggccttccgcgataagatcgcggccatcctggacgccgtcgtccggaacgccgtggccgccgcctatgacgaggagatcctccgggccgccctgccggatgttctgaaaagcttggccgccgggggcgccgaggacttgtccgttctgctcgatccggaaatgctccggaaggtgcgggaccggttcgacgcccgcctcaaggaggagctggccaagggcttcaccttcacgccgttccccggcgtcccggcgggattccgggtggccgagaagaacggcgcggcgtactacgacttttcggcggacgccgtggccgagctcttttccaagtacctgaacagccgcttggccggcatcgtccgcgaggcggtcaaggatttataggacatgggccgctattactatttcgcctcgactctgccggccctttccctcggcgtcccgccgccgttgtcgtcggctgattttctccggcgcggacgccttcatctccgcccgatggacttcgccctcttggaaaagacgacgctgcagtccggcccggatcttccgccgccggccggctccggccttctcgaccggtattacgcttgggagcgatcgctgcgcaacgagctcgtctctctccgggccgcccggctcgggcggagcggggaccggtggcgtcgtccggccggacgggacgacgacgcggcccgggacgcccggagcgtcttcctggctgttccggacgcgtccacgccgctggaggcggaaatcgccttggaaagcgtgcggtggatgaggatcgaccggctccgcggcttgacggttttcgatttcgactccctcctcgcctaccgcctccagctcctgattctcgagcgcctggcggtcttgaccgccgggcggggggagcggaattaccaggagatttacgacgcggtcaaagaggcggcgcggacacccgaacaaaccggagaaaccccatgacgaagaccagcggaacggtgaccggcgtcaacggcaacatggtcaccgtcttcacccaaggaacggtgaccatgaacgaggtcgcctatattcatgtcgacgacacgcgcttgaagagcgaagtcatccgcgtccagggcgggaccgtccaggtccaggtgttcgaaatcacccggggcatcaaggtcggcgaccccgtcgatttcaccggcgagctgctttccgtcgagctcgggccgggccttctcggccagatctacgacggcctgcagaaccccctgccccagatcgctgaaaaaaccggcaacttcctcactcccggcgtctatcttgaggcgctgccccgaagccggaaatgggctttcacccccctcgtccaggcgggcggccgggtggagcgggccgacgccctgggaacggtgcccgaaggggcgttctcccaccggatcatggtcccgttttccctggccggagcgtggaccgtggccgagatcaagccggccggcgagtatgccgtcgacgagcccgtcgcccgcctgacggacgacggcggcggatcggtcgatgtgaccatgcgcttcacctggccggtcaagcgggcggtcgactgctatgtccagcgcctccggcccgtccagccgctggttacgaaaacgcgcctcatcgacacattcttccccgtcgccaagggcgggacgtactgcattcccggccccttcggcgccggcaaaaccgttctccagcaggtgaccagccgccatgccgacgtggacatcgtcatcatcgcggcctgcggcgagagggcgggggaggtcgtcgagacgctcaaggaattccccgccctgatcgatccgcggaccggccgctcgctcatggagaggacgatcatcatctgcaacaccagctccatgccggtcgcggcccgcgacgcctcggtctacaccgccgtcaccctggccgaatattaccgccagatgggcctggacattctcctcctggccgattcaacgagccgctgggcccaggccatgcgggagatgtccggccgcttggaggaaatcccgggcgaagaggccttcccggcttatctcgaatcggtgatcgccgcgttttacgagcgggccggcgtcgtccggctgaaggacggcgcgaccggctcgatcaccatcggggggacggtttcgccggccggcggcaacttcgaggagccggtgacccaagcgacgctcaaggtcgtcggcgccttccacgggctttcccgcgagcgttcggacgcccgcaaatacccggcgatccatcccctcgaatcctggtcgaaatatgacggcatcatcgacggcccgatcatcgattacggccgggccttcctccgccagaacgccgaggtcggccaaatgatgaaagtcgtcggcgaggaggggacgtcgctggacgactatatcgtttatctcaagggcgatctgctggacgcggtcttcatccagcaaaactcgttcgacgccgtggacgcggccgtcgatccgccccgtcaaaaggacagctaccgcctgatcatggagatcctggcggcggagatcaaggccaaggacaaggaggacgcccggcgctggttctccggcctccgccagaagtttctcgacctcaacggcgctccctggcaaagcgagcggtacgccgccttgtcggaggagatccgggccctcctcgccgaacgccggggcggcgacgacgaaaaagggctgcggctgatcgaggcgctggagtaggtcatgaagaaagtgtattcccggatcgaatcgatcaccggaaacgtcatcaccgtccgggccgagggcgtccgctacagcgagctggcctcgatcgagacgcggttcggctcgtctttggccgaggtcatccgcctcgacggcgatcttgtctcgctccaggtgttccagggcggccgcggcgtctcgaccggcgactcgctccgcttcctcggccatccgatgcgggtgagcttttccgacaacctcttgggccggattttcgacggggccggcgagccccgggacgacggcccgcgcctttcggaaaacctcatcccgatcggcggcccctccgtcaatcccagcaagcggatcatcccccgggagatgatccggaccggcatcccgatgatcgacctgttcaacaccctggttaaaagccagaagctgccgctgttttccgtctcgggcgagccgtacaacccgctcctggcccgcatcgccctgcaggccgaggtggacgtcatcatcctcggcgggatgggcctgacccacgacgattacctcttcttccgggacgccctggagcagggcggagccctggccaaggccatcctcttcgtccacaccgcggccgacccggtcgtcgagtgcctcatggtcccggacttggccttggcggtcgccgagcgtttcgccctccggggcaagaacgtcctcgtcctcctgaccgacatgacgaatttcgccgacgcgatgaaggaaatcgccatcacccaggaaaaggtgccctccaaccgcggctatcccggcgacctctacacccagctggccgcccggtacgagaaggccgtcgatttcgccgacgccggctcgatcacgatcctggcggccacgacgatgccgggcgacgacgtcacccacccggtgcccgacaacacgggctacatcaccgagggccagttctacctcaagaacggccggatcgaacccttcgggtcgctgtcccggctcaagcagttggtcaacgcgaagacgcggccggaccaccggccgatcatggacgggatgatcaagctgtacgcgtcctacaaggaaacgctggaaaagcgggccatgggcttcctgatgacctcttgggaccgcaagctcctccgctacggcgagctgttcgaacgggagatgatggacctctcggtcaacatccgcctcgagaacgccctggacaaaggctggcagatcctggccgcctgtttcgaacccttggaaacagggctccggaccgagcttctcgaaaaatactggccgaaaaaaaccgcctgaggcgcccgcgatggccaaggtcaagatgacgaaaaacgagctcaagaggcagcgggacgccctcaagacgtacctccgctacctgcccactttgcagatgaagaaacagcagctgcaggtggagctccggatcgtcgaagcccgccggcgcgagctccggacggcccgcgaggagctcgaccgggaattccggacctggatcgcggtctttggagagtcatccgccctgtgcggccccgacggccggccgtttctctccgtcgccgccgtccgcacgtcccggggcaacgtggccggggtggacatcccggtcttcgagggagcggatttctcggtcgccgaatatgatttcttcaccgcccccctgtgggtggacgcggccgtcgagcggatgaaaaagatccttcttgtcgacctggaggacgacgtcctggccgggcaggccggccggcttgcggccgagctgcggacgacgtcccagcgggtcaacctgttcgaaaaggtcaagatccccgaaacgctggagaatatccggatcatccggatctccctcggcgaccagcagatcgcccaggtcgtgcggggcaagatcgcccagcggaaagtcatcgccaggacggccgcatgatcgcccggatgaagaaggtttggctcgttctcctggaaaaggagaaagccggggcgctccgcgagctgcgcgatctcggcgtggtccacgtcgaatgcgtccggccgtccggcgggcggttcgagcgcctggcccgaacccgggacgaagtcgcggccgccctcaacatcattccggcggagaaacgcctggcgccgggccggctgtcgatagatgaggcgctcgccctggcccgccggatcctggccggggaggagcgtgtccgggaaatccaggacgccggggccgctctccaaagggagatcgaccgggcggcggcttggggcgaattcgacccggaggtgatcgagggcttgcgggcttcggggacggacatccgtttattcgaggtggatccgaaaaaacgggcgaccgccccggccgggacggacatcgtcgtcctgtcggccgaccggcgccggttgctcgcggccgccgtcggccggcggggcgagcccgttccgccgatgccgccggcgtttgttgaattcgttccgccgcttctttcggccgcggccatgcgggaaaaaatcgcggccggcgaggcggagatcgcggagatcgggaaaaagcgggtcgccgcgggccgggagagagattcgctgcaacgggcgctcgaaatcctcgagcaggacctgagcttcgagacggtacgggaatccttcatcggcgaagggcctgtttgccacgtcaagggatacgtcccggcggccgacctgggcgccttgtccgtccgggcgaaagaccacggctgggcgttcgccgccgccgacccggaacccggggatcaggtcccgaccaaggtcgagaacggccggttcgtccggatgatcgagccggtgttcgaattcctggggaccgttcccggctatcacgaattcgagatctcgttttggttcctggtgtttttcgccctgttcttcgccatgattttcggcgacgcgggctacggactcctgatgatgggcgccggcctcgccgccgcgctcaaggcccggcgcaagtcccggaccgtccccgacggcgtccgccttctcctctttctttccggggctctcattctctggggcgcggcgaccgggaactggttttcgattcccttcgcctcgcttccgccggctctccgggcgatcgccgtcaagccgatctgcatcgccaacccggacgccaaggcgaacatccaggtcttttgcttcctggtgggcgtcgtccagctgtccctggcccggatcaagaatatccgccgcttgtttccgaatcttcagttcctcgcccacctgggctcgctggcgatgatcatcggaatgctgtttttcgtcctcaatctcgtcgtcgacgcgaagcgctttcccctcccggcgtacgccgtcggactggtcgtcggcggattcgccgccaaccttctcttcggcgcgtatcaagggaacctgctcaaatcgcttctcggggggcttcagaattttatcccccttttcctcggcacggtgggcgtgttcgccgacatcgtgtcctatatccggctttgggccgtcggcctggccggctcgtcgctcgggtcggtgatcaacggcatgggcggcggcttgatcaagcccgccctcacgatcatcgccggagtgcttctcctgacgttcggccatgccctcaatatcgccctgagcgtgctgtccgtcgtcgtccacggcatccggctcaacatgctcgaattctccaaccatctgggcatggagtggtcggggatcaaatacgaccctttccgggtcacggccaagtcggagcggtaatccagtaaggaggcggaaatggatctcatcggttatatcggcgtcgccgccgttttaggcctggcggcggtcggctcgggcatcggcgcgggcatcgccgggcaggcggccatcggcgcctggaagcgcagctatctggccaacaagcccgcgtcctttctgctcgtcgttttcgccggggcgcccctcacccagacgatctacggctttatcgtcatgaacgccctcaagggggcgggcatcgacggcttgttcaagctggggatcggcgtcctctcgggggcggcgatcggctattcggccgtggcccaggggcaatgctcggccgccagctgcgacgcgttcggcgagacgaacaagggattcgcccaggacctgatcgtcgtcgggctctgcgagaccgtggccatctttgtcatggccttttccctggcgatcatcggttgaggcgggcgccggtccggaaggcgatcactccgtactcctccccgttcggacggaaaacgcgctcgactttgaagccggtcgcggccaggaggcgccgcaactcccggagggggattcggtcgcggagcgggggaccgtgctccgttttcttccggagaaagtcgatgatgacgagacgggaggcggcggacatgcgcttgcggagatcgcggagataagcttcccggccgtcgatctcgtggaggacgttggccagaaaataaaaatccgccccgggcggaacgttcgggctcgttttggatattcggcgggcttggaggttggccgctttggcccgggcggcgtttttccgaagctcttcgaccatcgacggcgaaacgtccagccccacgacccggcccctcggtccgacggccgcggccgccggcagggcgaaaaaccccggaccggcgccgatgtcgatgaagacctggcccggacggaggccgatcgtctccagaacgcgctcggggggaatctcctgccggcgctcggccgacatcagccgtttcgaccgggcggcggcggatttcccgggcatgaccatcctcaaaaacaggagcgatcgggagacacaatacccatgagtctaatgacgatttcaaggaaaaagctaatccgaaaacagggccatgtcaaataatgttcgccgagcggagcatcggagaaaagtccttctttcccccttcggttgcatattcgttgattcaatgcgctcatttggcctggtgttctttgagaatgatccttcatatatcaaacaaccgtcgtctccgggccccggcgaaaatagggtgaatggggatggcgtctccccatgaaatcagcgggagaggaatcccagcacctcgaagtgcggggtgtggggaaaaaagtccgcggcgaagatgcgctcaggccggtagcccgaagccgccagcccccggatgtcccgggcgaaggaggccgggttgcaggacatgtagatcagatggggcgctcccagcgccgggatgagagtcaatccggcgggatgaaggccgtcccggggcggatcgaggacgacgaggtcggtcccggagaggtccgtgctttcgaggactttttccaccagcccggcgatgaagcggacattccgtaaaccattgcggacggcgtttccctcggcgctctggatgttggccggctcggcgtcgacgccgacgacttctgcggccgtccggctgagaaacatctcgatcgcccccgggccgcagaaaaggccgagcgcttttttcgcggagacctcggccgcccgggcggcgattttttcatagaaaacggccgctcccttcggattgggctggaaaaaagaatccggaccgatccgaaagctcagaccggaaagttcctcctcgatcccggccgcccctacgagcagggtgttgttcccgtattccacgaggtcggcgtcccggtcgttttcgacgtgccaaacgctccggacggccgggatgtccgcggccagccggcccgcccactcccggagtccgggcgccgggccgcttcgggtgacgaggatgaccatcacctcgcccgtgcccttggcctcccggaggacgaggttccggaagaatcctttccgggagaccgggtcgaagcccggccgtccgtcggcttcggcgaacgccgcggccgccggcagcaggcggtcggccgccggtccgaacaaggggcacgtcctgaggtcgaccgtcctcttacgggacttcgtccgcgggagggatcgttcgcgcagtcccaggcgaaggtccccgccggctccggcaaaggcgaattccatcttgttccgatagccgaaaagggacggcgagggcaggaagggctcaagaacctccgccgccccgggcggtccctcctttcccaacacccggcgaagatagccttccttgagcgagatctgttcggagtagttcaggttttggaaagcgcagccgccgcaggctccgaaatgagggcaaacggcctccgtccgcaggggcgacggctcgaggaggcgggtgattttcgccacggccgggttgcggcgcagaattcgcgccctcacccggtcgccgacgacggcccccggcacccagacgtccttttcccccgcccgggcgaccggccagcttttcgggaaggcgatcccagtgatttcgagctccatctccggggccttgaattccttcagcagctttttaaagcgcttcacgggaaatccgaccacgttgtcgtaatcgccctcgaggcgctcgacgaacgcgtccccgacgtcctggacggcgtagctgccggccttgtcggcgtaggcgttccggtcgagataggcctcgatctcctccggggccagggccttaaacgtgacatgcgtcgtctcgtaaccgacgacgagacggtcgtcggccgcccggaagagggcgactcccgtcaggacgcggtgacgccggccggacaagcggccgagcatcgccgcggcgtcctcccgggtttccggcttgccgaagatctcccggtccaggcagacgaccgtgtcggcggcgatgaccagggaatccgggaagcgcgccccgacgtcgcgggctttgaggacggccgcttcccggacgaagaagaccggatcgctttggtcgagggcgctctcgtccacgccgctgggaatgacgcggaagtcggggaagatccggccgaggatctccttccggcggggcgaccgcgaggccaggatgacgtccacgacgctcaatcgcggacgagggtgacgcggaccgggcggactttgccggcccggtccacgctcaaggtcacggtttccccgatcttgcggctttccagaatggcgaacaagtcgtcataggacgtgaccggggcccggtcgacggccgtgatgacgtcgttgatggtccggcggccgaagcgatcccggcccaggccgcggagtccggcggcgtacgccggggttccggacgggacttccaggatgatcaccccctcgatgccggcccgccgggcataggcgtcgttgaggaaggagacgcccagtcctggccgggtgacccggccgtgggcgatcaattcgggcacgaccttggcgatgatgtccgccggcacggcgaatccgacgccgctggaggcgcccgagggggaatagatgagcgtgttcatcccgatgagccggccggctgaatcgagcagcggccctcccgaattgccgggattgatcgaggcgtcggtttgaatcatgtcccggatggacacgccgccggcgccggtgattttccggcccagggcgctgacgatgcccttggtcacggtatagtcgaagccgaacggattgccgatggcgatcgtcttctgcccgacgacgagatcacgggatgtgcccgggacgaccggggagagctcggacacatcgccgtcgagccggagcacggcgatgtccttggattcgtccttgccgacgagccgggccgagcgctgctgctggtcgggcagagtcacctggaactccaccccgtcctcgatcacgtggaaattcgtgacgatgtgcccccgccggtcccagacgaaaccggagccgctgccgcgggggatcttttcctcggctccgaaaaagaagtcgcggacgagctggatgttggtgatgtacacgaccgaattcctcgttttgttgaccacttcgatcgtgttcctttcgtcctcggtcaggggagcctgctgggagtgaaggaggatggggccgccgagaagcaggaggagggccgcggtccgcgcccgccggggggaggttggtttcttcatggtcttctccattgaagccggattatatcaccggacggccgcggtgaaaaaacaggctcaggccggcgtccctcgctccggcggcctgcggaccagggcccctcgtccgatcatcaccaggttcttgatgagatcgatcgccgtcatcaggacgatgaagaggagggcggccgccaggccgattctgattcccgacaaggcttgtccgctgatcgggacggcgaacaagccgtcgaagggccggcggaggatcaggccgaacaggatcagggagacggcgtcggaaccgacgtcgatccagcgggaccgggtgaagagcttgagaaacagggagacggccccggccgccagcagcgcgatcacgatcagcgacaaactccggccggcttccgccgtgaaaaggggcttgatttcccccgagctcgccaacccggcgatgaataccgtcccgtgccgggtgaaaacatagaccgccgcggccgtcaaggcgagcatgaacgtcaagccggcgagcgtcgcggcgagggccccgggcttccgggggagcttgatgtcatcggcctcgagcccgaatttcggccaggggagcttgatgtcctttttactctgggtgacgaagtagaggatcagggcgacaaacccgagatcggtcaaaaacgccgccgggagatacaacagagcctcgatgacgcccatccggggcacgaaaagaacgggaaatagaacgaagctccggccgaagatcactccgataagggtgaaaagaaaatggaagccgaacaggatggaggtgtatcggaacaggtggcgctggtaggccggggcgatgatctcccggccttccaagtaccgctcggccacccgtcggggagggccgaacccggcgatgactctttcgagggcggcctcgccgctccgggcgcgctcctcctcggctttttccaggatgtggctccggatttccgagaggatctcctcgcgggccgggccgacggccaggtaatggccgatgtcctcgaggtaggcatcgagattattggtcatgttcgttctccttctcgatttcttcgagaatcctattttggtttttccagacggcgagaaggccggctttcatcgcccgcccctcggccgtgatgccgtagaacttgcgcggccggtcttcccccagcgtccaccgcccggcgatccagccgtttttctccagccggcggagcaggggatacagggtattttcctcgatcttgtatcccagcccctcgatgtgcttgatcatggagtagccgtagcggtctttctcgaggagggcgaggacgagaatttggaggaatccccggttcatttccgtttcgagacttccgagttccgtttccgtcattgtgatcgcctcgtttttttcttttacacgctcgaaaacaatatagtgcgttagacaatactatatcaaacacagtatgtcaagcttcccgcgttttcttcacgggaagggggctggcggtggcgtttttaacgaccggagcgaacatcatccggatgctccattccttgagtcttgtctgggaaatcggcgcgaaaaagaccggcgtcagctgttggagactgccgggcgccggcaaaaagccggggcgggcggcggggcgaatctttcaggacatggattctccgccgccaagccggccgatcgggaaaatccgcgatgaatccggcgcgggagcgaaggctttcattatcttgccgctttcctctgtgcaaatgggacgagagccggcttttttgagatcgattcacgggtttgacagccccgcggacgtatggcaggatgaatccgccggagccgacgccggcgattcggcgggagaaattcagttgttttccgaaggagccgtcatgctcgacgtcatcgtgaaactcgtcctggccgtcgttctgggcggggtgatcggattggaaagggagttcggccagaagccggccggcctacggaccaatatcctcatctgcgccggctccaccatgatgatggccctttccggcatcatcctcggcggagcccccgtcgggtctgccgattccctgcggatcgcctccggcgtcatcaccggcatgggcttcatcggggccgggacgatcatccaggcccaccggcacgtccatggtttgaccacggcttcgaccttgtgggcggtcgccgggctcggtctggtcatcggggcgggatatttcttaatcgccgcgatctacaccggaatcctgacgatcgttctcctgagcttccccctggtcgaacacctcgtcccgcaccggtccatcgtccgttacaatctccgggtggccgggatcgaggcggtggacgagttgcgcgggctggccgccgccacgggcgaaaaagtcgacgaaatcttcttccgccgggaaacgaacggggccgttctcgtgttcgtcataacggaacgcccctcccgggcccggaccttcagggataaaatcgccgccctgggggaaatcgtcgagatccggatcgattagcccgcgtccggaggctcgtcgatcggtttttccgtggtcggattccggaaggccttccaggtccaaacccgggtttccccgtcgacgaccgaacggatggtcccattgatggactggcccacgagcttgccttcaaagacaaaggccgccggggaaccggcgacggccgcctcgaatctgaaccggacgaggtctccctggatcttcgcgtcggcgatcgccgcctcggttccgccgattttcaccgttcccttggcatactgatatttttggatcagatcggcccggacggtcgttgtttttcccttgatcttcatcgtccaggtccaggcgccgctggcgttggccgggatcacccagagaaacacgtcatggcggacgccgtccacttccacttccgaggaggcgtccggcttccagttttccatggcgaaattgtgcgaaacgacccgggatcccggccgcagctcccggagcaggcgcggccgaagccggaggttgatcgaagtcaggaggtagagggagacgaccgtcgcttcgcggatatcggcttcgaataagtcgccggtgtagaacctgacccgatcggcgacgccggcgctggaggcgttggcttcgctttccagaatgcgttccggatcaagatcgatgccgatcccccgggcgccgtatttctgggcagccccgatcacgatcctcccgtccccgcatcccaagtcgtagacgatgtcgttcttgctcactccggccatgctcagcatttcgtcgacgaccgggaacttggtcggaacatagggaacatccaggagccggacctggccggcggcgccggagatcagaagaaggagggcggccggaacggcgaacgaggagagacgtttggtcatgggggggtcgatccggaaaaaagatagcacagggcccgggcgaagacaagggaagcggacgcgttcatgacgccggggccgctttatcccgggggccggcctcggctccgtcctccccgagattggccgtatcggccacgatatacaggggcctctttttgacctcccggtactggcggccgaggtaaaggcccaagattccgagtgagatcatctggatgccgccgatgaataggacggccaggatgagggacgtccatccggagaccagaacctcgggatggcggatcttcccgatgaggactcgcccggccatgaggaacgaggccagggtgatcaggaaaccgagataggcggtgatcttcaagggtttgtccgaaaaactcaggatcccgtcgaaggcgaaccggaccattttcttcagggtgaacttcgtcttgcccgcgtagcgggggtcgcgccggtaggaaatcccgacttgggcgaatccggtccagctcacgagtccgcggagatagcggttctcctcccgaacgttccgcagcgcctcgaccactcggcggtccaggagacggaaatcgccggcatcgaccggcatccggatgtcgctcagcaggcgaatcaggcggtagaagaccttggccgtcaggagcttgaagacgttctcccctctgcgtttttcccggacgccgaaaacgaccttgttcccttcctcccactttttgatcatcgccggaatgacttccggcggatcctgcagatcgccgtcgatgatgaccgcggcgtccccgcggacgtgatccaagcccgcggtgatggcgaactgatggccgaagttccgggacaggaagacggccttgacccgtgtgtcgttccggcagaggtcccggagaagggcggccgacccgtcccggctgccgtcgtcgatgaacaaaatttcgtggtcgtatcggccggcgagcccgtccaggacgcgtttcgtccggcggtagaactcggggatgactttttcctcggaaaagacgggaacgatcaccgaaacgatctttcgtggattcattgcaacctccccggtttgaaggacgggcgtcgggacaggagggcccagccgagggctcctccgagagtctgtcctgctaagacgacggtgttctggagaaggcaagccgccacgaccgccgccggttcggcgccgaacagggcgaaaaccccggcggcaagaagctggggccccccgaacccggccaggccggtggggagcaggatcgcggccgcggtcagcgggacggccgccaggatgacggagaacggaagagggaatcccgtcgctcgggcggcgaaaaaaagcgtcaggggattgaacaatgcggcggccaggctgagaaggaggaggccgaaagccctgtgcctcccggcccggaattcctccagcgttttgagaagccggagggcgccccggcccgcccggcgaaacagtccggaggaggccggatccggccccgccgcccgttgcgcgaggcgcgcgagcctgcgattcgggcggaagggagcggccagcgcggccaggccgagaacgacggccgctgccgaaagggcgaaaacggccacggcggatccccggccgattttaccgagggcgaaaaggacgaacccggccagtcctccggcggcgaacatggctcccaggccgagaatccgatcgaccgcgacggccagcccgagacgcccccgggttcccgggcccgcggacgtcccggccatcaccccaaaccggagaacctcggtcaaggccagagagccgggcagccactggcccacggcctggccgatcagattcgcggccgccgcgtcccggaaccggaccgggatcccgaaagctcgcgtcaggcggtggaagcggaccgcgcttgcggccaggaggccgatgagagccaggacgatgaggccgatccacggtcctccccggcggaagcccgagcctaccggggccaggtcgagatatcccagccggtggaggatgaccagggaggcgatgccgatgaccgtcatcgccgcgaggcgaaggaccgggcgcccggttgttcgatccgcgttcatgaggaccgtccttccgccgcccgcttgaatgttctttcgaccgcggcccagacggctccttgctcgtatttcgccagggcggcctcccgggcggcggccgacatccgccggcggagcggctcgtcttcgaggacggccttcagccgggccgcgaggccggcccggttcccgacctcgaaggtgaagccggtccggccgttttcgacgacggtccggacgccgggcagggccgaggccaggagggggacgccggacgaaagggcttcgatctggacgatcccgatggcttccgaccggtcgagggagggcaggacgaataggtcagccaggttgtagacggcgggcaggccgtcttcgccgacgccgtcgtcgaagatcacgtccggagcgatccccaaatccgcggccgcctgaacgtagcggttccggaggtcgccgcgccccacgacgaggagccgggcgttcccgggcttcgccgcggcccaggtttcgagcaggaagccgacgcccttgaaggcgtgggcccggtccaggcctccgacaaagagcacgacccggtcccgcggcccgagcttgtaccgagcccggagcgccgggtcgatcggccggggtttaaagacggacgtgtcgacgccgggcgggacggcctcgaatttttccggatgccggcggagggccggggccgcggccgaatgggccgcgtaatcgagggaggtcacgatcacccggtcggccgctttcagcacggcgggaaggacggtcttcgtgtaggcggccatcgccgcgccggcccagcctccggccaggggatccatctggtagttgacgacaagcggcatccgccggccgagcgtcttcttgttgagaaggacggcctcggccccgccgaagaaggggtaatgaaggttgacgaggtcgaagccgcgtgtctccggcccgagctgcgggagaaaggcgctgtttcggaatttcaccgggggcttcatccgccggacccggtagggggcgtccggttccttctccgccggccggtaggccgggcagaagaccgtgacgtcgtgtccaaggcgggacagcccgtcggcgtaggagcgggccatatttcccatcccgccccgatagggagggaaggttgagacgatgacggcgattctcatgcggcgccctccacccgccggcggaccggacgccgggccttgtggagaagcatcttgaaattgatccgcagggccgccggcaaccccacgaaaaacgaccgtcccaggccgtacgcggcgacgagcttcaggtgcctcggaaagaacagcggattgagccaataggccccggactcgagggcggcggtcaagtggatgcggacccgctccccggccgggaattccggcgtgtcgcagggggcctcggttacggcgagatccaagcccatcaaactgctcgtgtcctcctcgaacaggactcgcccgtgacgttcgaaccaagcccgggcgtccgtcccgcggtggggttgaaagaggttccaataaatccagtccggcttgagcgcccgggccagccggatggaatcgcgctcggcggcggccgtggctccgggcaggccgatgatgaagcaaacatagagccggaggccccgggcgcggaccaggcgggccgcctcgacgatttcgtcgagcgtctcgcccttgtgaattgcctcgaagacggcccggttgccgctttcgacgccgatgcagacgtgatcgacgccgatcgccttgagcaggtcaagcatctcctcgtcgaggcggtccgctctgaggttgtcgatgtgcaggggaaggccgaagcggcggtcccggtaaaggcggaggaactctttgaaccgttccaggtcgtaggtcgggcagtcgtcgacgatccggatttcccggagccggggccgggtccggaccgccccggcgatctcgtccagggccgcctcgaggccgcgggtgcggatcttccgcgtcgacaggaaccgaaccgagcagaacgagcaggaaaaggggcagccgcgggacagctggacggggtacgacatcatcgattcggagccgaaggccgggccgaaatcgggcgccggcgtcgcggcgaggtcgggcggctcggccgaaacgacccgggtttcggttccccggcgaatccggggcagctcctcaacgaaagcccgatcgcattcgccccggaaaatccagtccccgagacgctctccggccaggctctcggcgtgaagggaagcatgggggcccccgagcacgatcgggacgggcgtcaaccggcggatttcggcgatggttttccgggcatggctcatgtgggccgtgtagagcgtcaggccgcacaggtcgggcgtaaaaccggcgatccaggaggcgacgggcggggccttgggggagtacgcgtaatccgcgacccggacctcgtggccggcggcccgtgccccggccgccaacagaaccaggccgaggtggggccaaggcgcgaccggcggacggtccttggggtaggggttgaccaggaggattttcatggttccgccgccttccggccggagaggatcgcgtcggcgtagatgtcgccgaagcgatggaccggcccataaaccgtgacggcgggctcgacgagcccgggatggtcccgattgaacgcggcgcttgcaaccggattgagcgggccgagggcggccgcgagcccttccggcaggtatctccggaaaaaatgatagccccggagaacgtccgacggccggcggtcgattgtccggatcttttcgcgttcgatccggccgccaagcggccggcggagacggttctcgaactgcccggagtcgtaaatccgttgaaagaagtggaggtcgcctttccccgtccgctcgacggcgtgggcgaggccctggatcgcctgttcccggtagtccgggccgatggggacgctgaagaccagcaagccccccggtttgagcacccggagcatttcaccggccgcggcggaatctccgtcatcgccctcgacgtgctcgaggacgctcatggcatagacgacgtcaaacgtcccgtcccggtcggaaaggcggcgggcgtcgcggatcccgaaggaaacgcgcccacgggctccccgccggatcgcctcccaggctttttcataagggtcgagggcgagcgggctgatgtccgtcagaagaaggtcaaccgggtgcctgcgggctagatagaagccgaacagctttggacttccgacatccagaacgaggggaggaaccccgccgccaggccggtcttcgaggaagtcggcgatgtcccgttcgaagaagtgatattcgggaaaccgggtatagctgttgaccggctggaggagggccgaggcggccgctcggaagcccggggtgaatccgtggcggaggaagccggccgctccggcccgaaaaccgaaccaggcgaaaacggcttcgcggtatctcacgggctaagcctaatcaaagggaaaaatcctgtcaaacgaaatcgggggatcaccggcccttgtctccacgattttttctgtgataaatagagggcggacatgaatccgccgctcgtctccgtctgcgtcccggcctacaacaacagccgcaccatcgacgccgtgatccgctccgtcctcggccaaaccctaggcgacttcgagctggtcgtcgtcgacgaccgctcgtccgacgggaccgcggcgattgtccgctcccattccgatccccggatccgcctcgtcgagaacgaacggaacctgggtcatgagggcaactggaacaaagccttgaaggaggcggggggccggtttgtcaagatcctgccgggggacgacctcctctactcccggtgcctggaacgtcagacggccgcctttggggacctctcctcaagcggcgtcgccctcgtctgctgcgcccgggacatcatcgatgagcgggggcggaagctcatgcgccgggctttccccggaaaagaggagacggtccagggaggggaagccatccgccgctcggtccgggcggggacgaacctgatcggcgagccggccgcggtcctgatgcgggccgacctcatcgcccggaccggcgttttcaacgcctcgaacctttacgtcatcgacctggactactgggtccgcctcctccgtcacggccggctggccgtgatccgcgaaccgctctgttccttccgggtgtcccggacggccacgagcacgcggatcaagtcgacccagagccgggacttcagggacttcctcgaccggctgggaggggatcctcagtccgggctttcgaccggcgacctccggcggggaaggatccgggccgtcgccaacgcctggattcggcggctgatctaccgggtgtcccttccccggtagcagcctcacggcttcgccggttcaagggaccagtacggcggttcggcggccagggtcatccgaaagagattccggtccgggaacttttcccggaaaatccaagccgccccgggaacgtcctggacgatcaagatgtcgtcggacaggtcgggccgggcccgccgccactcgaaaacccaggttcctctctttagggattccgggttcgcccgccagacgtcggcgaaccgcggggcaatgacgacggccgggggccctccccgggtctcgacggcccgttcgatcccgtcgtagatttcgctttgaatgcgggcctgggcgttcaaggcccccgcctgccaggcgatgaaggttcccatgccgaaaaggaggaggcccgaaacggcggccgcgaagacgggcggaggaagccccgcccgggcgagacggcttttgatcgccgccaggccggacaggacgatgatcgccagggggacggcgcattcggagtaatgaatcgggccgacggcgtggaggccctgattgtcgtggagcagcccggccaggaggttgaggccgacgccgaggccgagaaggcggttcaggcggctccggccgacgccgaaagcgaaggccgcgattcccgccgggccgagaaaccagatcgcgagcatcaggaggttgtagcccgtgttggccccgaaccgatggccgatcgattccccggagatcgtctcgccggggccttccatgaagaaccggggcgggagcgcgggatttccggtcaccagcccgttgtagaggaagaacagggcgaggggaagagcggcgccgagagcgaaaaagcccagagccgcccggtccgacccccgtttccggagcgctccggccgcgaaatcgacgacgaggggggcgagaagggcggacgcctcgacgggccggcaggtgaaggcgacggcggcgaaaaagccgaccgccgcccatcggccgggcgacggcttcctccgggccaggacgaagccgaggatggcgagggcgatacctgcccgcgacagcaagtgggcgtgggtcgtcgcggacaggaggaaggccatgggcgagagaaagaacaggagaaaggcagccaggccgtgggccggcgagaagaggacggtgcatgtcgcggcgaccgcggccgcggcggcggccgcggccagggcgaagacgagcggaccggtccgggtcgcctccgagacggcccaagccgcgacggggccgggccagtccacgctcgtgaccttcccgccgcggcggaaaagaaacaggttggagtacgcggcgaacggctcgggttccgggaccgcgacccggcccgaggcgaggacctggccgccgaaccgggtcgcgtactcgtcgtcggtgaaggggaggtcgcggaggatcagccggtggctcatccgggccgaaagcgcggccaggacgaaaaggagaacaagagcccagagacgctgactccggcttagggaccggaggcggaaccaggctttttcaagaggcggagcgaaggccgggctcaggccgtagccgaggagaacggcgcccgggacgaggagcaggacaaagcccagccagaaggtcagctcccccggggaagaagccgtgaagggaggatgaaagcccacttggagcccggagaaagtccgggtcaggccgaaaaagacggcgaagagggccagtccgcccccgagggccgccccgcgggcagtcgggaccgtggaccttcggcttttcgtttccccgggacgcgcggcaggcatgtgttcattattctatcggccttccggatgttgtcaacaacgcaaaccggcctgtccttaaataatccgtttacccgtccgcttttaatcgattggattaaagcccgaacgtccggtcttccgcgcggggattgcccgataccctcgtcaccgtcttcgttttcctcctggaacgcgttgttttccttgaatttctcggccgggcggtccttttcttcataaccgcggcctgaattttcacaatcttttcgcggccggccgacggaagcgcccattggagggcgccgtcctctttcttttcaacgtctccttctattgggattttctcgatttcctcgctggttttccggtgttcatcgcctggtttttcttgacgatccggaaggaagcgcatcctccggtccggtggtatgccggggtgcggcggtgccttcaccggatcgaaaaaaaatccgtccaggcatgaaaaaattcctttggctaatccggattcgattgtataatgatcgcttccggtcctcgggaaagggaccggcggagaacggaaaaacggggtgcaatcaagcggagcgggacgagggatgctttccaataaactccgggaaaggctgccggaagggttccggttccaggacaccggctggtaccaggcgattgaggggattcatgaacggttcctacgccagcttcttctgaccggattgtcggcggccgcgatcgccgcgttcgtttatcttttgctcgatctgagacggggaaacaccgcctacctcgtctattacgggatctggctcgccgtctccctcgggctgctgatttctttcctcaggacggggcggacgttccggctggcgaccccggccgtccttctgcttatggccggattcgtcctggccgctttcattcctccttcccgcgacctttacctcatcatctttttctgttttccgcccatcgtcctccatctgaccggcgcccgccggggaactctctggacgggcgtcttcctcctgacgatcctgttgacgttcgttctgaacacgttcgggtttttcgggccctggaacatcgatttgaccatccggcagatcatcgtcgccttcgtcattttcagcctgatgttcgttttcagcttcatgaacgagcggcagaaagaaaaattcatcgatcagctggttcgccagctgagctacgacaaggccaccaacctgccgaaccgcgaggtgttgatccattccatcccgaaagatcggcagttcttgttcgccatcgtccatattgaaaacttcggcgagctggggacgatcttcggctacgaaacgctggacgagatcctccagttcatttcccgctatctccagcaatggagccgggagttcaactattctttatatcggctgcgcggcaacgatttcggcctcctgatcccccgcgaatcgatggaccgggcggcggccgaagccctgctcaaccggatctgcaccgccctccgccgcgaattcatggcctggggcaggctgaacatccatttgaacattaagctcggggcctcgttcgtcaacgacgcgtccccggtcgatttcctgtccaaggccgacttggccctcaaggacggcatccgctcccaccgggccgtttccctttacaagggcgacgagagcgtccgggattcggcttatgattccctgaagttgtacagcaccctgacccggaatctcgaggggaagacatgccgggcttattttcagccgatcatcgatacccgcaccggggaagtggtctggtttgaaagcctcctccggctgcgcgaccaggacggcttttacgtctcgcccagccctttcctccccctggccacctcgaccggcctcgattcggacatcaccgagttcatgttgaaggaggcctttacggccctgcagaagacgccctgcgacgtttccctgaacgtgacgttcaaggatctcttgatgccggagttcgagaaatccctctttgcttatctcaaggacgctccggccttgaacaagcggctgattcttgaggtcatcgagcgggaagagctggtcgagaacgaggcctgccggtcgttcctcgagcgggcccgggccaacggctgcaagatcgccatcgacgacttcggagcgggatattccaatctcagccgcttgatccagctcccgatggacatcctgaagatcgacggcagcttgacccggaagtgcctccacgacgaaaaggccaagcacctgatccggatcgtggtcgagtattgccggtccaacggcatcaaggtcgtcgccgagcatgtcgaccggccggaaatcgccaagttcttgaccggctgcggcgtccattaccttcaagggaaccattttgggattccccaggaatcgctgacggacttcgatcttcccgcccagaaaatctgagttttctccccggggaacctttttcacccgaaatgcgtcttttccggtgaacgtctcggaggaggatcgaacatgagcggacaatcaaaattcgccgccggcctggcgggcgtattcctggcgatcaccgtcgccgccggcgccgcctgtgattttatggacggcggcttcgacgattttttcgatggatcgaagcacaccgaatcgttctcgaaaacccttcccctaaaggcgggagaccgattcgccttgaaaaacacgaacgggtatgtccgggtgacgacttgggaccggaacgaagtcgagattacggcccagaaaatcgcctcccgccggaaagacgacttggaccgggtgaggatcgaggtcgaaacccccggctcggacgtccgggtggacacggtttatgagcggttccgcaatgttcgagtgaaggtgaattacgaggtgaaggtccccgccggggtcatcctcgagacgatccgctcaaccaacggcgacattgagctttcgggcggcttcggcgatgtcaaagccggcacgaccaacggcgacatccggatggagggcggggacggccggatcgtcctggcgacgaccaacgggaccatccgcgcccgcaacctccggggatcggtttcggccgacacgaccaacggctcgatttacttggagctggacgaggtgagaagcgatatccgggcggacacgaccaacggctcggtcaacctgcgcctgggcggcgaggtcaacgccgactttcgggcccggtcgacgaacggatcgatcaccgtcgactttcccgtcaccatcaagggcacgatttcttcccgccaccggatcgagggtcaaatcggcggaggcggcccctccatcgagctcgaaacgaccaacggatcgatccgggtcaaccggatgtaaaggccgccggggaggctcccggagccttcccttgttccgataagcgggcggcttccggccgtccaaccttcgcggccggaagccgttccgcggtttgatcccccccggccgtccggatcggggccgctcgttgacaccccgcgaaagccggggatatagtgtctttcggcattccgatgaaatcgaacatccgtgagatccgccttcctcatccccatccggagatgaggccccgggtcgaaggctccccccggacggctcctcatccagggacggcggtccggatcggagaagatctgttcgaggtgatgaccgaaacatgctccgccggccgagaatggatctacgggctggagccatggaaggcgggcaacgtcacgcgcatcgtcgtcgagtggggggacgcagccgagaaagacttcctggccggcctccggagggaacggatccggacgcgcaaaaaaaacctggctttgggcggccaggctctgttgggatttctcccccgtccttttcaggaacgcttggctcaaaccctcgaattcgacccggggcgggcgacgctctattcagccctcctggaaacgctggccgccgggccgccggcttttctcttcttcctccagatcttcggaaccccgggcgggcggttcggaccggtcattccctcaggcttgggatttttcgccctggccggcgcgatcgagggaattgtccggttcgtgatcaacctctcttcgggggaagcggtcggaagcctccccttgtcccttttgggtctccgcttcgacaaggggccgagggacgacgtgatgagtgacgagttcctgcccgccggcgacgttctcgaggtcctctcgccgacgcccaaggcctggtggctgaaagccggggggatcacctgcggcggcgattccttcctgcttatccggtccgcggccgagggccgtcgtttccggtatgtcttccggaaaggcggctcgggatttccggaaacggacgcggttctggagcgcgagcgcaacatcgccgccgaccgggcgtatgcgctggcgccgctctggggtttcctgccgcgggcggaccaggaagcggcggccttctatggccggaccaagacccggctttgggtccgcggctcgatcgccttcaaccttctgctttcgttttcgatcgtcgcccttgatatggttcggatcggggccggaggattcgcctggtggacgctcgtccggttcctgttcggcctggctctcctcggggaaagcgtcatccgccttctccgtcatcttcaaaccggtgatgtgagcgggagttttttgggtgttttgatcaagccgctgttctccctggccgtccaggccgggccgagcggcgccggaaaaccgcgcccgccgcggccagggccagaatcgtcaggccgctgacggccgccccggcgagaacgcttgccgggagataacggatttccacttcgtgagcgcccgccgggatgacgactcccttgagcccgaggttgacggggaaaaccgggacgggcttcccgtcgaggcggcctttccagcccgggtcccaatttccgcggaaaacggcgatcaccggggcgggcgttttcatccggtggacggaacggccctggatttcgaggacggcttgggcttcggcggcttgagccgcggccggtccgtccaggccgggaaccggacgatcgacgacggccgcgtcggccgggtcgaaatcttcggccgcgaaggcctcttttttttcggccggcgttttcgcgacgaccgcccttccgacgaaatacggaaacgaggcggccggcccgagcttctggacggcgagggggattccctcgaagatctgcttctccgccggcagtccccgcaacggccgcggcccgacgagatacgcgcagccgatcgaccggagatgtttgagcaggagatcctcggaccagccggccgccgccgtcctcagctccccttgctccttcgggtggaggccgaagaaatcgcggttgaaaacgtagcggacgccgtcgctcatcccggaaaacgggtagaggctctggcggatgaagctttgggctctccggccgccgagcttgattctcatgtcgtcgggcaggacttcctggcggtacacggtcaccgggcgccccgtttcggcgaggatggcggccggatcatagaaggattcggggacgacgggattgatggaactgttccggatcagcggatcggccacggcgaggaggagaaacaaggcggcgaagatccccgatttctttttccccaggctgaaggcgcccatcaggacgagagccgccgacagagcggccaagcccgcataaaaggaaccgcggaccgcggcgaggagccgctcgtcgcggaggacgaagaggcgtcccaggacccggcttaagacggggacgagggcggtcaaagcggccgttattcccagggccgcgatccatccgccccgaaggcgcctcgcctcgacccggcggcggacgaaataatcgtcgaaaaacactccggcggcgaaagccgcgacgaacatcgccccggtcatgtatttcaccgggtagcggatcgaagaaagaaagggaacgcggacgagaagctcgttcaaggggaaataccggccgctggccaggagaagaaaaattaaaaacagccatctccggccccgcccggcccggttcgttttgaccgcgagtccgaacgcggccaggagaagcccggcgcttccgagatagaagctgtaataaagcggcgcgcccttgtcgaagagatgggctgcccaaaaatcagacgtccccgccccccggtccgatcccaggatcccggggaaggggacgttgagcaactggatcaactccagcggccagagggacgtttctgcggccgtccgctcggtccgtcccaagatttccagggaggggagatactggacggccgaaagcagggcgcccagaacgagggaggccaggacgactgcggcccgctttccggccttgccggggagaaaaaacgactggccgagggcgaggatgagagtgatcacgaccgcttccggcgttccggcgaggagctggagggcccaaagaatccccagaaaagccgtttttttgaatcgcggaagggaatccgaaaaggagaggatcaagatccagggcatccaggcgaaagcggcgacatgattgtagaattcaaagctcgaaaggaaaaggccgctgaagaagaaaagcgaggcgcccagaaaggccgacggccggcggaggcggaagaaccgctgaagcccgtacattcccgtccagccgatcaaggcatggatcaagtaatgaaaacggaaggcggtgaaaaagggcaggatgagatagagccaggttcccggataacagaccgcgttcttgggattggccaggaacggctggccgttgccgtggacatccgtccagagggcgaagttgccttcgcggaggagttgaacggccagccggcgggcgggaatctcgagaacggcaccgtcccgctcgaagaaaacgccgccctggaagaaaaatccgcggaagagaaaaagcagggcggccagaaacaggaaaaggaaaaaaaggtcaacgggttcgaacaggcgcccgggaggccggcttgcgtctccatcgaaccgccccgccgctttcgcgtcgtccatcggccgaagcataatgcatccccgaaggcgatgtcaaaaccggcgattgtccttctctcccgcccggccgttttttcgaagagcgtgattcccggccggggaacggtctctcgaaacgcgcgcggaggttccggatgccgtgaccggccccccctccgccccgcggcccagatttttctcaagaagcggggggacgcgccgggccgacgccgccgtttcggaatcccgccgatcgcggggattcccgcaccggccgccatcccggaatcagccgcgtcggcggccggcccggccgttgggagccgccggaaaaaacggccctatgccttgcgctttctgatcagcccgtagatgaacaggatcaccagggcgccgacgacggagccgatgaagccggccgattccccgggctggtagattttgagccactggccgccgtaggaggcgaggaacgagccggcgatacccaacagcatcgtcacgaggattcccatgttttccttgccgggaaagatcagcttggccacgaatccggcggccaaacccagaagcgccgtccagacgatgttcatgcgatccccttcctttccgggaaagagaggcggttaaaaccgctctttcccgcgatcccgtcgattccccctgaaaataattaaaaagcggcgggctgtcaaggacgagaacgcagctcggcggctgtgcgtcaggagatgagggcgcccagggcgatcgaatagaatttcgaatcctcggaatccgaccgggatgtcaaaacgcaggggcaatccgtgccggccacgacggccgccgtctcccctccggccaggtaggagcaggccttgaaaaagacgttgcccgtctcgatgctcggaaagagcaggacgtcggcttccccggcgatcggcgagcggacacccttgatctcggcgctttcggcggacagggcgacgtcgagagccagcgggccgtcgacgtcggcgtccttgatctggccgcgatcggccatcttgctgaggatcgcggcgtcggtggtcgggaccattttcggattcactttttccacggcgcagatgatcgcggccttgggccggtcgatcccgagcttccgggcgaccgccaggcaatagttcaggatctggactttcgcttccaggtcgggataagggatgacggccgcatcggcgcagacgatgagcttccgtcgcgacggcacctggatgacgctgacatgggacagaagcttgcccggggcgagaagccctttttccttgtcgatgatggccttgatgtaaagggaggagtcgatcagccctttcatcaggaaatcggattcaccggccttgatccgggcgacggcccgggccaaggccttccccggatccggctcgtcgacgatctcgaacgaggccgggtcgatcttgttgtcccgggcgacgctttcgattttcgaccggttgccggtcaggacggcctggaccaggccttcggcgacggcccggccgacggcctcgatcgtatgaggatcctcgccgcaggcgacggccagccgccgcggtttctggcctttgatgtgtttgacgatttgagcgagcgatgtgatcatcgtgagttcctccgtgcggacgtttcagttgtatgttttcgccggctcctcgcctctcaggatccggccgccggcggcggccaaggcggccatctcgttttcgccggggtagacgaaaacgggaccgaggaaggaaatgtgcgatcggatcagctcgacgaacttggcgctgtgcatgaggccgccggtcaaaacgacgccgtcgaccttgcccttgaaaacggcggccgcgccgccgatctgcttcgccgtggttttcgccatagcctcgaagaccagggcggccgaggcgtcgccctcctcgattcttttttccacggcgcggaggtcgttggtccccaagtgggcgaccattccgcccttgccggcgatctttttcttgatttcgtcaagggtgaaccggccggaaaagcagagagcggccaggtcggcggccggcatcgttccggcccgctccggggcgatcggcccctcgccgttaagggcgttgttgacgtcgatgacccggccgtggtcgtgaactccgatcgagatcccgccgccgagatggccgacgatcaagttgaggtcttcatacggccggcccaaggcctcggccgccagccgggccgaatatttatgattgagggcgtggaagatgctccggcgcttgatttcggaaaatccggtcaggcgggcccagccggcgagctcgtcgacaacgaccggatcgacgatataagcgggaaggcccagcggccgggcgatctcatcggctaggagcccgcccaggttgctggcgtgctccccttggatcccggccgcaagatcctcgatcaaccggacgttgacctcgtaggtcccgctcggaatcggcttgagcagccccccgcggccgatgaccgcggcgaagctcttgggatcgatcccgcggccggccaaggttttcaggatgatttccttgcgaaagtctttttggtcgaccatccgcttataccggcccacctgttccgccgagtgggcgatgttttcggagaagatttcccggtcgccttcgtagacggcgattttcgtcgaagtcgatccggggttgaggattaaaaggcgcatgattccaccttggcatgggattcggaaaaaccgcgagcccaatatagaaaagcccggccgggctgtcaataaggtcccgttttcgtcccggtttcgaatgagaagacctctgatgattcacgccggcccgagggagacgttctcccgtcgaatctccggagggaagcccaggtcttctcctttcttgggataggatgagttcccgggttttctcctcccgcccggctccgagccgctccggccggctcgtttccttgacacatccgctcggcgggacgtatcatttttctcctttgaataaatcaccgtccgtcatgaagggagatcacccatgatcagctcgtcctctccgctcggcgcgcggcttctcgccgggatcgtcgtcctggcgggagcggccctcatcgccgcctcgtcccggccgcccgtttccggggcgtccggcaatccgtttttcgccgacttcgacacgccgttccaggtccccccgttcgaccggatcaagccggagcattttcttccggcgtttgaaaagggcatggccgagcaacaagcggcggtcgcggcgatcgtcgccgatccggctccgcccgattacgaaaacacgatcgccgccctggaccggtcggacaagcggcttaccgcggtcaaccgggtgttcggcggattggcctcggccgacacgaatgacgagctcaaggccatccagaaggagatctccccccgcttggccgcccaccgggacgaaatcaacctcaacaaaaagctgttcgagcggatcaaggcggtgtatgagaagagagcgtccctcggactcgacgccgagcggaccttcgtcctggagaacctgtacaagtcctacatccgcaacggcgccggcctcgacgaggccggccgggcggcgctccgggagatcaaccagaagctgtcccggctgagcgtccaatacaaccagaatgtcctgaacgagaccaatgccttccggctggtcgtggacaaggaggccgatctggccggtctgccggaatcgtccctggcggccgcggccgaggcggccaaggcggccggcctggaaggccgctggctcttcacaacccagaagccgagcatgatccccttcctgacgttcgcccaaaaccgcgccctgcgggaaaagatctacaccgcctacatcaagcgcggggataacgacaacgagtacgacaacaagaaaatcctgtccgacatcatcaagctccgggtcgagcgcgccggtcttcttggatacaagacttacgccgattacgtcctggaaacgcggatggccaagaacccgcaaaacgtctatgacctcctcaaccggctgtgggcggcggccctcaaggtcgccaagaaggaagccggcctgcttcaagggatcatcgaccgggaaaacggcggattcaagctggctccgtgggactggtggtactacgccgaaaagctccggaaggaacgttatgacctcgacgatgccgagctccggccctacttcgtcctggacaacgtccgggacggcgcgttctggacggccagccagctctacggcctgaccttcactccgcttccggacatcccgcggccccaccccgacgcccaggccttcgaggtcaaggaggcggacggctcgccgtgcggcgttctttacctggatttccacccccgggcgggcaagaacggcggagcctggtgcggaacgtaccgcagccagaaccgaatcttcggcaaggacgtcgatcccgtcgtgaccatggtcatgaatttttccgtgccctcgggaggccgtccggccctgttgaccctggaggaggtggagacgctgttccacgagttcgggcacgccctgaacaacctcttgtccgacatcaccaccggaaccaccttccggtctccggacttctccgagcttccgtcccagatcatggagcactgggccgcccatcccacggtcgtcaagcattacgccaagcatttccagacgggggaggccatccccgacgccctggtcgccaagatctccaacagccgcttgttcaaccagggcttcgataacgtcgagtacctggccgcctccctcctggacatgaagattcataccttgaccgaaccggtcgacctcgacatcaacgccttcgagaaggcgtacttcgattcgatcggattgatcccggaaatcaccagccgctaccggagcacctatttcacgcacatcatcggggggtacgcggccggctattacggctacatctggtccggggtcttggacgccgacgccttcgaggccttcaaggaaacgagcctgttcgacaaggccacggccgagtccttccgccggaacgtcctggcccgcaacgggacggccgacttcatgaagatgtttgttgatttccgcggccgcgagccccggatcgagcccctgcttaaaaaccggggcctgacggattgagcggggaatccatgaagcgccgcgccgttttcgtcccggcggccttcctcgtcctcgttttgaccgcggccggaccggcggccgcggcccgaccggcgccctcgctcgagaagaaaatcaaggagatcacggaagccctcacgcccgggctcatcgacctccgccgggacatccatgcccatcccgagttgggcctccaggaattccgcacctcggccctggtcgccgattccttccgcaagctcggcctcgaggtccggacgggattcgcgacgacgggcgtcatcgggatcctcaagggagggaaacccggtccggtcgcggccctgcgcggcgacatggacgccctccccctgacggaggagacggatcttcccttcgcctcccgggaaaaagcagtcgtcgacggccgggaaacgggcctgatgcacgcttgcggccacgacatccacacgacgatcctcctcggtgtcgccgccgtcctttcggccgtcaaggccgatcttcccggcacggtcgttttcattgcccagccggccgaggaaaccgtcggcggagccgctctcatgatccgggacggggcgtttcgggatctcgttcccgaagcgttttacgcctatcacgtcgacgacacgctcaaggccggccggatcggatacacctccggattcatgtcggccaatgtcgacggcttcagcctggaaatcctctcggagggctgccacggggccagcccctggctctgcgtggatcccatcgtcgtcggagccgagatcgtcaccgccctccaggtcctgatctcccgggagctgaacgttcacaacaacacggtcatcacggtcggctccttccatgccggcaccgcggccaacatcattcccgagtcggccaagctcgaggccaccgtccgcaattacggggaggaccagcgccggattctccgggagaagatcacccgtctcatcacgaacatctgcgaggcggccggggcggtcttcaccctcgactatggattcggcacggcctcggtgtacaacgacccggccctgacggcccgggcattgacgatcgccgagcgcgtgctcggatcaaaggaggccctcgtcgagcagaagcccgagatgggcggggaggatttcagcgccttcggaacgatcgccccggcggtgatgttcaacctcggcgtggttcccgccggccgggaagccacggcggttcattctccgacgttcatcgccgacgaggcggccatccccatcggcgtcaacctcatggccgaaatcattgtcgaccgcttgatgaatcccggcgggaaggctgaaaagtaagtccgaagggggcgcggggggcttgcctcccgtccctattttttgtccgaggccccgggtttgacgagggggacgccgcttttgcagaacgggcaggcctccggctcgaaggcttcgatcttgagggctaggagcgcgccgacgggccggccttcgagggagacggctccgccggtccggtcgaccaggacgtagatgccctcgatcgccgtgttccgctccttgaggcaggcgacgacttcctggatggacccgccggtcgtcaagatgtcctcgatgatgaccgcccgggcgccgtcgatcccggaaaagccggatcggaacgacatcttttcctcgacccgctgggtgaaggcgaattttttttcgagcttgagggcggccaggaagccgatggcgatggccccgtaggcgggggagacgacatagtcgaactccttcccctcggctttgattttttcgaccagcaggtcgacgatccggtcgagggcggccggcttctcgatcagccggatcttctcgaaataccattccgagtgcttgcccgacgtgagtttgaaatggccctggagcagggcgtcggatttcttgaacagatcgaggacggcgtcgttcgtcatgggagccatcggttcctccgggagccgcggacggcccgctgttttggaatttctttcccgcggcgtttccgctttccgccgggggagggacccgattatagagagaacggggcgatttctcaaggaccgttccgctgcggcgcccgcctcctcctcccgtgccgtgattttatctgtcgcggcttcatcggatccgcgattcaggttttcttcaaggaagccggaagccctgaagaaggcggcgatttccgtcgatcgcgtattcctcaaggcgtgaagaaaccgccggtcaaggagtcgcgacggtccccgcggaatcgaggccggcgcggcctccggcggacgcccgtttgactgatcaagggacatcggtccgggattttgttaaaatacgcccggttcgccgcaagacgacaggaggcaatccatgaccggttcgttgactctccccggaagcgggtggaagcgattctggagcttcatcgccggggccggcatgatcaccgcctcggccatgacgatccgtcatttctacgcggccaattttcccgaatcgatctgggccggctccttctgcgacatcagcgcgtttttcaactgcgacagctcggccttttccccgatcgcccagttcggcggcgtgccgatgggctggttcggcctcttcgtcggtatgctcgtcgtcctgggggcggttttccccacggcttccttcgagcggacgaacaaggcggtctcgattctcaacgcgttcggggtcctggccctcttggcttactcgatcttcatccagaaaagcctctgcctgctgtgcagcggctattatctgttttccctcttcagcttctttctcttctggcggtacgggatccggagcgagcgccggggcctcggaggatttttccggacgttcgccgcgccgtctttgaaaatcgccgccgccgccgtgatcggcctggccgccggggcctacggcttccgggaattcaccctggctaaaaaaggagcccaaatgggcggcggcgccgcgaacatcgtccgtcagttcaacgaattggccgtcgtcggcgatcccagcttcatttcgccgtactggatcgcccaagcggcgccgcgctgggaagacgcccccatccggatcgtcgagtacgccgattatctctgcccggactgcctcttcctccatcagcagctctcccggttgaaggccgagttcccgggaaagatgaatgtcgctttccagttcttccctctcgaagccgcctgcaacgcggtcgtcgaaaaagatctccatcccggggcctgcgacctgtcgtatcttgccgcgtacgacccggcctgcttcccggccttccacgaggagattttcgccggctatcccgagaccaggaagcccgaatggcgggaggacttcgcccgccgtcacgggctggaagcggccctgaccgatccggccgtccgggacatgatccggcggatcatcgagaccggggccgagtatgaaaagacgtccgatcgatacagtcacggcatccgttcgacgccgaccctgatcatcaacggccggatgatcatcggaaccctgcccgacgcccatatgaaagcgatccttgcctcgcttctggaggaacaggcggcgggcccgggaaccggccggttcctcgaaaactgggtcgagacgaagccggcgccgaagaaataatctccgacgaaaggcggatctcatgctgaaaaaccatccgaagagcctgggcgttcttttcctgaccgagatttgggagcgggtcggtttctacacgcttatggccgtcctcgttctctacatggacaagaccctcggctggagcgattcccggaagggcaccatctacgggctgttcctggccttgtgctatttcgttcccctcctcggcggctggctcggcgaccgggtgttcggccgccgctcgaccgttcaggccggcaccctgctcatggccgcgggattcgtcggtctggctgtctcctcggccgcgaacacggcgacgttctacggcggcttgttcttgatcggcgtgggaaccggcatcttcaaggtcaacatggcggtgatggtcggcaatttgtatgccgggaaaccggagctcaaggacgccggcttcaacattttttacatggccgtcaacatcggggcggccgtcgcccccctcatcgccacgttcgtcggggtgacctggaacaattacaacatcaacttctgggtttgcgccggcgggctgctgatcgcctcgttgacgttcgccctcggacgggcgaggctggccccggccgacctgcggtcggaagggaagaagggagcggcggccgcgccggccgtggcgatctccccctcggaaacccggcaaaggatcgccaccctcgtcaccctgttcatcatcgtcatcctgttctgggtggccttctaccaggatttcttcggcctgacgctgttcgccgagcggtcgacgagaatctacaagttcctccggccggaaacctaccagttcttcgagccgtccttcatcgtcatcctgacgccggtcctgctggcccttttcgcccggttgagaaccaagggcaaggagccgtcgacgccgacgaaaatcttcctcgggatgctgatcatgggcttggccatgctggtcatggttttcgcttccctggccggcggggacaaggatgccaacaacatgtcgcccgcctggctgatcgggacgtacttcatcgtcacgatcgccgagatcctgatctcgccgatgggccagtcctatgtctcgaaggtcgccccgccgaaaatcgccggcctgatgatgggcggctggatggccgcgatcgccttcggaagctacggatcgggctggctgggaaagtattacagcgacatggcccaccaccagttcttcctgctgctgaccgggctcctggtgctctcggccgtgctggttttgttgttcatgaagcgcctcaagcggttcgcgtcctgacgccggccgcgggggcgggcggcccgggccgccggaggagatatccatgttgatcaaggaaaaaatccatcaagccgcggatttgctccgtgaattcggctgcgattgctggctgacgttcgtccgggaaacggccgtcaacggggatccggtcctgccgtttttggtcccgggcgacctgacctggcattcggcgttcctcgtcggccgcgacggccggacccgggcgatcgtcggcaggtacgaccgccaaatggtcgtcgacacgggggcctacgatgacgtcacttcttatgtcaccgggttccgcgagcctcttcaggccgtcctgaaggagctgaatccccggacgatcgccgtgaacttttccgagggcagcgagatctgcgacggcctgacccacggcatgtacctgaccctggagaaaaccctggaggagatcgggatggccgaccgcctcgtctcggccgaaaagctggtctccgccctccgcgagcggaaatcggccgccgagatcagccggatccgcgaagccatccggcacaccgaggagatctacgccctggtcgcccccttcatcgctcccggaaagaccgagaaagatatcgccgatttcatgtatgccgagatcgtccggcgcgggctgccgacggcctggagtcgggaaacctgtccggccgtctacaccggtcccgacacggcccaagctcattacaacccgaccggccggatcgtccggcccgggcatcttctcaacatggatttcggggtcaaggtcgatcattactgctcggacatgcagcggacgttttatgtccttgaaaaaggggaaaccgaggccccggtcgacgtccaaaagggattcgagacgctcctccgctcgatcgaggccgcccgggaggcgatccggccgggcgcggccggccgcgacgtcgacgccgccagccgggctgttctcgcggccgcgggctacgaggaatttcctcatgccctcggccaccaggtcggccggttcgctcacgacgggacggcgatcctgggaccggcctgggaaaaatacgcccagaagccgtttcggacgctcgagcccggcatggtcttcacgatcgagccgcggctgaccgttcccggccgcggcgtcgcgacgatcgaggacatgatcctcgtgaccgagacgggatccgaatggctatcccatccgcagaccgagctgatcctcgtcgggcgagagagtcgatgacgacggtggagcgggcgccgcggtttgagccgcgggacgccgaggccttcgcccggaccctttttggttttccgggatcggccgcgccgcttccgagcgagcgcgaccagaactttctcctcacgtccgcctccggcgagcgacggattctgaagatcgccaacccggacgaaaatcccgaattcctcgacctccaaaacgcggcgatgggacacctgggatccggcggcgatccgcttccggtcccggccgtgatttccgacacgcggggccggtcgatcgccgaaatcgaggacaaaaacggcgtccctcacgccgtccggatggtcacctttatcgaggggacgccgttggggacggtccatccccgaccgctcgagcttctagcggatttggggggcatcctcggccgactgacccgacggctggcttccttcgatcatccggccgcccgccgggatttccgttgggatctgcaaaacggcgagcggatcgtccgggagaaccttcccttgatcggcgatcccgcccggtccggcctggccgtctttctcctggaacggatgacggcgattctggcgcccctctgggaccgcctgccgcggagcgtcgtttacaacgacgccaacgatttcaacgtgatcgtcggaccgcccgaggccggggccgggacgttcggccggcggcggatcgccggcttgatcgatttcggcgacatggtccgctcggtgacaacggctgagccggccgtggcctgcgcgtacgccatgctcggggcggacgagccgctcccggccgcggccgccctcgccgccggttatcattccgtccagcctctggacgacgtggagatccaggccctctatcccctggccgttctccggctcttaatgagcgttgcgatctgcgcccggcagtcgggcgcgcgtccggacaacgcgtatctccagatctcgaacgaggccgcctggaatctgctcgaccgcctgcggagcgtccatccacggttcgccgaatcgattttccgccgggcctgcggccgctctccccatcccgcggccggccggcttcgcgactggcttgcgttgacggaggcggccggggggttcgccccggtgatgggggttcctctcaaaaccgcctcgagaaccgtcttcgatttaagcgtcggatcaccgctttttccaaatcctgaaaccgtcgacgacaccgtcggctgggcccgtcttttatccgagaaaatgaaagcccaaaaggccgtcttcggcctcggccggtacggcgaggcccggatcgtttacacgacgaagaatttccggccggccggccggccgtacgccgagggccggaccgtccatctcggaattgatgtgttcgccgccgccgggactcccgtgttcgctccgttcgagggaacggtgatcttcgcccgggacaacgccgaacgcctggattacggcccgacgatcattctcgaacaccgggccgacgcggccgggcccgggggggagccgctggttttctggacgctgtacggccacctcggccgggcgtcccttgaagggatgacgcccggccgggcggtgaaaaaaggcgaacggatcgggacggtggggacgatgccggaaaacggcggttggccgccgcatctccactttcaagtgatccttgacttgttcgacgaacaggggaattatcccggcgtctgccgggcgagcgaatgggacgtctggcgcgcgatctgtcccaacccgaacctgattctcgggctggagccagccgagacggctgagacgggacggacgccggaggagatcctggccgtccgccgggaacgcctcggcccctccttgagcgtcgcctaccggaaacccctcaagatcgtccgcgggttcatgcagcacctgtatgatcacaccggccggatgtacctggacgcggtcaacaacgttccccatgtcgggcattcccatccccgcgtcgtggccgccgtccagcgccagaccgccgttctcaacaccaacacccgctatctccacgacaccctggcccggtacatcgagcggctgacggcgaccctgccgccggctctccgggtctgctacctcgtgaactcgggcagcgaggccaacgacctggccttgcggctggcccggcatttcaccggccggcgggacatgatcgtcctggggggggcgtaccacgggcatctgacctccttgatcgagatcagtccgtacaaatacgacgccccgggaggcccgggccggccggcccacacccaggcggccgaaatgcccgacgtgtaccgagggctataccgggcggatgatccagaggccgcccggaaatacgcggactccgtctcgagttgtctcgaccggattgcggcggcgggccgcctcccggccggattcatcgccgaatccctcctcagctgcggagggcagatcgttcttcccgacggataccttcaggacgtttaccggagggtccggaaggcaggcggcgtctgcctggccgacgaggttcaggtcggattcggccgggtgggaacgcatttctggggcttccagacccagggcgtcgtccccgacatcgtgacgatgggcaagcccatcggcaacggctttcctctggccgcggtcgtgacaacccgggcgatcgccgacgccttcgcctcggggccggaatatttcaacacgtacggcggaaatcccgtctcgctggcggccggaacggccgtcttggacgtcctcgagcaggagaatctccaggaacgggccctccgcgtcgggtcggtgctgagggccggtttgcagcggctccaactcgatcactccctgatcggagacgtccgcggtctcggcctgtttctcggcatcgagcttgtctcggaccgggggaaacggattccggcggcggcggaagcggcctatgtcgccgagcggatgagggcggaggggatccttttcagcacggacgggccggaccacaacgtcctgaaaatcaagccgccgctttgtttctcctcggccgacgccgagcgcctcgtcgaaacgctcggccgcgtcctggacgaggatcccctgcgccggtaaacgaatcgaaggctccctctccccgggtccgatccggggaagggcttttcccctcttgaccaaggctggggggaaattttataatttcaccggtcattcgttgaattgaggaaaagatggggaacaaagccatcgcgtttgttttggaaatcggattgctggcaatcggttttccggcgtcggtggccggcggggaggcgtctttccggaagcatgagatttccgcgggcttcggcttcggcaccatccaggagattctggtctggctgggcgaagacctcgtcacgttcatcggaggccagacgatcgaggatgtccggggaagcggagcgatcagcttttcctaccggtaccatcccgaccggagatgagcgttcggcctgactgcggtctttgaacaaatcgaggcgacatgcgcccatcccgacgagacgcgcacgtcgaaaacggccgctctcctcggaacggcccggtttcattatcttgacggcgccgctttcagcctttattcggggatcggtctgggttggtgccggatcttcgaccagaatgaattcatgggattccaggtgacgctcttgggagcgaacctccgcctggccggatcgctgggattgtttgccgagctgggcgccgggttccagggggccgttcaagcgggcctcaacgtgcggttctaagacgcggcgtccgctttccccttcgtccggccgggacggagggcgccgatccgcttctcgccggctcggcctcggtcccgggtcaatacttgatcaaaagctcgaagcggatccaggcgtaaccgcgggccccggaaaaatagaagtcgcccggacggaagtgctcccagagaaaatgtccctgccaatgggggctgatctcgtagaccaccttcaggatgcccaggtcgccgcgcctcgttccttgtccgctccaaagattcgagggctccgtccgttccgcggcgccgaggcgatgccaggtgagattcagcttgatgtttgaggcgggggcgaatcccaggcttccgtaaagagaagtgaaattgctccaatcggcggcccgggtttcccgggcgagaagatagatgagcgaatcgctccatttcggccagcggccgaaggccggatcccagccttcgtcccggccggaggtcgccggatcgtcgccgctgagccaaatcccgcccaaggtgagcgtcgccggaagcgccccggccgcgccggtcgcgtaatctaaacgcgcgtatcccccgaagccggttttccgatcgtcttcccggcggccgaattggagcgcgccctcggccgtcagggaaagacggccggccaagggggcttggacgcgccctcccgccgtctggaagcccgcgccggggaacaggccgcggcgttcccggttgagccggaacaaataggcctcgaatttcgtttttccgaagccgccggtgtgatagagcccgtagctttcctcgtcctgttcgaccatgatctggccgacgtcgttgaggcggggaagaaatcgatcggtgcgcggctggttgacgtagaacgcggtgagcgtttggccggaggcgagggtcacatccgcccgtgccccgttgaaatacgccgtccgggagccgtcgcccgggccgccgtccatcaggacgaatccctcgcccatctggatgtcctggcggccgacggtcagggcgaggggcagcccggccgggcggtcccagcgggcgtagagctgatcgatgacgacttcattcaggccgaaattgatccccagcttcgggtcggtcttgggggacaggtaatatctcatctcgttggccaggcgcagcccgaaggcgagcgtttccgccggcttccatgagaccgccagattcgtcctcatcctcatataggaggaggaatcggttttggattcatccagggaagcgacgttgtcggagctttcctggcggatccgctcggcgaaggagaagatccaccgcggcgtcccggactctttttcgtccgcttccccggcggcgaggggagggaggagggaggctaataaaaagacaatgaagacggcggcgggcttgcggaacatgggcctttttgtatcacaggtcccccgggcgttcaacgcgagcttccctcgaaccccgccgtccggcccgatttcaacaaccggatcccttaaaacgcccacaggaggctcatcgcggcgcagacggctgtgatgaagagggagatcacaaacgtcgtccggaggacccggccctcttcgccgatgcggtcgatgctggcggccgcgttctggagcttggccggggagatgacgctggccagcccgccgccgatcccgctggccgcggcgatgacgacgccggcggccccgatcttttcagcggtcgagagatgaagcttggtcagcatggcgatggccgaggtctccgatccgctgaggaagcctccgagcagcccgaggaacgaggccacggccggatagagccggtcgaaggcctgggcggaggcggcggccaggacgtagaccatgttatgccccggctcggccagcgaccagtccggcccttttcccgaatgattgatgatgtaggcgatggcgaaaaagacggccgaggccagcatcggccggggggcccgcttcagccattttctcccgcaagcggaaagctgcgccttggagggcttgaggaacggcagggccaggagcgtgctgacaagaatccagaaatacgcctgccagaggagccgcagcttttcgggggcgccgggaatgatttcgacgggcatggcccagcggtcgaagaccaggcggaaaaaaggcagcgacggcgtgttgatcaggacggcgaaaacggtcaggatgatccaaggcgaaacggcccggccgagggacatccgttgttcgaaggcccggtcggcgtccgtcagcacgctccggtcccggatcggtttccgggcgataaggagatagaggaacatgaccaggacgacgccgaggccggcggccaccccggtcagggtgaccatgcgggcttggttcatgccgatggcgatcattccggccgttacgccggccaggacggcgggaaagacgcccttgaggagcgtcttgaggccgccggcgatccagagcatccccagggcgatgcaggacgtgatgacgggcatgaagcgggcgaaatagccgccgacctgctccaccggaaggccgacgaaattggcgaagacgacgaccggcacgccgagaagggcgtatgtgcacaaggcgtcgtatccgagggcgggaagggcgatggccacgaacgaggaatagcccaggccgagcatgatcgggggaagaatcgaaaccggcgtcgcccccatggccgccaaaagcgttccgaagccgacgttgatgatcatgatctggatgatcttgtcccggggggccagggtcttgatcagggcgacgacccgggagatggccccggtctcgagcatgacggtgatctggtaaatcgacgtcccgaccatgatcgtgatcggaagcgaggcgagcacgccgccgaggctggacttgaggatgatcgagagaggcgttcggaaatataatccggccgcggccgcggccgcgacccagcccgccagcccggcggtgtcggcggcggtcttgcgcccgatgagaagaacgaggatgaggatcaccggaagaagggcgatcaggacggaaaggccggtcatgcaagactcctgcgggcttaaattccccgcgcatcttaacacagggacccggatttgagccaggcggaagctttctaaagaacttttcctccgccgagggaagaatcctcgccccaaaaagaggagatcgcggggcgtcgcgtcgaaacgggaggtcgtttctcgcagccggttttgacaagaggccgctggacaccttacgatgatgcggcggggcggggcggccttcagagggcgccccgcggaggagtcgaggacaatgctatggaagcttttcaccgtcttttcccgggtcgccctgttttcctggggaggcggaccggcctcgctggctctcatgcagagggaggcgacgtccgccggttgggtgacgtccggggagttcgccgacgcggtcgccctgggcaacgctcttccaggcccgatcgccccgcaggtttcggccttcatcggatacaagatggccggctttccgggcgcggtcatggccgtgaccgggacggtccttccggcgaccctcctgatgctggcgatggtcatcgccttttttaagttcaaggattctccctccgtcgtttccatgctccgcgcggtccgtccggtcgtcatcggcttccttctctggacggcttacgacatggccgtgagcgtgttcgggttgaaaaacgcggctgtcggaccggtcctggcggctcactgggataaaatcctcatcgccgcggcggctttcgccctcctcgcgttgacaaagaccaatcccgtttggctcgtggttggagcggcggccctcggcttggcggtgtattgagatgaaaaacgtgtccgttttctgcggttcgagcccgggagcggaaccggccttcgcctccgccgcccgagacctggggcgggaattcctccgtcgcggcttgggtcttgtttacggcggcggccgggtgggtctgatgtacgagatcgcccggacgattcatgagggcggcggccgggtcgtcggcgtcatcccccgggacatggtcgagcgggagctcgcctacgccgaggccggcgccctccggatcgtcgagacgatgcacgagcgcaaggccctgatggccggattgtccgacggattcatcgccctgcccggcggcctcgggacgatggaggagttcttcgaagtcgtgacttgggcccagctcggcatccaccgaaagccctgcggtttcctgaacgtcgccggctattttgatccgatcctgggattcctggtccgggcggaggcgttgaagttcctccagcccgagcaccgggcgatgatcctctccgatccggacccggcccgcctgctcgatcttttcgaaacctaccggccgcccgaggccgatatggcccgctgggccctcgacatgagcaagacatgataaagaggggacacaataccaattaacatgatttcccgagatccaatcctctgccgccgggggacgcgcaatgaagtcaataggtcttatgtctcctcattgtaattgactcccccgcggccgcgtgccagaatgaaggcccatgaacgatccacggccgggaggcgggccatgacggatgaagccggcgcaccgccggtccggctgaagtggaggtatccccccgagcttccgatttcccgccgccgcggcgacctggtccaagcaatccgcaagaaccgggtcgtcatcatttccggcgagaccggctgcgggaagagcacccagatcccgaagatgtgcctggaagccggccgcgggtcgcgcggccggatcgccgttacccagccccgccggatcgcagccgtgacgatcgcccggcggatcgccgaggagatgggggaaccgctcggccggaccgtcggctacaagatccgcttcgaggaacaaacctcgcccgaaacgcggatcaaggtcgtgaccgacggaatgctgctggctgaaacccaggccgacggccgcctccgtgaatacgacacgatcatcatcgacgaggcccacgagcggagcctgaacatcgacttcctcctggggattctcaagaccctcctggccaagcgttccgatcttaaggtggtgatcacctcggccaccctcgatctcgaaaaattcgcggccgccttcgacggcgcgcccgtgctcgaggtcggcggccggatgtatcccgtccgcgtcgaataccggacgccggcgccggacgaaaaggaggacgtcgattacgtcgacgcggccgcggccgccgtcgacgacctcctgcggcgcgagccgcccggcgacgtccttgtttttatgccgacggagcaggacatcctggaaacctgcgagatcctcgagggcaagcgctatcccggattcacgattctgcccttgttcgcccgcctgccgggggcccggcagggacgggtttattccgtcgccggaccgaagatcgtcgtggccaccaacgtggccgaaacgtccctgacgatccccggcatcaagtacgtcgtcgacacgggcctggcccggatctcccagtacctccccggggcgggcatcaacagccttccgatccggccggtctcccgggccagcgccgaccagcggaagggccgctgcggccgggtgagcgacggattgtgcatccggcttttcgaggaaaaggattacttggaccggccgcggttcactccgcccgagatcctccgttcgaacctggccgaggtcatcctccggatgatggatctcaacctcggccatccggcgaagttcccgttcgtcgacaagccgacggcccggatgatcgaggacggcttcgagaccctggtcgagctgggcgcggtccggaagaggggcgccgattaccacctgaccgaccgcggccggaggatggcccggattccgctcgatccgcgcctctcccggatgctgatcgaggcggccgcggagaactgtctccgcgagattgcggtcatcgcctccgccctcagcatccgcgatccccgggagcggccgcccgccgaggccgcccgggccgatgcttcccacgcgcccttccgcgatcccgattccgatttcttgacgctcttgaacatttgggaccgctatcatggagattgggaaggcctccggtcctcggcccggaagcggcggttctgccgggagcatttcctttccttcccgcggatgcgggaatggacatacatccacgaccagatcctcgagattctccgggagcagaaatttcccgccgtccggaccaaagccggctccatgtcccggcccctgtacggggcgatccaccgggcggcggcctccggcctgttgtcccgggtggccgtcctcaaggaagggaaaatgtacacggccgcccgcggccgggaagcgatgctcttccccggttcctcgctgtttgggaaaccgccggcctggatcgtcgccgccgaggtcgtccaaaccggccggctgtatgtccggacggccgcccgcatcgaacccggctggctcgaatcgctcgccggagatctctgccggagggcgcacgagaatccccggtgggataaaaacaggggggatgtccgggtggaggaacgagtgaccctctacggcctggagatcgccgtccatcgggacgttccctacggccccctcgatcccgaggccgcctcgaagatcttcatccgcgaggccttgtgcgcgggccgggtaaagaatcctccggcgtttcttcgccgcaacctccagctccgggaccgcttcgaggcgctcgaggaaaaaatgcgccggcgggacatcctcgtcccgaatgagaaagccgcggaattttacgcccggcgcttgcccggcgtttacgacctcaagggcctcagccgatgcctggagaaacagggcggtgacgcgtttcttgtcatggccgaggacgatctcgtccagttcaagccggcggtttctgaaatcgccctgtatcccgacgatctaagcctgggcgggcggaaaatccgggttcagtaccgcttcctccccggaacggaggaggacggagcgacgatccggatcaaggcggatcttctcccccggatcgagatcggcgccctcgaatgggggatcccgggatatttccgggaaaaaatccacgccctcgtcaaggggcttccccagcgctaccggaaagccctcgtcccggcggccgaacgggccgacacgatcgtccgggagatgccccggacgccgggcccgttgtccgcgactctctccgcctttgtccggagacggttccgggccgacgttccggcggacgtttgggaatccgtcgacgtgccgaagcatctcaagatccggctggtcgtcctggacgcggccggaaaggaagcgttctcgggacgcgattacggcaagctcctcggcttgcggccgaaagcgcccgtggccgacaccgcgtcctcctcctggaagaacgccgcgagcgaatgggagcggccggccgtctcggactgggaatgggacgcgattcccgcggaaatccggctcgacggcgggccggcggcctatccggcgcttgtccccggaccgaaagacgcgggcctccggcttttcaaaaccgccggggaggcggcggccgtccatccgcgcggcgtcgaagcccttctctcaaaaaaattcgcccgggacctcaagttcatggagcggatcatggtcttgcccgaggagcaccagcgggcggccctgtatttcggcgggaaagcggccttggaaaagtcccttctcgaggggctccgcgtccgcgtgttccgcaaggagatccgaacgcggcttgaataccaggagttcgccgaccggctggtgaaaacactgttcgccgagggacaggttcttttggacgcggccaagcgggcgctcgaggcgtaccaagccgtccgggccgatctttacacgatcggcatgacccaccagggaaacaaagcggtggaaggggttttggaaacggttcgggccgagttggacgccctgatgccccgagacttcgccgaagtctaccccgccggccggctggcccgtcttccggcctaccttgaggctctccggcttcggaccgagcgggctaagaacagcccggaaaaggatcggaaaaaagcggccgaaatcgttcccttcaccgaggcgctggccggactgaaaaaacggcttggggccgagggcccggccgagcttcgggaggagctggagaccgtccggtggatgatcgaggaatacaagatcgcggttttcgctcccgaggtcgggaccgtcggctccatttcggccaagcgcctgaacgagatcttgcgggacatccgagggaaaatcgaagccgccgttccccagccggcgaagccgggacgccccgcgcccgggaccaagccgcgtcccgcgccgccggcgaaaaacaaggggcgctcggatccccgctccttccgcgggaattgagaagcgcccgcttctttttcaagaccgccgcatgtccttccgctcatatccttcccgcgcccccgcggcgcgcgaaacgaggcggggtccgtcctttcccgtctcgtgttcgggggtctcctcggccgttgacaacgctttttcttcggcgcatattgaagccaaacaggaggaatgccatgcaaaggaaaagagtgtcgaaaaaactatcctcggccccccccaccctcttccagatgaccgcttacctgaaggaatacctggggggcctccggcccggacggggagcttctgaagccgaaaagaaacgctatcaagcggccgtctcttgcctcaaggagatggagacggttttcacgaaagtggagggaatgttcgagcgaacagcggcccgcacctgtccgctcgatcggccgtcgatctcctttggcggctagccttcttccgttttccggcggaatcgacccggcccgccgccttgagtcccggccggccgcggctcgcgttcggccggagcggaagagcccgccgggaaggggagtgctggccggcctttccctgaccctgacggagcgctgcaactggcggtgccgctactgcccccgggttcgggggacgaataccctcgaagccgggaccttggaccaggcctgcgcggccctctttccttatctctcctcgtctcccctgatccagttttgcggcggggagccgctcctggcttttcacttgatccggcgggcgattgagcagctggaaaagaggagccgggattcccggacgctcccgcgctattccctgacgacgaacggctcccttctcaggccggaaatcctctctttcctcgacgcccatcgcttcgctctgatgctgagcttcgacggtccgtcccaggaccaagaaaggcggaaagggagttatcggaggctgaccgccctcttagacaagctccccgcctaccccggcatccggccggccaccaacagcgtctttggtccccggacggtgggcacgctggcggatacgatcgccttcctcgtcgaccggcgcgtcccggagatcctcgtgtcgttcgatctcacggtcccctggccgacggccgctctcaaccggctttccgacggtcttcgcgccgccgcggatgctcttttggactatgcccggaccgggaaggacgtgccgttgttgaatctccgccggccgccggctcccgggatattcgtctgtccggcgggacgggatcgcctcgccctggaccccgaggggcggctgtggggctgctaccggttcgtcgatttccaccgggcccatccccgcccggacgtgctccgccgtttctgtttcgggacggtcgcggatttcgtccgggccggcgggaatcctgatccgcggatccaggccgcttacagcggcgggcggatggacctcgcccaaacgcgggaacggccgtgcgccggctgcgcttggctcgatcgctgcgccttctgcccgccggccgcggccatgaagagcgggatcctcggcctggtccccgtcgcccactgccggatcagccggatcgtgatcacggagcgggaacggttttggaggcgggccgcggtcccggaatcttgagggcggccagctcttcccgggcgtcggcgatttcgggccggccggcgtcggcccgggcccacaggcggagaaacgtatcgaacgcgtcggcggcttcggccttgagatttttccggagatagagttttcccaggcggtagtagttccggccgtagatgtccccgaagagaagacgtcccgaggtcagggcgccgatgtcccggcggatcccgatcgccctgtccgtatctcccgccgtctcggcggtgagggccaaagactcgtagtatacggcgtggtcatcgttcagggaataggggaacggcaatccggcgacggccatccggcccaggtcggcggcggacgcgtagtctcccgcctgccgggcgatcgctcccttcagcctgaaataatgcttccggagatggcgaaggccggatgtttcggtgaggaggcggagacgctcggccgtttccccggccccggcggcattgccccgagcgagcaggacatgccccagaaggccgagaccttcggcccggacgatcacgtcgttcagctcctcggccaggcggacggcccggcgggcgctttcctcggccgcggcaagattgtcccgaagttgaaaaccggccgcttccatcaggagaaaggaatcttcctcgtcctgcatcgcccctcggcgggagatgtcgagtccctgggcgacccggctccggaattcgtcgaagcggccttcttgaagacaaagagcggctaaaaacctcagcccgagggcttgagaggcggcgtcggcgtcgcggatgatccgaagataatcctctcgggccgcggccgcgtcaccctgaagctggcggatgtttcctcggagaagaagtgccgtggtttgtccgctttcctgctccaaagcttggttgaccgcggccagggcgtcttcgtaccggccccggcagagatcgatgaggccgacctgccggcggcgcagggccggaggcagcaaggcgggatcttcgggaagaatgtcgacggctttttcgggcaatccctcggccaagtaaatggtcgagaggttgatatagagaaagggattgaatttgtccagggccaggagccgctcccagcagtcccgggccttgctccattcctcgagattccggtaaagcgaacccaggtggcggagcccctcctcgtcgtcgggggagatcgaaaggacttgccggtactgatggacggcttcgtcgggaaacgacgatctgaacaccgcgtcgtaaagcccttcgatcagatgccggtcgcgtggcgaagcccggccggccgcggccagggccagggctttttccaggttggctttggcttcagcccgcttgctttggtacagggaggccgcggccaggccgcggtaagccagggcgaagtctccgtcgagcccgatcgcgttccggtaagcctcggcgctttccgcgaatttcccctcgaaaaacagcgtctcgccctcgatgaaattcttgagcgcctcgggggaccgggtggtgatcctgtcgagccccccgctggacgaggccgccgccgggccgccgggggaatggagggacgccttgaccgcgggggtcatccgctcgacggcggcgttgagctggctcaagtcctccacttcggcctgggtcgaaccggccgtctcccaggtttccgcgtccaaaagaaaagagttgatcttgtatacccggccgattttcgcgaagctgccctggaggatgtagcgggcctgggcccgttcggccacgtgcttgaggtcgtcggtggaatacgtctcgtttttgagaaggcccttgtcccggaggatggcgaacatccggtcggtcgtaatgacccgcagccgggcggattggagaagggattggatgacttgatagcataatcccttgcggaggtaatcgaggctcggatcgcccgtgttgttctcgaaatacatgaccgccacggaggggaacgttccgggggccggcggccgggccggtttccgggtgacgacgagaaacaggccgagggcggccaggagaagggcggccgccccgagggggagaaccaagcgggcggcccgccgggcggcgggggccggttttccccgttcctccaaggactggagaaggcgtccggccgtcggcgggcgccgggccggatctttttcaagacattggaggaccgtctgttccaggcggtgggagaggccgggattccaggtccggagcggcttcggtttttcatggaggtgtttttcgagaagctcggcggcgcttccggcggcgaaaggccttcgtccggtcagcatttcgtagaggatgacgcccagggaataaatatcggaacggccgtcagcctcgctccccgcggcctgctcgggcggcatgtaggccggggtgccgacgatccggcccggggctttccccgacgggagctcgaacgaccgggccagcccgaaatcggccacccggacccggccgtcggcgtcgagcaggatgttttgcggcttgagatcccggtggacgattcctttcttgtgggcggcggccagggcccggcaaacttggcgggcgatggagacggccgccgtctcggtcagggggccggaggcgcgcaggagctgatccaggctctgcccggcgacgcattccatcgtgaggtaggtcacgccttcgctttcgcccaggtcgtagacgcggatgatgttttcctgggagagcgaccgggccagcgaggtttcctttttaaagaagccgagggcctcgggacttgcggcgcgctccggccggatcatcttgagggcgacggtttgatccagctttgtgtcccgggctttgaagacccggcccgtggctccgccgccgatttcctcgacaatgagatagcggccggcgaaacgcgctcccgggggaaaatcgagcggatcggtcgccgcggggaggtccggcttatcgggcagggaaagcgtcgtttcgtcctcgagattcgccccgcagttgaagcaatggacatcggacgcgaaattggacgcctggcatttgggacaaatcctgcccggcggcaaggcgctcatccgctggcccttttccgattgttattaacaatatagaaagacggaatcatgaagtcaatttcggggaaggagaataccgcgccgatgggagcggagttatcgaatcggaatccccggattccgacaattccgtcgtttcatcgacgaaaatgtcggcccctctgtctttatattataattatcttattgattatcaatgatatataatttggcatgcctcccgcatacatgaggcttgaactcatgaaggaggttaaaccatgagactcaaaaacggttttatcatcggatcgatccttgtcctcggcgttctcggcgccggagccctggccgcgacagccccgaattcgcctggaaaggaaatcaatgcccggaatcatttccagtggcggttccaacacaagttcatggatcaaaattgcgacgggatcaatgaccgtttccgggaccatgacaatgacggcatccccaacggccgggacccggattgggcgcctcccaaggatgggacgggctacaagaacgggaatcggcgggggggtgtccgggccgagggaatcgcaaactcttggaataaagcggcgttccgcggcagaggaacgggaccgggcttttgcgacggcacgggtcctcacggccgatccgtccgccggggccgtggataaggcgggaatctcgagccggccgttccagacaatgacggggaaaaagggccggaaggccctttttcccttataatcataacgaccggggctgatcatgaaacgattttttatcttcggcgccgcggccgccgttttcgcggggtcatcgtccgccgcttcgctttccgtgtctctcgttcaaaactggacggacaacctcttccaaacccggtacgccgccgcggacgcgatgaccgcggccggcattgcctgggagaaatccttctcggagttcggccttttcgccggtctcgattacagcgctctccgagagaattcgggaatgagcctggcgtctttgtcgggaggcgcggattaccttcaggcgctcggagataaaacggccctgtatctctcggtcgcgggaaacgcctcgctattccaggccgaatattccgacttcaactacgaaggcgtccgcatcgcggcttctttgaaaagctatttgacgccctcttccattttcaaggcggcggcggtttcggaattccggtcgtatcgctatgcgccgttcgattttctcagccagggcttgtccgtttcgctggataagtacttctcctcgcggacgacgctccaagccgagctcggctggggatataaatactttttccatccgcagacgatcgccccggaagccgatgcggccggcctcgttccaccggaggggggcggcggtttcggatatgtcgggtacggaaacggaggatatcggcatggaggatacggcggcggaaaccgagggggcggggaatacgctccggtcgccgaagccgcggcggggaaagggattcaagtcgcctcgtttcaagcccgggccgcccaaggattgggggagagggtggggctgcgcctgggagggatcattcaatggaatctatccggggaaaatcccttttccacggtcgaggaattcatgatgatcgaaaacccgacctccgatgccttttcctgggagggcttgggctggaatgcccagttgtcggctcttcttccctggaacgtcagcgcccgcctgggctataatacgacggagatgacttttcccgggatcgagagccgggacctggaggggaatcccctcggcttcacccgggaagacaaacgctcccgttgggagattttggccgaaaaggatttcggccgttggtcgttgaagttgatgtacgctcaaattcgaaacgcgtccaacgatccgctttttgactggggcgggggcttcctttcgggaggattgcaatggggcttcgattggggcgcaaagtaaacgcgggatccgtcgttttcgccgtcgccgcgcttttggcgtccgtccaggcttccccgccgcaaggccggccgcggatgtccgctcattattatgacgtaaagacggaaatccggatcgagggcgtcgttcaatccatccgattcgagcctcgttatcagggagcggctccctttctcatcctggttttggacgagcccaagacgagccgccgtttcatcgtcgaaatcggcccggcctggtttttcgaacatgacgtccatcagggcgagcggatgaacgtcctcggatcgttggctccggcgggagacgcagaggcggttttgatcgccagggaagtccaactccagggggagatcgtccgggtccgggatgcccggggattcccgaattggaggggaggctctcggcaggcggggaaacggaagcggggccgttgaattgcgccgacgggagttttgggcttttttcatccttcccgcggccggaatcatcgttctctttttccttcagtccgccctgagccgggaattcctcaagcgaaaaaccgaggccctggtcagggagcagttgaccgcttccgcccgcatcctggccgctgaatttgaggagcggctcaaagagggggttcttcctcaaaccgccctcgaccgttactccggggagacggacatctatttcttagcccttgtcgacgagaccgggaatgtgctgggctggtcctctcaattcgagggatatcttccgatcgccggccggcccgcctcggatccggaaagctgggccatcgattcccccgccgggacgattctcaacgtcgtgaggacattcccggcgaaggaagaccggatctattctctctatcttggatattccctgtcgcggttggatgaaatgctggcctattcacggcgaagcgccctccttcttttcggcgccctgggcgccgtgggccttcttctcttcagcgggatttatcggatgcatcgggcttccttggcccggaccgaggaagccgcgggcgaacgccaggaaaaagaaagattccgcgagctgtccggattcaccgccgggatcgcccatgagattaagaatccgctgaacagcctcgctcttctctgcgagatgatggaaaagaacgccccggacgtcctggccggcgacgcggccctcggccggatcgaggtccaaaaaatctcccgcatcctcgaccggttctcggccgtgcttcggccgctggatctccggctggaaacgatcgaggcggacgccgtcatcggagacgcggtcgaggcggcttcccccgccgcggtttccaagggcattccgatccggcgggagccgggctccgggccgcgcctccgggcggatcgtggcttgctcgcccaggccctgttcaatatcgtccgcaacgggctcgaagcttccgcggacggggagatcgtcatccgagccgaaaagaacaaggccggtgttttgatttccgtcgaggattccgggccgggcatcccggcggcggaccgggaacgcatctttgagccgtttttctcaacgaaagccgatggattgggagtcggcctctttctggcccgcaagatcgtggaagcccacggcgggcggatttcggccgccgaacgaagatcggggggatccgtcttccggatcgagctcccgggggaaaaaggatgaataaatcgatcgtcctgatcgtcgaggatgatcctctccagcggaggctcatccgggggaatttggagagcgaaggcttcgtcgtgacggacgcggcggatcaagcgtcggccgtggcggaaatgcggcgtctcccggcggagatcgccttggtcgattacaagctcggccgggagacgggccttgacgtcatccgtcttctccttaaggagaatcccgccctggccccgatcatgatcacggcgttcgccagcgtcgaaaccgcggtcgaggcgatcaaggccggggcttatgactatatcgtcaagccgatcgattttaagaagctgcttctgatcatcgaccgggccttggagcggcatcgccttcgggccgaggtgcaaagcctgcgggaaaccctggtcgacaaattcagcgcgcgcaatttcgtttccgcctcgccggccatggaggccgtgtcgcggctcatgtcgaaagcgtctcaaagcgatgccaatgtcctcatcaccggggagaccggcacgggaaaggatctcgtcgcccggtcgattcatttcgcctcgaggcgggcgaagggtccctttctggcggtcaacatcccctctctccccgaatcgctgattgaaagcgagcttttcggagcggagaaaggagcgtttaccggggccggcgagcggaagacgggaaaattcgaggcggccggaggcggaacgcttctcctggatgagatcggcgaccttccgctccatcttcaagtcaagctcctgcgctttctccaggaccgcgaattttcccgcctgggctcgaccgcagtcctccgcgctgatgtccgcgttctcgcggcgacgaatcgggacctggagaaggccgtgagcgagggggctttccgagccgacttgttctaccggttggatgtcatccggatcgcccttccgccgcttcgcgagcgccgggaggatattccgccgctggtcgatcattttctcaggaaatacgcgctccgcgagaagaaggccgtccacgggatttcagaggaagccttagacatgctggtccgtcatccgtatccgggaaatgtccgagagctggaaaacgccgtcgaaagagccgtcgtcttctgtgaaaatgacatgattctaagcgaggatctcccgcggtccttgaccgtccgttccgaagccgattccccgttcccggggaaggcggtttctctcgaggagaaggtcaaacgcctcgaaatccgggaaattcgggaagccctggaggcttcggggggggttaaaagcgcggccgcccggaagctcggcattacggagagaatgctttcctataaagtcaaaatctacgggctgaagcccaaatccccggaggccggaaatcccgtctgactccccttaggctggcgaccgggcggcgtttccgttataatgccctctaccttctttcgtggagagattcccttggcgcgtttgtatgaataccagagcaaaattcttctccgcgaaggcggccttccggtccccgaaggcgccgtcgcctcctccccggccgaagcccgggcgatcgccgagcgtctcggccgcccggtcgtcctgaagatccaggtctgggtgaccggccgggccggtctcggcggcatccagttcgccgacactccggccgaagccgagaccaaggccgccgcccttctcgggatgaaggtcaagaattacgtcgtcgagcgcgttttggtcgaggagaagctggccatcgaggcggagtacttcgccgggatcgtcatggacgacgaagccaaggccccgctcctcgttttcagctccgtcggcgggacggggatcgaggagatcgcccgccgacgcccggaccgggtcgtccgccggctgatcgacgtccgcaccggcctgcgcgggtttgaggctctgaacgtcgtccgaaaatccgggatcagcggccctgcccttgtccccttgtctgatttgctgaccaagctggccgcgatcgcccggaacgccgacgcccgctcggtcgagatcaatcccctggtccggacggtcgacggccggattttagcggccgactgccatctcgtcgtggacgattacgccgtctaccgtcatcccgagctgggcattgaaatcgcccgcgagttcgaccgtccgccgaccgagctcgagcggatcgcctacaaagtcgaggaaaaggaccaccgggggacgttttactttctccagatggccgatcaatccgagccggacgatttgctgatcgggtttcacggggccggcggcggcggatcgatgatgtccatggacgccgtgctcgcccggggcttcaaaatcgccgattattgcgacaccagcggaaatcctccggccagcaaggtctaccgggcggccaaggtcattctcagccagcccgggctcaagggctatttttcctccggctcgggcgtggcctcccaggaacaatacaactcggcccgcgggctggtgaaggcgttcgccgaggagcgcctggcgataccggccgtcctccgtctcggggggaattgcgaggaggaagcgatccggatcctgagcgcctatcttcaggatctgccggcccgggtcgagggatacggccgcgacgatccgcccgagaaatgcgcggcccggttggcggagctgatcgccgaaaaccgcggcgctgtccacgagatccggccgatggaggagcctcggcttccggactgcgcttacacgttcgccaccctcaccgggcggctgtccatcgatcattcccggtgcctccattgcgcgtccaagggctgcctggaagcgtgcgggtggaagatccttgaagccgacgccgagggcctgcccgttctggcgattcccgaggccgaggcgaagaaaggcaagtgcacggaatgcctggcttgcgagatcttctgccgctttcatgaacagcaggcgatccacatcgagctgccgatcccggggctgaaggaataccgggaccggctccggcgggaaatgaaatgaggcgcggatagggtcatggccatctttgtcgacgaaaaaagcaaagttctgattcagggcatcaccggccgggagggcatcgcccggacccggctgatgaaggattacggcaccaacgtcctggccggagtcacgccgggccgcggcggccaggacgtctacggcgtccccgtttacgacgccgtcgaggaagccgtcgagaacgtcgggccgatcgacgccagcgtcatcttcgtcccggcggcggccgtgaagaacgccgccctggaagccttggcggccggggtgaagctgctggtgatcgtccccgaccgcgttccgatctacgatgtcctggatatcgccgccgcggccaaggacgccggggcgagattcgtcggtcccaacaccctgggcctcctgagcccgggaaaggcggtcctgggaatgatcggcggccgggccgagcgggccagggaatggttccagcccggaccggtcggcgtcagctcccgaagcggagggatgacgtcggccgtcgcctactatctcagccgggccgggctcggcctgagcacgatcgttcacgtcggaggggactcgatcgtcggctcgtcccatcccgaggtcatggagctgttcgagcgggacccggaaacgaaagcggtggcgatgttcggcgaaatcgggacgacccaggaggagcgggtcgccgatttgatcgagcataaaaaattcaccaagccgctggtggccttcatcggaggcaaggcggccaagtcggggacgcggttttcccacgccggagccatcgtcgacggcaaccgcggctcctatgaaagcaaggtcaggcggctgcgggaagtcggcgtccatgtggtcgaggccgtggccgacatccccggccgggtcgccgggctcctggccggaaagaaatagcggccggaacgccgggccgcaaaggagaagcgacatgtctgataaccaagaaaaatggccgacggccatcaccgaagtcaaacccaaccggatcatggcccggggatatctcatcgacgagatgatgggaaagatctcgttcgcccaggccgtctgcctgattcttacgggggagctgcccgcgcccgccgtcgggaagctgctggatgcgatctttgtctcgtccatcgatcacggggcctccccgccctcggctctggccgcccggaccgtggcctcgaccggggcggagctcaacgccgccgtcgcggccggaatcctggccatcaaccgtttccatggaggagcgattgaggaaggacagcggatgttcctggccatcgcccagaaggccgaggcctccggaggcgatgaagccgccgcggtcaaagccgttctggacgagatgaaggccaggggcaagcgggcctccggtttcggccaccggctgcacacgaaggatccgcggacggcgaagctgttcggattggccgaggagctcggcctggccggccggcacgtccgtctcgcccgcttgaccgaggaagctttggcggcccagctgggcaagcccctgccgatcaacgtggacggagcgatcgccgctcttctctgcgatttgggcattccgccggcgatcgggaacgccttttttatgatcgcccgggtgcccggcctcgtggcccacgtccacgaagaaaaaacccggatgaagcccatgcggaagatcgacccggcgggctatgtttacgacggccctccggaaaggaagatcccatgagcgtttcccgcgaaaaaatcctcgagcttttgcccgatatcgggcagatcgccgatcccggcctccgcgagctcaccctcaagatctggtttgaagcggtcaagaagggcggatggtcggagcccgacctggcccggatgcctttcaccctccttctcaagacggtttcggtgagcctcgtcgagcacacccgcaacgtgacccggacggcggtcggcatcggcgacgtcctcggcaaggaatatgccggaaaggtccgggtggaccgcgacgctctcctggccggggcccttctccacgacgtcggcaagcttttcgagtacaccctcgagaacggagccttcgtcaagagccgggccggcgacctcctccgacacccgatttccggggcggccttcgcctaccagttcggcctcccggaggaaatcgtccacatcatcgccgcccactccaaggaaggagacggcgggcggcggacgatcgaggcgatcatcgtcaaccacgccgatttcgtcaatttcgacgtcttcaagtgagagggattccgccatggcccagacgttcagcgagaaagtcctgagccggaaggccggccggcccgtccgggcgggggaagtggtcaccgtctcccccgactactgcctgtcccacgacaactcggcggccatcatcggcgaattcaagaaaatcggcgtgccgcgggtcaaggctccggacaagatcatcatcatcctcgatcacatcgtcccggcggccgacgaaaaatacgcccagaaccacaaaaccatccgcgaattcgtccgggagcagggcctgccccatttctatgacatccagaacggcgtctgccaccaagtcctgcctgaatcgggcttcgccctcccgggcttcctgatcatggggagcgattcccacacgacgacatacggggctttcggggctttttccgccgggatcggccggaccgaagccgcctccatctgggccaccgacgagatctggctgcgggtgcccgaaaccctccggatcgagttcagcggccggttccccgagaacgtctgcgccaaggacgcgatcctcaagctcatcggcgaccagggggccgaccgggccaattacgaagcggtcgaattcgccggcccggcggccggggaattcagcctgtcctcgcggatgaccctggccaacatggccgcggagatgggggccaagaacggatacttcgagccggacgccctgaccgtcgcctggctcaaggcccggaccttccgggaattcgaggtcgtcgtctccgaccccggggcggcttacgaggccgtcctgccgtttgatctttcaacgctcgagccccaggtcgcctgtccccacaccgtcgacaacgtcaagcccgtccgcgatgtcgccggcacgcccgtccagcaggttctcatcggaacctgcacgaacggccgggtcgaggacctggcgatcgccgcccggatcgtgaaagggcggagggtccatcccggaacccggacgctggtccttccggcctcccgggcggtctatctcgaggctcttcgcaacggctcgatcgagacgctgagcgaggccggctgcgtcatcctcaatcccggctgcggcccctgcctcggcgcccaccaggggctcctggcggcgggcgaggccgtcctttcgacctccaaccgcaatttccgcggccgaatgggaagccgcgactcggccatctacctggcttcgccggcgacggccgcggcctccgccctggagggaaaaatcaccgatccgaggatacgctcatgagcaccggacgcgtctggaaatacggcgacgacatcaacaccgacgtcattttcccggggcgctacacctatgcgttgatgtccccggaggagatggccaagcatgcgatggaggacctggatccggaattctccaagtcggtccagccgggcgacgtgatcgtggccgggaagaatttcggctgcggaagctcccgggaacaggcggccgcctgcctgcgggcggccggggtgaaggccgtcgtggccaagtccttcgcccggatctatttccgcaacgccatcaatctcggcttggccgtcctccaatgcgatgaggcggccgaggtcctcatgacgggcgatcccgtcgagatcgatttcgccgccgggacgattcaaagcggcggcaagacgcttcggttcttccccctgcccgaatcggtgatcgggatcgtccaggcgggggggctgatcgagtccacgaagaaaaaacttgggctctgagcgagcctcagccttcagccttgtcgaccaggggcccgcgccttaacccaaaattcattcgatttttatcgggagcgtcattgaattaaggcgggttgcgcttccctcggacccgcgccgggcttgaacactcggtcgagccgtcccgtcgacggtcaaatcggcccgcgcggccttcaccggttttggggcgatcgtcccgagcccgtcgtccccgaggattccgtaatcctccgggggccgtcaagaccgctgatggacgccggagaatcgaccggccggagctccgccctcaaaggcgggagactctttcttcgggacctgacggagatcttgatcgctcggcggaaaacttccggacgggggattttactcgacgttgcgcggccggggctgggggggattgaagaagcgcacgtctcgtttcttgaacaggccgaccaggagcatcccggcgacaaagccgccgacatgggcccaaaaagccactccgcctccctgcttcgcgccggacatggcgccctcgagcaactgcagaacaaaccagaacccaaggacgaaaccagcgggtatggaaaggatgcggctgaaaaagccgagcggcacgaggaccagcacccgcgcccttggatagatcatcagatacgcgccgagcacgcccgaaatcgcgccgctggccccgatcgagggaatcattgaggtcgggtttgaaaagatgtggctggcggaagccagcgccccgcacgccagataaaaaacgaggtatcggacgcggcccatcgccgcttcgatgttgtcgccgaaaatccacagatacagcatgttgccgatcagatgcagccagcctccgtgcaggaacatgctcgtgaacaggctgaacacaggggggatggcgtctaagcccgcgggcaggcttccgtgccccagaatcacggcggggatgctgccgtactggtaaaccaggcgctgcacttgcggcccgagcgataattgatagaaaaacaccagcacattggccgtaatcagcgctcctgtcgccagcggcgtgatccggaccggattatcgtctttgagcgggatcatgttcgatctgacggttgtaacacgcttttcccctccttctttcagggatcgacgacgccgcgatgcccaagggaagagcggaaagaaagatacatcatcttccggggggacatcaagatcaagaaacgcgtccggcaagccgtcccagggcgtcctccggccctgagcgaaaaagatgatccgcgggatgtcctcgccgccgacgaaggagaccgcgccggccgcgcgcaaccctcgacaatatcccaaaatcaggcgggaatacggcattcgccgcgggcggcgttctgtggtaaaattgccctccgcgccccctccggcgcgcaatccatgtgaggagtatcccatggcgaagtatcgaatcgcgattctccccggcgacggggtgggcaaggacgtgatcgaggcgacgatgcccattttgaaaaagctcgaagtcgacgcggaatacatttacggggacatcggctgggaattctggcgccgggaaggaaacgccctccccgaccggacgaagaagcttctcaaggaaaccgacgcctgccttttcggggccatcacgtccaagccgaaaaaggacgccgacgccgagctcgatccctcgctccggggcaagggcttgtcgtatttcagccccatcgtccgccttcgccaggaattcgacttgttcaccaacctccggccgtgcaaggcctaccccggaaacccgcttaattacaaggataaaatcgacctggtcatcttccgggagaacaccgagggcatgtacgccggggtcgagttccggccccttccggacgccgtccggacggccctggcgactcacccgaaattcaagccgttcgccgcggtcccggccgacgagatcgccgtgtccacccgaatcatgacgcagaacggctgtcggcggatcgtcaaggcggctttcgactacgcccgggcgaaaaaccgcaagtccgtgaccctggttgaaaagcccaacgtcctgcgcgagaccggcggcctgatgctcgagacggcccgcgaggtggccaaggactatcccgacatcgtcttcaaggacgccaacgtcgacgccatgtgcatgtggctcctgaagaatccctatgactacgaggttctcgtggccgaaaacctgttcggcgacatcatctccgacctggccgcccagcttgtcggcggactgggcttcgcctgcagcggcaacatcggaagctcgtacgccgtgttcgagccgactcacggctcggcccccaaatacgccgggatgtacaaggtcaacccgatcgccacgttcctggcggccgagctgatgctggagtggctgggggagacggccaaggccgaagccctggacggggcggtggccgaggtgatcaaggaaagccgggtccggacctacgacatgggcggcaagtccacatcgctggaaatgggccgggccgtcgccgacaagctgtaaggggagaaagggaggcgccgtggccaagaccgtcatcgaaaagatcgtccaggctcattcccgggacgaagccgccgccgggcggatcgtctggatggacctggacgtccggtcggcccgcgatttcggcgggcccaacgtcgtcaagcattttgaacgcgaatacggcgacgagccgctcgacgatccggcccgaaccgccttcaccttcgatctctgtgccccggcctgcaccctgaagtatgccgacaaccagcaggcctgccgcgatttcgcccgcaagcgcggcatcccggtctacgacgtcgaccggggcatcggctcccatgtcctgatggaggaagggctggcccgccccggcgggaccgccgtgggcacggacagccacatgaacatcctcggggcgatcggctgtttcggccaggggatgggcgacgtcgacatcaccttcgccttccggacgggacggacgtggttcgaagtcccggaaagcgtccgggtcgttctcaaggggatgccctcgccgcgggcgacggccaaggacttgaccctccatctttgccggattctcggaacctcgaaaatcgccctccgctcggccgagttctacgggccggcggccgccggactcgacctggccggccgcatcaccctctgcagcatgatcaccgagatggccggcatcatcggctttgtcccgggacccgtcggccgccccgggaaaaccgcggccgccttcccgggacccgggacggccgcgcccgaggccgacccgggcgcccgatacgccgccgagatcgaagtggacgtcgacggcctcgagccccaggtcgcccttccgccttcgcccaacacggtgaagcccgtgtccgaggtccgcgacgcgcggatcgactccggctttatcgggtcgtgcaccaacgggcggatcgaggacatggaggcggcggccgccgtcctccgcggccggaaagtccggccgggggttatgcttaaaatcgtcccggccacccgccgggtgtacgaggagatgctttcgaccggaatcctgaaaatcctcttcgacagcggggccatcgttctcaacccggggtgcgggggatgcgccgagggccacgccgggctgacgggaaaaggcgaggtcgaaatcagcaccgggaaccgcaatttccccggcaagcaggggaagggcccggtctacctggcttcgcccgagacggtggccgcctcctgcgtcaagggcgagatcgccgcgcccggggagctgtgacatgagagagaccgttcttcgcggccgcgtctgggtgctggccggggccgacggccggctgatcgaggacatcgacaccgaccagatcttccacaacgctcatctccacatcaccgagatttcccagatgggcgcgttcgctttgggcaacctggagggctggaaggatttccccgaaaaagcccggcccggggatatcctcatcgccgggcggaatttcggggccggctcctcgcgccagcaggcggtggattgcttcgtcgccctcggcgtggcggcgatcgccgccccttcgtattcggcgatctatttccgcaacgccgtcaacacgggattccccgtcctccggagcgacggcctggagcgggcggcggccgagggccggattcggtcgggagacgaggtcgagctcgatctcgccgccgggcgggggcgcgacctcacccgggacggggcattcccgctcgagccgatgagcgccgtccagcgggagatctacgaagccgggagcttgttccgcctgaaaaaggattgacttcgttttccgcgggcccgatggctcttttcatcgggaaaaagaatgtctaatccgccgtcagcgggagggaatcgtatccaggcaaatccccgccgcttgcgagaggaaatccttgataaaaccttcatacttggtttggttcccggacatcgagcaggaccaaatcttcaaggctttctccgtgtcatgcatctcgccggccagggagatatcgatcaaccattcgtggcggtcgcggagcatgagatcgatcggcgttacgccgccccatctgaatcccggcactcccggcgtcacgattcgaaggaaatcggcctccttcgcgtggagaacgaaaacgttcagtgtgaaccggacgacggccgatttgcccgtctccttcttgatcagatccaaggcgcgagggctcatagcctcgtcggcccgaatttgatgccggcgggtgaaatcgacgaatccctcgaatccgaggatatggaaaccccgctcgacgagggcgttctcgatggctgaaatgaaaaaaggattccggttttcccagggcaggttcgcgaggtcgacgtagacagcgacatctttataatccccgaagttgatctctggatgagtatagacctctcgagcgaccagtttcggtttcgggacgccgcaggatccggcggccagcaacaggatcgcgacgacggcggtgaaaaaaccttttctcatgacgtccccctttctcgctgattcctttgataaagacattatgaaaagaataaagaaaaatagcaaccccggccggacgaagcttgtctctcggaattccggtgttgtatgatgccctcatgacggcaagccaagcaaaccggcggccggaatcccgcggaaacgaaccgcccgggccgaagcggctcctggcggtcgacacgaccacgggatgcggatcggccgctctcatcgaggacggccgggtccgggccgagatcggggtcgattccttcgggacgcattcggcccgtcttccggcttccatcgacgtcctgctcaaatccctccattggacgccggccgacttggacggctatgcggtcacaccgggaccgggctcgttcacgggcatccgcatcggcctcagcctgattcaggccttcgccttcgcctcgggcaagcccatcgccccggtttcctccctccgggccctggcctggaagctccgcggcgacggcctcccggccgtctgccctcttcatgacgccaagaagggcgaggtctacgcggccctgtacctttgtgaaaaagcgaaaatgaaagccctcgttccggagggcgcctacgccccggaggcgttcctgaagcggcttccccgcgggcggaaaatcctcttcatcggcggcggattcccgatcctggaggcggccatgagcggggcggagaaaaagcgggccgttctttcgccccggacgcggttcatcgctcccgaagtcgggctcctcggggctgaaatcatcgccgcgggaaaaggcatcggcccggacgatctcgagccgctgtacctgcgccggtcgcaggccgaggaagggcgctgatggcggttttcgccggcgcgaggaacatccgcttgcgccggatgacgcgccgcgacttgcccgaggttctggcgatcgaacgccggtcgttccccaatccttggccgctcgcgacgttcgagggggaaatccagaatctcggcctgtcccatcccgtggtcgccgtggacgaggaagcggaccggatcgccgggtacatcatctactgggtcatccgcgacgaggcccagatcaacaacatcgccgttcatccggattaccggaggcgccggatcgccgaaaacatcctccgcaaggttctcgacgccctgaaaaacgatggaattcagttcgtcactctcgaagtccgggccggcaataccggcgcccgggccctttacgacaagctcggcttcatgcccatcggcctccgaaaggaatattacacgaatcccgtcgaggatgcggtggtcatgagcttgatgttcggcgccggcgggccggtcatgccctagaaaaccgattccccggccgtcggccggtcaccgctccgcgaatgcgccccggttttttgagatgagagcccgcgagcgcgaaccctcgccgccggcgcagccgtcccggccccggcatggctccgggcggctgcgatcaaagccgccgtttaatctcgtgaagaggctcgccggggtcttgggcatccagacggccatgaggaacgcggccaggagggccagcgcgccgccgaaatagaagggcgccggcgccccgaatcccttccaccggccgacgccctgccaaaggatgccggcgatcaaggaggagggaaacgccagcaggcccgtcaaggcgtgatacgtcccgaaggccgtgccgcggagatcaaccgggaccaagtcggcgaccatggccgtggcggtcccgtaggccaggccgtaatacaatccgtacgcggcgtagagaagccagatcagccaggctctccgggcgagggcgaagccgaaatagacggccgcatagaccagccagccgccgatgatcaaccgccgccggccgacgcggtcggagaaaatccccgcgggcgcggagaccagggcgtaaaccaggttgaatatcgccaggatgatcaggatgccggtcaccgacatgcccagattctgagcccggagaaccaggaacgcatcggaggaattccccagggtgaaaaggctgatgatcgccaggtagatggaaaacggcttccccatgcggcgcagggagatcgccggaaccgtccggcggtccctggcggccacgtccttcgctccgacggccagggacagcaccgccaggaacgccggaatcaagctcagaagaacgatggactggaacgtggaccgggctaaggtcagggagtttctctgggtgagtccgacgaccaggagggcgatgaggatcccgatcaaggccccggcggtgtccatggcccggtggaagccgaaggcgaatccccggatttccggggtcaccgagtccgccaccagcgcgtcgcggggcgccgcccgaatcccctttcccgcccggtcggcccagcggactcccgcgaccaagccccagccgcgggcgaaatagaaaaagggcttggcgacggccgacaggccgtacccgagaaccgccagccccttgcgggcccccagcttgtccgacagccatccggaaaacagcttgaggaggctggccgtggcttcggcgatcccctcgatcagcccgatgacggccgtcttcacgcccaggacgttggccaggaagaggggcacgatgttgaggaccatttcgctcgaaacatccatgaagaagctggtgaagcccacggcccagacgttgcggggaagacggcggaaagacggccgccgccgtccctgtccggaggggcggttttcgaatccgccgctttgttcggcttggagatcggctttactcatgcgatgacggcgctttcctcgcggccggcccttagtaaaaaacctgcatcaggcagagacccttggccggggcggtggggttggccagggtccgcgctttcgtccggaagacgttttcgatgtcgccggcttccacccggccgcgcccggcttcaagcatcgtcccgacgatcgtccggatcatgtagcggaggaacccgttcgcctcgatcgtgaagagcagctcctcgccccgtttgcggagttccgagcggacgacgcggcggaccggatagagctcccggttggaggaaaaaccggagaaatcagcctcccgggcaaacagggcggccgcggccttcatcctcgcgacgttgagcggatgcggccaatgaagggcgtagcggaggagaaacgggctgatcgccttggccgtgacgatccggtactggtacgttttgctccgggcgtcgcgccgggcgtggaagccggccggaacccgctccagcgagaggatcctgatgtcgggggggagaacggcgttgagggctttgaacagcgccgcgtcgtcgagcttgagatcggccttgaacgaggccgcctggccgagggcatggacgcccgcgtccgtccgtccggccccgatgatgttcaccctcgttccggccaggcgggcgagcgcctcctcgacctcgccctggatcgtccggcctttgggctggcgctgccagccgagataatccgttccgtcgtagcacaggatgattttgtaattggtcatggacgggaccgggcggcaagggcttcgaaggccaggcggacggcctcctcgggcgacgaggccgcgacgacgccctcgatctcccagctgccgaggccgatgacgggtttcccgtggatccggccgtaggcgatctcgctcagggtcccgtattcgccgtcgatggcgattaagacgtcggcgttcatggccaccagggcgttgcggctgtagcccaggcccgtcgccaaggcgaaatcgatatgggggttggcctcggccggctgggttcccggcaggatcccgaccgtcagtccgccggcttcgcgggccccccgcgcggccgcttccatgaccccggacagtccgccgcaaacgaggatcgccccccggccggcgatcagccggccgacgtcgcgggcttgggccagggggccggccttggcccgggcgccgccgatgacgccgacgcggacgcgggagcggatggtctcggatttcatgatgtttcgctcttttaattaacacatcggccggggagattcaatttgcctcttttcccgcgggggccggcggagacgccgaaagccggagcggacatcgtccggacgaggcgtttcccaaggctttttccgccccaacgggcggagaaccttcaagttgcctctccttccggatttgaatagaatgaggggacaatcgcaagcacccgacggataagcgaggagccgaggaatgtccgattttctgaccatcaaatgcctcgacaaggccgaaaccgcgaaaatcgagcgggagatcgaggcccggatcgaagcccggaagaaagaaggcctcctgaccgaccgcgaggtccgggaaatcgaggagatgcccctgcgtcccttgcccgacatcctggatgtccaggcggtctataaaaaccacctgtatccgaagaaggactgacggggggattcgaggagaacgcgatggacgacgtcaagcccgccggcaaggaaacgatcgagggaatcgagatcgattacgatcatttcgatgtcgcctcgatcatggcccaggtcaagcgcgccgccgcccggcgccccgtcgagccgctcgaggcgatgccagaaccgccggcggcccctcccgccgctcccgagccgcccgccccggctccctccgtcccgccgccgtccaaacccggtttgaaagagatcgtgaagctgaagctctcccgggcgatccggccgttcgccccggtcatccgtctcttggggctcccgctgcacgaggaaatcctggcttcttgggcggagatcggccggatcagccgccggcaggatgagctctccgatcgcctggatcgggcgctggaaaagatcgatcggcgcttcagcgattccgcggccgatttagaccgcctccgcgactggctcgacgtccgcttggtcgacctggaccggagcatggaatacatcaagcttcttcacaatttggatcacaacctcgtcgtcgagctgaccaagctccggatcgagttcgagaccctgaagagccgggcccggatcctggagaaggacctggaggcccagacccgtcgggaacgggtcctggagaagcggctgggttcatgaacgtcgccttcgtcgttcagcgctacggcctcgagatcaacggcggggccgaactccactgccgctgggtcgccgagcacatgtcccggcactggaacgtcgaggtcctgaccacccgggctcacgactacgtcacctgggccgaccactacccggagggggaggagacgatcaacgggatccgggtccggcgcttttccgtgccccggccgcgcgatcccgagcggttcgggcggctgcagagcttcatcctggaagaggagcacaccgagcgggacgagctggcctggctcgaggaggaggggccgacgtcccccgatctcctggatttcatccgccggcgcgaggccgactacgactatttcatcttcttcagctaccgctactggcattcctactggggcatccggtcggtcccccggaaggcgatcctggtgcccacggccgagcacgacgcggtcatcgacttgaagttcttcaaggatcttttccgcctgccccgggccttcatctataactcggaggaagagcgggagatgatccaggccgtctccgggaaccgttccgtccccggcctcgtcgtcggcgtcgggacggaagtcccggccggcgccgagccggagcgcttccggagaacccaagggatcgatcgaccgtacctcctttacctcgggcggatcgatcagaacaaaggctttccccagctgtttgattatttcctccagttcaagaaggacaccggctcggacgcgggccttgtcttgatcggcaactcgatcctgcccatcccggaccatccggacatcttcgccctcggctttcagcccgagcaggacaagttcgacgccctggccggggcggaagccctgatcatgccctcgttctttgaaagcctgtccatggtcaccctcgaggcctgggctctcaggcgcccggtcctggccaacgcccgctgcgaggtcctccagggccagtgccgccggtccgacggcggcctgttctacggaaattaccccgagtttcgggaggcgctgaagctgctcctggcctcggccggcctccgccggaccctgggggaaaacggccgccgctatttcgaaactcactacacgtgggacatcatcgaggagaaatacctcgaaaccgtccgccgcctcgaggaggagccctgatggacgtgcaccagttcgccacgtccctgacgtacggcgacgccatttccgacgagatgctggaaatccagtccgttctccgggagcacggcttcggctcggagatattcgtccggcagttcgatccgcgctcggccgcggccgtccgcgactaccgggaatatccccgctggagcaagccggagaacgtggtcatcttccatttctcgatcggctcccccgtcagcaagatgtttctccgcatccccgaccgcaagatgatgatctaccacaacatcaccccggccgggttctttctcgattcccaccgaatcctgacccgggaatgctacaagggccggctggaaatcaacatgttcgtcgacaaggtcgacctggccctgggcgactccgatttcaaccgccgggagctggcctccgtggggtacaagaagaccggcgtcctgccgatcctgatgaatttccggaaattcgacgggcccggcgatcccgtcgtccgggggctgtacgaaacgaagaagacgacgatcctctacgtcggccgggtgattccgaacaagaagttcgaggacgtggtcaaggccttcgccttttataaaaagcatttcaacccggaggcccggctgatcctggccggggactaccggggccaggaccgttacctggccggcctccaggacctgatcgccaagctccggatcgccgacgtccacttgaccggccacgtggaattccccgaattgctcgcttattaccggctggccgattattacctgagcatgagcgagcacgaaggcttcggcgtgcccctcctggaagcgttccacctcggcatcccggtcgtggctttcgccgccggggcggtcgaggagaccatgaacggcggcggcgtcgtcctccggcggaaggaccccctccggacggccgggctgatcgacgagatcgagcgccggccggagctccgccgcaaaatcgtcgagggccagaagaaagccctgaagccgtatctccgggagaacgtcagccgcgtcctcctggcccagatcgccgaggcggccgggagatgagagtcgaccagctcgtccccgccttccatcgcggcgacgcgatcggcgacgaagcctgggagctgcgccggtttttccgggcggagggctgcgaaagcgagatctactgcctgagccgcgaccgcggcctggaaaacgactcccggctcttcgaatcgttcccccgcccgtccgcctcggacgtgaccatcctccattacgccctgccctcgccgctttcggccgccctggccggcctgccctcgcgcaaggccctcatctaccataacatcaccccggcctcgtttttcgagggcgttaatccggaattcgcccgggtcgcccggctcgggcgggaggagctggcctcgctggccccggccgtggacgtgagcttggccgattccgagtacaaccggctggagctggaggccctgggcttccgcgacacccatgtcttcccgctgttcgtcgatttcgcgaggtacgaccgcccggaaaacgccctcctccgcgatctctaccgggacgaccggacgaacatcctttttgtcggccggatcgcccccaacaaaagaatcgaacacctcgtcaagacggtgttctactacaagaaatacatctcgccgctcgtccggctgatggtcgtcgggaagaccaacacgtttccggcctatttcgcggccgtctcccggatggccgacgagttctatctcaagcccgaggaagtcctgttcttcggccatatcccggacgacgagatgtacgccctctaccgggcgtccgacgtcttcctctccctgagcgagcacgaggggttctgccttccgctcgtcgagagcatgattttcgacctgccggtcgtggccctggcggctgcggccgtgccgtacaccctcggcggggcggggctgctgctccgggaattccggcccgaccggacggccgaaacggttcaccaagcggccaaggatccagccctccgggtccagctgatcgaaagcggacgccgggagctcgaccggctgaagcggttcccccgggaggagttcctccgcgaacggatcccggggctcgggagaaagaaatgaagatcgccttcgtcgtccagcgatacggcaaggaagtgatggggggctcggagcttcactgccggatggtggccgagcggctggcccggcggggccacgactgcacggtctacaccacggcggccaaggattatgtcacctggaaaaacgagtacccggaaggggaattcatcctcaacggcgtcgtcgtcaagcgataccgggtcgagcggccgcgggacatcgcctcgttcaacgcctactcggactggattttcgccaatccccataccgccgaggacgagctgcggtggatggagcggcaggggccgttcagcctcgatctcatcctcgccctcgagcgggaggagtccctccacgaccggttcatcttcttcacctacctctactacaacaccttctggggcctgcggatgctcaagggaaaatcgctcctggtcccgacggcccacgacgagccggccctccggctggacctgatgaaggaggttttctcccggccggcgggattcgtcttcaacaccgcggccgagcgggcgatgctggcctcccgcttctccttcgagggcaaggtccaggacatcgtcggcgtgggggtggacgtccccgacccggccggctaccgggaattcctccccaagtaccaagccctcgcgccgtatctcctctacgccggccggatcgagccgggcaagggctgcgccgagctgtttgaatatttccagcgggcgcggcggcgggttcccggcctgaacctcgtcctgatcggcaagcagctcatggagcttcctcccgatccgaggatccgctacctgggattcgtctcccccgaggaaaaaaacgcggccatggccggggccctggcgaccgtccatccctcgcatttcgaaagcctctgcatggctgttctcgagtccctggccgtccggacgccggtcctcgtccaggaaggatccgatcctctcaaacagcactgcctggacagcaacggcgggctgtttttctccgacgcgtccacgttcgcggccgccctgggcctgctggcggggggcggggagcgcctccgggccgctttgggtgaaaacggcctccggtacgttcaaaagcaatatacttgggcgtgtgtcatggaaaaatatgatatactcttgggggtgttgtagtccgaagagcgcccgaagaaatggcattcatcaactacacgacaaaccaactgacgatcaagatcgtttactacgggacgggtttgtcgggaaaaacgaccaatctccgctacatccaagccaatatcgatcggtcctcgcgaagcgagctgatctgcctggagaccgagaccgagcggactttcttttttgatctactgccggtccgggccgggtatatcgggaatttcaaggccactttccagctgatgaccgtgcccggacaggtttactacgaggcctcgcggaaaaacgtcctcgtggggacggacggcctggtcttcgtggccgactcccagatcccgctcctcgacgccaacatggaaagcctggaaagcctccgccggaatttcaaggagcagcacaccgagctggccgccttccccctggtcttccaatacaacaagcgcgacctctccgacctgatcccggtcgagacgctcaacaacctcctcaatcccaagggggcgccgttcatcgaggcggccgcgatcaccggactcggcgtcttcgagacgctcaaggaaatcgcccggatgaccgttccccgggtccgggagaagattttcgggttcgagggcgcggaatattcccggatcggccagaaagacgagctcgatctgatataaatctccctccggcgccgtctcttcccatggcgccatgctcatcaaaacgtccagctccgccctccaggggatcgaggcctatgtcgtcgaggtcgaggtcgacatcggccccggtttgcccgatttcatcatcgtcggcctgcccgacgcctccgtccgggaaagcaaggagcgggtcaagggcgccctccgcaactgcggctacgatttcaagccgcacaaggtcacgatcaaccttgccccggccgaccgccggaaggaggggccgtctttcgacctggccatcgccctggctcatctcgtctttttggacctcgtcccggccgagccgcttcgcgattactgtttcttgggcgagctcgccttggacgggcggatcaagccggtcaagggcgtgctgtcggccgccttgttggcccgggagagaaaattcaagggcctcgtcgttcccaaggacaacgagaaggaggccgcccttctcgaaggactcgacgtcttcggcgtgtccgacctgtctcaagtcgtttccttccttcatgatcccggccggttccggcccgcccgcttcgccctctccgagctgatcgagccgccgccgccgggaccggatttccgggaggtcaagggccagcaccatgtcaagcgggccctggaggtggccgcggccggcgggcacaacgtcctccttatcgggccgcccggctcgggcaagacgatgatcgcccgccgcctgccctctatcctcccggacatgacgtttgaggagatcatccaaaccacccaggtctacagcgcggccgggtatttaaaaggaaaaggggccgtcggcctcagacccttccgggccccgcaccacaccgtttccgacgccggactgatcggcggcgggctcgtgccccggccgggggaggtcagcctggcccacttgggcgtgctgtttctcgacgagctgcccgaattcaagcgcaaggtcctcgaggatctccgccagccgctggaggacgggacggtgaccgtcgtccggtccggccaccgggcggtcttcccggccgccttcatgttcgtcgcggcgatgaatccctgtgaggacgtattcaaggggttgagcggagggagcggggaatgcacggaatcccagcggtcgaaatattacgcgaagatctcggggccgctgctcgaccggatcgatatccaagtggaagtgccggccttgaaattcgccgatttcaagtcgaaagcggaggcggagtcctcaaccgcgatcaaggcccgggtgacggccgcccgggagcggcagagggcgcggttttcgggcaaggggatattcgccaatgtccagatgggggtccgggagattcgggagttctgccggatcgggccggaggcggaaaagctcctggaggaagcggtctcccggctcggcttctcggcccgggcttatgaccggtcgctcaaggtcgcccggacgatcgccgatctggcgggagccgaggagatctccgccgctcatctggccgaggctatccaataccgggcgatggaccggtattattgaagaagctgtcaataagcatgaaaaaatgtaccagtaatcagcacgaaaagtgtaccacccccatggtgcgatcaggctggcgtggcagacacggtttcgcctccttcttttggatatgacggctgtcggaagccgtgatctttgagccggtagctgtggcctttgatgttgatcactcgggagtgatggagaagacgatcgaggatggccgagaggaaggctttccccttgctctggggttccttgagcttgccgatcagcgtcgacatggtcgtgaagtaaaccttgaagccttgactacaggccttgatggccagagcgacggccaagtgggttttgccgatgccgggaggacccaggaaaacgacgttttcatgcttcggaaggaaggtcagatcgaaaagctccatgaccgcttttttatccagatgcgggtggaagctgaagtcatattcctcgatggtcttggcaaacggcaggccggcgatcttgagggcggtctggaggcgccgtttttcccgagccgccacttcttcctcaaggagatggtccaggaaagcgaagtaggaggcttgggtttccccagcccggccggcaacggcttcaagcacttccgccgcccgggccagtttcagccgctggaggttgtcctggagacgttcgcaggttaattgttccatgcgacgcctccctgggcatattgttcatattcggagagcgggcgatgatggacctcgggccagaggctgccgttgagaagaccccgggtcgccttgcccttggagcaaccgtattctcgtctcagctgctcccgatcccgccggagctcctcgtaaaaccgcggatctcccgggacgttccgcttcgtcacgggctcttcataagaagccagaagatcctgatcgaggaagatccggatctgttgatttttcactttcagcatgactttttgaccaacggcccggtgaggaacgacgtagcggttggcgttgaaggagatctgacggtcgcggtagactttccggaatgtctttagcaaggtgtcgtagtcggaagccggcagcggtccaagccgcggaatcttctctttccacagaacgtcgatcggctgatgatgagttccgtggattcggcggttggccgtcccgtcgagccagaccaggacgtcctcgttggtttttccaatcgattcgaagagatatccccgccagaaccgttcccgcagataatcaatcggtcgctcgactttgcccttcgtccatgggctataaaccggacagagcctcggctggaagccgtaatgccgggcaaaatagaggaactcgatgttaaaaacgggttttccgaacgcgtcccgcccgatgacgacgtttttcatattgtcgtagaggatctcggccggcacccccccagatatttgaacgcccggatgtgagcgtccaggaagctttccatcgtccttttgtcgacgaactcggtataatcagcccgactgaagccaagaacaagcttgaaggcaaagaccgtctcggatccctcgacttgaaaatcgccccaatcgcactgggcttggtgaccgggctcggtctcgaaccgggcgaaggccaggcggttcttttgcgctttgatcgggccgacgaagcgtctcaccgtatcatagcccccgcgatatccatgattcttcaacttttcccatatccaagtcgcctgataatcgtcttcctccaggaagtcgcggatcatctgttgatagggtgtcaggatcgaaatgttccgttcgattttccgataccggggaaaatccgtctcgaccaagtgcttcttaaccgtggcccgatgcaggcccagctccttggcgatcgcccggatgcttttcccgttcctttgcatcgccttaatgtccatgtatacctccttggtaatcatccggtatcacctcctctgttcgagaagacgataccaccatttcagatcccaggtggtacacttttcatgccgattacatgtttggagctacgattttgtccaagaccgaacgcgggatggccgacccatccggatgttgacgattttggatgaattcagccgggaatgtctggctttggatgtcgcccggcggttgaattcccaaaatgttctggaccggctatatgaactctttttaaccaaaggtgtgccggattacattcgatccgacaacgggccggaatttacggctaaaaaaattcgggaatggctcaatcgtcttggagtgaagacgatcttcatcgaaccgggtagcccatgggaaaacggctatgtggaatcgttcaatgggaagcttcgggatgaattgctcaacggggaactcttcgatactcttcaggaggcccggacggtgatcgaagcttggcgaaacgatttcaaccgccatcgcccgcacagttcgctgggatatcggccgccagctccggaagctttcgagcctcaattcctcactctacaggtggtacaatgatcgggggcaggtcaaaatgatgaattgggatatagccaaaaaagcatttgatttctttgttaattggattataacaaatcagagatttcaggtatccccatattcgttttcgatcggtttttatagtggggagcctctgttgaatttcgatcttatcgcgcgaatggtagattattcgaaaaattgtatccatcaaaaccaaaaggagtatccatttggttttcattatagtgtaacaacaaatggtcttttattgaacgaagaaatcattttgtttcttgtaaaaaataattttcgagttctaatcagtctcgatgacccaaaatcgatccatgaaaaaaacaaaggcaaagatacatttgataaattagagaaaataataaggaatattaaaaataaatatccagagtactattcttcaaatatttctttttctatcgtctatgcaaaagataccgatttacttcagatattagaatatttttcgaatgatctctttgaatcgtccttcaaaatggcattaggagaagtaataacatatttttcatatttgcattttccatcaatcggaataaacgaagaattggtatattctaaaataatggcttctgttaaatatggtcattcattaaataaaattgaaaaggcgattttatccgaatattatcgaatatctatcaacactctttctgatcgtcacggggcgaactatgcaagtttctgtacattgggcgctgaaaagcttcagtttagtgtcaatggagatattcacagctgtgagcgagtcggaaagagttttgcaattggcgatgtatatacgggtattgatattaataaaatatataagatcaaaaaagagggatttgaaaagacatcagaatgcggagattgtattgcacaatcgcaatgcaatgcgtgtgtcgggacgtccggctataatggggaaatattcttagaaaatatatgtcgacaattacgaacaaatattaataagcgatttccagagtatattgaatataaaataatggaggggcgatgcttagaaaatatggtggagtgattatcattagcctgcttttattatcggcctgttcaaaaataagaaaaattccggcacctcttgggtcagagaaacagttcatcgctctttcgtttgaaaaatcctttgaaaagacaatgaaatattgccgatggtggattccgattcccgaaggatatctcactcaacaggtttctgagaaggatgaaaaggaatacaatcttattattttcgatatggctggaaacgaaatccgtagaggcattgtaaaaaatgggcaaggttcgacagacattctcagcgttgatcctcaaagcgtgaggctatcccatgatggggaaaaagtgatgttcatcgataaccgtgatttttataaggagataaatcttttaagtctaaaggttgattcaaaatttaggctgaccaatcgaattcctatatatgaaggaaagtataagtttggatggtcgcgatttgaaacgaataatgggtggacaattgtgtctattgaatcgacaaactatatggctgatcaaacatattattttgcgattcataatgaagaatttacaaattatcggattatggcgtcgctcaaaaaaggagttcccgaatggctcgttcgcgataatcattctaaagttatcagggtggattattatgatcgcccgagatggatgcaatccttctcggttgattggaatcacgagacaatctatgctattccggatattgaacggcctgaaatcgatcgagtccgcttcaatggagagaaagacaaaatagtactcgacatcactggtcctctgaatattaataatgaagaattcaaacgttatttccaatggtattttgatgaattaccccaagtattaaaaagtcaacttacatatgattatttcaaaccggccaaagcccctcctttaatggaccttaaggtaatcggagattggcttttaatcattaccggaaatcgtgatggaaacaggaaacgaaatgaaactctcgtatatcgacttccctcgctcgattttgaaggcataatgtggctaccttttccgtcggcaccggaactcaaccttcgatggggagacggatactattatttgtacggtgaagttgatgatgaagatcaacaatcggttcagttatatcgatataaaatatcatgaaagccttcggatttcacccatttatccgaacttgcgttaatggaatgtccgggcttgtatacgatctgttaaatggaaacgtttatgaaatcgactcgaaagttattgaaatactgaacagtaatgtctatttagatgtcgatgccctccgcgatagagctaaaaaatattcggtcgatgatacaacgttgatgaaaataataaaggcgcatccgacattttaatgggtaacgggctgagataaaatggcttcaaggagattggagccatgcaagatacggagttttatcggtatgtattggggattgaagatccctggcgggtggatcggatttctttgaacgtgaaggaagaacgggtcgacgtctgggcggttcacggagaaggattgcgtttttcttgcccggaatgcgggatatcgcttccgattgtcaagggtcatctaattttaaccctttccggtcattgaaaatttaccccctggctcatgcttaagactcttcgacgtcaggctccttgatgagcccagccttgaccttctccctgaggcgataggagttgcctttaatgttgatcgtggctgagtggtgcaggatccgatccaggatagccgtggcgataacgggatccccgaagatttcgttccattgcgagaagcttcggttggacgtcaggatcagcgcccccttttcgtacctcctcgagataagttgaaaaaacagatgcgcgccgtggcgatcgatcgggatgtagccgatctcgtcgataatcaggagttttggctggcagtaaaacttcaaccgctcctcgatccggttttcggcataagccttggtcagagaagcgatcaagggcatggcctgggtgaagtaagtccggtagccttccgtgacggctttcacgcccagggccacggccagatgggtcttgcctacgccgggagggccgaggaggacgacgttttcgccgttagggacgaaccgacactcggccagctccttgattcgcttcttgtcgatcgaaggctgaaaggcgaagtcgaacgtttccagggtcttgacataggggaacttggccatcgaggttcggacggagatgttcttttcctgcttggaggcgacttcctgggacaggatctcgtccaggaagtcggtgtaggagacgttgttcttggcggcttcttcgagagccgcctcgagacgatcgtggattgcggtagagccggaggtggcgaaggttgtcctggatatgggagaggctcacaggagacctccttccaagagtcgctcatagacggccaagtccctgacctcgacgtcgtcctggggcgcctcggccggcttggccgccttgattaagcccacataatgcgacatctggaccgacgaacgatgggatccctcgatacgcgcatggcaggaaacgagttccccggcatggtagattttgatcatttcgccgtcggtcaggacttccacgcgcttgccggccaggcgataaggcacggagtagcggttggcctgaaaggccaccaggcagtctttgggaacgtagcgcagcgaccgctcctcgatcacgtaggcccgatgactggccaccggcaggagaaggtccttttcctcgaggaacatctccgccggctgccgatgggtcgtgccgtggacgcgctggtcggcaacgttgacgatccagtcggtgagctgggcgttgaggtcgtccaggcttgtaaactcctttccccggaggaagcgtttgacatgcttgacccccgattcgaccttgcccttggtctggggctgataaggacgatgcggcgccggccggaagccatagtatcggctgaagtcccaaaagatcggattccattcgaagcgcgagccctcaaaatcacgacccaacaccaccgacttgagattatcgtagacgatctcgcggggaacgccgcccaggaaggcgaagccttcttcatgggaacgcaggaaggccggcatcttctcgtcaacggtggccacggcatacatcctccggctgtagcccagcgttaggacgaacagatgcaccttgacgcgttttccgtcgatgatcgtccagcattggccccaatcggcctggccttggcgccccggcggcgtttcaaaccggatcgtcgcctcgatttccgcttcttgccgcaacggaccgacgaatcgtttgaccgtcgggtagctgccttgataaccacggagccggatttcttcgaagatcgcctgggcacagtagcccaccgccgccagccgccggagaatgtattcttgaaacgggcccaggagctcgctttcctgcttctttcggctatagcgctccggttgtttctgacggaggatcttccggaccgtttgaacgctgatcccgatggctctggcaatggatttcttcgtttcctttgagtctgaaccggctgtggatttcgtgccacagatccgctttgaccatgtcgtttcctcccggttggacggccgggaggaagcatatctgctgttgattcacctgttaacccctttcaagcaagggggtaatttttcaatgaccgccgggggttaatattgcatgaccgatgacagccggacgatcgcggatctggcgggggaggaggagatccggcccagccacatctccgaggcgatccagtaccggatgatggactggatgcggtaagattcatgtaatcaagattgatagagggtttcgagatcaccacccagaaaatgcgagcatatgttcactcgaccaatactgatcacgttttaattcttggtgtctttctttacttcttaaatgattatatttatcattagaccgtccatataaacgctggcctgtatcggcaaaatggggtggaaattatgattctaaaaatcaaagatataaaaaatatagatgcatttgatttatttcaatggagtgcccttgattttcagaaatataatcttatttacggctggaatggctctgggaagacaactttatctcggattttgagtttccttgaaaaaaaaattattgatttaccggaatacaattcattggatttcactatccattctgatgctggattgattaaaacccaggacttgaagacgcatggcttaaatgtaagggtgttcaacgaagagtttgttaaagaaaaccttcaattcagcgattcaaaagcaaaacggattataattatcggaaaagaaaacctagaactgcaaaaagagatagacgaaatcgaagacaaaaggaaaagatcgcaggaagaattgaataagcagacggcgaagctgccaagatctccaacgtacgaaaagattctaacgactgcagcaggggaagtacctaaacaattcgggaatactccgctcgcaaacgatgcttattacggaagaagttatagaaagaacaaagtagacgatctattagcccaaggcacgataggtgaaaataatcttgaaacactcatcattaccgatgagaatattttagctgaaaacaaagaaattattaaaaatgaaaaagcagctattccaaacgttatttctaaaatagaaggcttaaaatctttatataaagacactaatgctttattggggcttgatttagaaatcgaagatatcgaagaacttagcgaagacaaaggattaagagattgggtcgaagcgggatatcgtattcataaagagcgaagtttatcagtatgccaattctgtaataatccaattcccaagggcatgctggagaaactcggaagatacttcactaaggagctattggaattcagaaagaaaattgacgataatatcgaatgtctgaataaatatgaaaacgaaaatcgatctatcgatatcgattcccgcagctttttcccggatatttcaaaggggtttttaaaatcgagaagtgctttacatcagtgcgctgagtcaataaaaaaatctatttctgaaatcattgccgctcttaaaaagaaaaaggattccatacaaattaatgactcttcgagcataataataaactatcctgatgaagatgttaatatttttaacgaatgtgccgacgaaataaataagctaatagcaaatcataacaagcgagtcgataaaaatattgatgaaataatgattgcggctaaaaagatcgagctgcatacaattgcagtgaatttgaagcaaggcgattattttacaaaaaagaaagagtatttagagcttgaagcaaacataaaacaactaagggataattgtgacaaactatcgttggatgcaaataacaagcgatcggcaatgcggaacaccgctttagcggtagataagataaatacaattgcaaaagaatatttcggggaaggacaaatatatcttgaagttgcagaatcaacagatagcgcaaatgggtatgttttaaagagacggagaaaaaaggcaaaacatctcagcgaaggtgaaaaaagcattcttgccctgatttacttttttgtaaaactcgaagaagaaggatgtgataaaacggcctgtacaattgttatagatgatccaatcgacagccaggacgcgatgcatttattccaaacctttggcctatttaaggataagctgaaaaatgccaaacagttgatcgtatttacccataattatgagttttttaatttggttagggattggatgaataggcccaatgaaaagtctagtctctatctaatgagcattcaccgagaccaaaatatatacaaactaacggttgaagatttgccattgctgcttaaagaatataaaagcgaatatcaatacctttttagccgattatatctatataaaaacgatcatcagatcattgatgagccgcttgttgcaaatattgctaggaaaacattggaatactttgcaggattcaagtgggcgtgcagaaccacggaagattttactaatatcgtatggtcccattttataaaagacgataacccattcgaacgaagtgttggagaatttataattaaattcgttcatgaatattctcacggacaagatttttcgagacctataacagcagcgatgtttgaggcaaaaaaaattgctgaccaaacgatggaatttattaaaattgctgacaaagaacactataacaaactaaagtctctggcaaataaatcagtggaaagtcattgaaatctatccgaaaagttgctgacaaaatggacaagaaacggggtgcgggtcaaatctttggatagtatcttgtttctagcatttcgataatcttagttggggagagatgcttaagggcattcttgtttgttgtatcgtagtaaggtagttgtatttccgctataaactgggccatgtcaacatgagtttgcaatttggcagccatcataactctcttcagcatgcgatttgacttgtcagctcatggaacttttccaaggatccgatgatcttgtcctcccggatgtagcttcgctccccgctccagtcctccgcgtattcgaccaggtaacagatcgtcagccggacgtaagattcaacggacggaaaaacgccgacgacccggctgcgccggcggatctcccggtttagacgttcctggccgttggtcgacgagatccgtttcttatcgatctccgggaagtcgtaaaacgagagcgagtcgtccaacccttcttccagacaccggatcgcctcggggaagcgcttttcgtaatcgtcgatcagagccgctgccgcccgacaagcgctttttttatccggctccaaccagatctgcttcagatgagccgcaaaacgacctttttcccggtgggggacccgggccaggatgttccgcatgaagtggaccttgcagcgttgccaggaggccccgagccattcctttttcgtggcagcttggaggccggaatgagcatcggagaccaccagggccgtccgtttcattccccgtttcttgagattttggaaaaacgagcgccagctgtcctccgattcgtcgaacatcggctccacggccaggatttcacgatttcccgcctgattgacgccgcaggcgatcatcacggccacggaaacaacccggccctcgacgcggaccttctggtagagagcatcgatccagatgaccgcgtactcttgctccaaaggccgggagcgaaacgattccacctgggcgtccagttcccggttgaattcggagacttgggcggccgagatgttctcgatgcccatcgcttgggccagccgctcgattttccgggtcgagacgccattgatgaacgcttcctgaacaacggcgatcaaggcctgttcggatcgacgtctttccgagatgaaaaacgggatgtagccgccttttcgaaccttggggaccagaagatagaccgttcccaggcgggtatcgactctccggatccgagccccggaaaaataggtcgttcgtttttccgagtgcttccccttggccgcgccgaccttagcttccgcctcgattcgcatcatttcggtcatgacccactggagcatggccaggaagggatccggctcagtgatgaactgtaatagcgccttctgaaaaagtgccttataatggacttgggccatcgtagtaaaaatcctcctctcgagatttgccgatcaagagagtttacgatggcctccctcctattccaaattgcaaccatcactgtacactagcgacttcgaagggtcgcgcttcgagtggaacccggtcttctgggacttcagccggcattacggcttccgcccgacgccccatcggccagaccaagggcaaggtggaatcgggcgtcaagtacgtcaagcgcttcctcaggaggaaggagtttacgagcctcgacgatctcaactcgaagcttctcgagtggatcgtcaagatggccgacgagcgcatccacgggacgacccatcgcaagccctcggagatgttcctcgaggaaaaggacctgctgctcgccgtgaagggccggcgagcctatgtgatcgaggaacgctcgctcagatacgtgcccaaggactaccaaacgaaccgctactcggtcccttgccgcctggccggcaagcgcgtcgaagtcctgaccgatggcgagatgatcaagatctatcactcgggggagctcgtctcctgccatccgcggctcgagggcacccaccgctcgtccgtcgaccggacgcactactggggcctcatcaaggcggcgaagccggccgaggcacctcaggacgacgtcgaggtcagggacctggccgtctatgagcgactcctggaaggaggtctacggccttagccaagttcccctacgtcaagacgctcgagtcgttcgacttcgccttccagccttcgatcgacaagaaacggatcaaggaactcgccgagtgccggttcatccccaacggcgagaacgtcgtcttcctcggccctcccggcgtcgggaagacccatctcgcggtggccctgggcgtcaaggcggtcaccgaaggctaccgcacctacttcacccaggccatgccgctcatcgcctcgctcaccaaggcctactccgagaaccggatcgaggagcggctgaagttttactgccagccgaagctcctcatcgtcgacgagatcggctacatcccgatcgaccggcacggcgcgcatctgttcttccagcttgtctcgaggaggtacgaaaagggcgccctgatcctgacctcgaaccggagcttctcgcaatggaacgagatcttcggcgaccccgtgatcgccacggccatcctggacaggatcctgcaccactccaccaccatcaacatcaaaggcaactcctaccgtctgagggagaaggtcaaggccggaatcatccgagagcccgaggtcgaagagtcttaagcatgagccagggggtaaattttcaatgaccggaaagggttaaaattagatgacccttgacagggaatcgatgaggggttggaggccaagacgatcttcgaagagctccagcggagctatccgggccgctatgccgacgggcaactgcggacgctgcagcggcggatcaaacgttggcgggctctggaagggccggccaaggaaacgttctttccgcagatccatgtgccgggggacctggcgggaatggacttcacctgcatgaacagcctgggggtgacgatccaacggcagcggttcgatcatcttctccaccattttgtactgacgtacagcaactgggagagggcgacgatctgtttttcggaaagcttcgaaagtctgagcttggggcttcagaatgcgctctgggagttgggcggggtaccgaaaagaatccggacggatcagctgtcggcagcaatccaccaggaatgccggccggaagagttcaccgtgcggtatcgggcgctgttaggccattatggcctggagggagtcaaaatccaggtggcggcggccaacgaaaacggcgatgtcgagcaaggccactatcggttgaaacgattagtggaccaagcgctgcgtctgcggggaagccgggattttcagtcgcgggaggaatatgaggcgttcctccggacgatctttgcccgggccaatcggggccggcggcagcggttcgaagaggaacaggcggttcttcggcagcttcccgccctccgcctggacgattttcgcgtgtatcggctcacggtcagtccttttgcgacgatccgggtcaagaggaacacgtattcggttgccagccgcctgatcggggaggaagtgacggttcggctctatggggagcatctggatgtcctctacgggcagaagcttgtggagcggatcccgaggcttcgtggagaacatcgtcatcgcatcgattaccggcacatcatcgactggttggtaagaaaacccggggccttcgaacactaccgctaccgggaggatctgtatccaacgacgcgattccgaatggcctgggatctgctctcccaagaaaaaccgggtcgggcggccaaggagtacctggaaatcctgtatctggcggcgagggaatcggaaaccaaggtggacgacgcgcttcggaccatcatcgacggggaggcggaaatatcggccggagccgtcagaatgctgctccgatcggccgcaccggtttcgtcaccgatggccgtcgaagtcgccgaaatccctcttcaaagctatgatgagttgctggggggatggctggaggttggccatggccgcctcgagtgacgtcatggcccggctccagaagtgctttcgatatcttcaactgtccggaatccgggacggatatgaggagatcgccgcaaaagcgacgcaagaggggctgtcgctggatcgatatctcctggctcttctggaacgggagagggacgtccggtggaatcaccgggtggagcgattgatgagggagtcccgacttgctccggataaaaccctggagcggttcgagatgaaacgacttccggctaaagccgtccatcaagtcaaagcgctgctggacgggggcttccttcaacgacgggagaacatcctggccttcggaaatcccggttccggcaaaacccatctgatctgcgccctgggaaacgccctggtccgtcagggccgctgcgtttacttcacaatgtgcagccttctggtccaggagcttctcctggccaagcggaatcttcagctcccgcggatgctgaagaaactagctaaatacgaagctctgattatcgacgatatcggctatgtccatcagggacaggacgaaatggatgtcctcttcacgttgttggccgaacggtacgaacggggcagcgttctgatcacctcgaatcttccgttttccaagtgggaaacgatcttcaaggatccgatggtgacggcggcggccatcgatcgtctcgttcaccacagcgtgatcctcgaactgaatgtcggaagctatcggatgtcgaccgcgaagaaaaaagccgaagaggacgcgaaatgatcatcggtcttcccgagatcgcccctcctggagcctctggtgaagtcgcttccctccatcggttcgggaaaacatcttttttagctcaaaagcgcccgccccaatccgggaattttaattgtcgctggagaggaataatacttgattcatcacagtgacccgcgctcgctcattgtaccacctctaaagagactttttgaagagggggaaaaactcacaaccggcttctccttcagcagccgattgaatcgaatctcaaattagcacaatttgggttcgttcaggttgggatttgtggggagggatggtttggaggagaaaacactatcatcgccaccgcatttcgtctgcggcatccttatttataggatgacctgaattccgagagcaattcggccaggagcgccttgacggaaatgatccgatccgtacggtaggcattggcgccagcgaaagcgaatccacggtccagacggcctttcaaggcgttggtgagggccagggcgatgcagtagggactggactgtcgttcacaggtgacgatgcaatgaaggggacagcggaagggttttttctttccggcattgacatcgtcgatatattgattccggatggctcgtccgggcatgccgacgggacttttgatgataaccagatcttctttgcgtgatttcaggaacgcattcttgaattccggcgcggcatcgcattcgtccgtacagacgaaacgggtagccagctgaacgccggaagcgccctgatccataattctccggatgtcctcgcccgtgtagatgccgccggccgcgatcacagggatttctttttgatgcttttcctcgtaggggcgaacttccgccactacttccggaaccagccggtccagggaataattcgcgtcttcgatttgctccggcttgaaacccaaatggccgccagccagcggtccttcgacgacaaaagcgtccggaagataatcatattttcctagccatttccggatcaggagattggccgccttggccgaagaaacaatcgggatgagcttcgttcttcctttctcttttaggaattcagggagacgaagcggcagacccgcacccgaaaaaatgatatcggctttctcctcgacggccgtgcgcaccatatcgccgaagttggatagggcaaccatgatgttaacgcccacgatccctttggtcttttcccttgttttgcggatttcgcgcctgaggcctcgaatgcttgcctccaggaaattcgagaatccatctgattcgagcatgccgatgcctgccgtagcaatgacaccgacccccccctcctcggccaccgctgacgccaatcccgacatggaaattccaacacccatgccgccctggataatgggaagcttagcggtcaagtcacctattcttagttttttcagcccgttcagcatgctgtttcgagacctttccaattcagtcatagtaacacaaaactcgcaggatactctcctacagcgggaaaagcaaatttgatgctcttgaagacgtgaaacgcggatattcaaactctggctatcgaacgcatgctttcggtcttgcataaacaaaacacctggtgtcctaaattcttatcgattttctagagacaaggccccatggttgcgaataaaaattatcttccatattatccccctattgtgccctcaccctctccgcccttgtctccccggtgaccttgtccttggagatctaatatttgcatcaccagagttgttgcattggcagaatcctttaagagataaagacttcaagaggagatacgatttcatatgggcaaaagccattaaacgtgttttataaagtatacatcgattggtctaaacgaatggagctatcgaacacaatacgggcttttattcatgttcctcttgattcaatattaatgatgaagattaaagagtgctttccagaacaattcaagcaaaatgttgaggaacgatatttagaaaatagaaagaaagtgaaaaagcaatgtgaatccacatcaaataagatatccgattctgaattgaaaatgattattaatccaaatgatgtttccttaactaaaatcgttaataaagatatgtattatgcgtggcaaaaatgcttgagggccatatatccagaaaggcctgtccttttggatgtcctttggtccattaatcggagatgaaaacaaatttataatggattcttgaagtctttttgagggcttatgccgcccctgctcccaggttgctaatgtcgtctcatcgactgccagttgctctgccagcatcttctgcgtcagcccatgaacccgcctatattcgcgaatccgatctcccagattctcagcctttttctcgaacggatcacggcccaagaactcaataatcctcagaacctgggccaaagacggatcaacccggttcttttcccacaggtaaattgtgaggtccgaaacattaatcttacccgcaagttgacgcttggtgagcttcaattcaaccctccggaccttgatccaatcgccccaagtccggcagacatcggggattttctccccggaaaccggttttttggtctttaaggtaatatggcagaaaggcaacgcaagggtgcgaggatgtctttcgggggctggggggaggggagaaggactgcaccgaatcccagcggtcgaaatactacgcgaagatctcaggaccgctgctcgaccggatcgatatccaagtggaagtgccggccttgaaattcgccgatttcaagtcgaaagcggaggcggagtcctcaaccgcgatcaaggcccgggtgacggccgcccgggagcggcagagggcgcggttttcgggcaaggggatattcgccaatgtccagatgggggtccgggagattcgggagttctgccggatcgggccggaggctgaaaatctcctggaggaagcggtctcccggctcggcttctcggcccgggcttacgaccggccgctcaaggtcgcccggacgatcgccgatctggcgggagccgaggagatctccgccgctcatctggccgaggccattcaataccgggcgatggaccggtattattgaagaagctcggcattgtcggcgggtgaggacatcatcccttgcgggcttttaaaaatatctctctcattcatgctgaggattttcaacctcgatttaattaaagagcccgaagttaaagaatcctatgcgcaatccagagggtgctagtgtacagtgtgatggttgcttgaatgaaagcgccggaagaatcaagcctgattattgcaacgccttgtttcgaataagctgagtttcgtcccgccgctctttacccgtttcatcagacgcatgcatttgccgtcaaggcagcatgagcatcttccccgcggaggatctcatccgatttttgaagctcaaggcttcatgcgaaccatcgcgtttgctcccgggcggacgaaaccggctttctggcgattcttcctttattaggttctccctttttatgaatctaaaatgtggcatccgccaatcggctggcaacggccaccgcggccttagcgtgctccatctttactcgaagcctggaatagagggccgagacatatcgtcctccccatgcagggagactctgatcggcgccttctatgggatttaacgctaggttttatttacccaacccgctccaagtattttccggcataccagctggacgcttcagtgagaggagtatcgaaacgtttccccggggagacggaacgtggtttgttaaaaggaacggctgtggagcaacgaattgaaacgcccaggggcgttcttgcgcaaatgtcattgtcggattgaaaaaaatactcttgtattgccgaatgttttatggtaacagtgttacgaaatagtaaaatcgtggcacgcttaaaccctctcaagaaacgtgcggggggcacctgttgcaaaaggagatcgtaatatgaaaaaagccgttttcattcttttcctgatttgcgccttgtttgccgcgggaattcaagctcaggaaaaggaacgttccgcgcctgagaaggataagaaaagggaacaagaactcaaaagaatggagaagacggtcgaggttgtggtgacggcgacgaagacggagaccgattccctgaatgtccctgtcaatgttgaatcagtgaatacgcgtttgatcgagacggcgacatacagcaatccgaatgtcggggaaatcatccgacatcttcccggcgtctccgtggggcatggcaaccgtaatattcccccgtggatccacttgagaggaacgggatatttcatcggtcgaaccctttatatgaccgatgaacagcctttggcggagcccatggtcagcattgccgtgaatccattgaatttgtctgccgtcgaagtcctgttcggtccttcctcgtctctttacgggccgaatgccagcggaggagcggtcaacatgcgttccatcagcgcgcgagaaagatcgggcatcacagtcggcatgtcctatggtacgtttcactccgcccggccgaatatttcgatcggtaaagtcctgggaaattgggatttctatggatctttttccatggataaatcggacggatacaggaataccgatctggaaacgggaacctatttaatgagccaaggatatccttcgtatttaaactacgtcaatatcgacaaccagagctataccaacctctattattacggccggatcggctaccggaatccgaaaagcggaatccggttcgccatgggagcgcatattttcgacgaggatctttacggcggcaaaacaaattcccagagcggaggaacgcgaatcatcggaaccggatcgctattcgttcccgtgaacggaatcggagccttcactttgcgcgtgggttatcaatcccgtctctcggagggtcagagcacgaaaggagcggtcgcggtgcttaattccgtcatcaatggacgctatgtttttgctcccattgatgagaatcggagctatatatacgattcgacaatcacgcggaagacggaatctcaatacacgcgggcgccggtggatcttcaagccgattttctgtttctgaagaatcatacgcttacggcaggagtgtcctccatctatgacaagagcctgtcggatgtctggaatcccgccggaacgacatccctgtctcatacggaatatgacatcgtccaaacggcattctatgttcaagaccagttccggttcctccacgaacgggcgattcttctcttcggcctccgctgcgaccgttggaaatacgacaatatctatgacagcgggtcaacgaacagaacgccgcctgccgtcacgaaggatgcggtgacctaccgtggcgcttttaaatatcgtcttgccgacaattggggggtgcgtacatccttcggtacggcgttctggccgggagctgcctcctggttcttccagaatatttcgaccggaaatatttggcgggaggcgaatcccggacttaaacccgaaacgacggccatggccgacttcggcctcgattatatcgatcctttgaatcgcggaacgattgaactgaccttctattcgggaacgatcaaggatgccatgagctatgtctatgaccagcacccgacccttccgggagttcaaatcattcggacttctaattcggacagagttcgaatcagggggctccagctcggcgtcaattggaaattggcatcttcgctgtctgtgtttatcagcaccacgcttaatcactcggagatcactaaatcggttgtaaacaaagggcaccaattacgaaactctccggattactttgggagcatcggcttggcatatgacaaccgggaaaaggggatcggagccaagctttccggccgtttttcggatgaccggtattatgacgatgagaacactcagctcgactatttccatatgaagaaatattattgcctggatgcaaaggtgtggaagacgtttagcctgggcaaccataaaataacggcgtctttcggcgtcgacaatctgaccgacgcgaagtatgacggagaattcatttataacgcgcccggccggtttgtcgagttcaatctttcgtatcacttcgatttctgagacgaggcaaacagggcgtgaaagagcggattctttcgtctctaatcactctatggattgtgagcctcatttcgttcgccgcgatagagctggctccgggcgacccggcggagatgatcttggggagtgtttccaaagacgttccccaggaaacactgggcagactccattcggtctatcgcttcgaccagcccgcttggaaacggtattgcctgtgggcgggatcagtcgttcatggagacctgggcgtttcattgaaaacgaaccggccgattataagcgaatttcggactcggatccccgtctccatcgccatcgccgccggctcatgggttctggccgtttggatcggattgggactggggactctcagtgtcctcagggaaggaggccttgccgatcatgccgtcagattgctttcaacggcatttcaatccgtgccggttttcatttttggaattctcttgatctatgtgttttctttccgtttgagatggttccccctttatggaccggccggaggcggcggattcgttcttcccatcgttgccttgggaggaaccatgggtttctctttagcccgagtaattagaaatacgcttctggaagccattcatacggagcatttcatggcggttctcggaaagggattgacgttccgcggcgcggtcatccggcatggcctgcgcaatgccttgacgccggcggtgacctatcttgccgtgaggttagccgcccttctcggcggcgttgtccttattgaaaccctgttcgccctccctggaatggggagttatatcttcgaggctgttgttagccgcgactatccggtgattcaggcgtatatcctgtttctgggattaaccgtcgttatcgtcaatttcggcgccgattgcctggtaagaattatcgatcctcggggggctgcgtccggagtgaagtaggaatgaaggcgagaattatcgtcggagcggcgcttgtcgctgtctttctgatgatgggcgtttttggagtgtggttggctccctactctccccatgaaactcattatgatcagatactccgtgctccagatcggcatcatatcatgggcaccgatccccttggccgtgacattatgagccgcttgatttgcggtacgaggactactctgggcctggccttgatcatagccgttttcaatgcggtcattgcggtttcgttgggtgctttgtccggtttcctgggaggttggatagagatcgtgatcatgcgcctggcggatgccctgctggccttaccgggctttttactggcggtctgtttccttggtgtttttggaggaggtgctgttcgccttgccttattccttgtccttacgggttgggcgccgttgacgagagtcgtgagaaatgaaatatcgatcgtgaaaaatcaagattatataacggcaaacgcttccgtcggatattcaaagacgcggaacctttttttacatgccgtacccgccgttctgccgtcgttgctcatcctgtttgtgatttccctgatcggtgacgtgtttgtcattgtttccatgagtttcttggggctcggcctgtctcctcaaattccggaatggggcatggtgctacatgattccagggatttcatcctcatgagtccttggctcttcgtctttccttcggcattcatcggatttttcgctttgggtcttcacttgatggcggatggcttgagggaattcttcgacgcgaaaaaaatcctttacctcgtggagaaagcgagtcgtttctcatatggcgggacaagggcgggggaaatcgagccatgagaaaaatcggccgccgactgtgtcttccgatcgtcctgattttgggaatcgcctgttcgccatcgggacggcgcagggacatgctcatcatcggggtcgggggcagcttgaatctgggtaatcataacccggtcatgatccagcggaacgccaatgtctgggaaagcctgaccgaactggatgacttttttatcgcccggccttcccttgccgaatcctggcgggtttcaccggacggaaaaacttggacattccgcctccgcaaaggcgtcctctttcacgatggaaccgttttgacggctgccgcggctgtctggaacgttcaacgcatgaaaaatcatccggaattcgattactatggcacatttctccacctgatttccgcggatgccctggatgaaacggccttccggctggtcttttcccgcccggttgtcgatcttcccaaccggatcggtcactacttcgcgggaatcttcagtccgtccgcatttgatgagaccggaaagataattaaacccgtagccagcgggccctatatctttaaggaaagccggattggccggtacgaccgcgtgtcggctttcgacggatatcatgggagaaaaccctatttccacgcagtcgaattcaggatcattccggatccgattgtgcgcgttatgtcgctcctccgcggtgacatcgatatgatcgcgcaccacggcggcgtgccggcgtctctgaaggatctgttggaagggcggcctgacatcgtcgtgcgttcccaggacgtggcgattacgcattatcttctcttcaactgcgcccgagaaccattcagcgtcaaggcgttgaggaccgcgtttgccggacgaatcgacagggaggagcttgtcaatcttatcctccggggcggagggattccggcccacgattttttcatcggcagagcaatgcgttgggacaagcacaggtttccgatgaaagcggaaaatatgaatttttccaggaccagcctgaaaacattaaaaaaacatcgtttaaaattcctgctcaatcagggggatgcccagtcctggggatacaagcatgtcgccgattatctggccgatatcttttcccagatgggattgactattgatatcgatgtccgggagggcggcgcttggtctaaagccgttgaaaaaggagatttcgacctcaccctttatcccctctccatgcccctgggaacgccggagcttctaatcagaagacttgttttttcggaaggaatgaaggtgagggggatcggcaactctacccattatcggtccgttgagatcgataagctttttcttgaggccatgaatgcccccgacgcgaagatccaggaacggcaattcaatatgcttctcgacaagatccgtgacgagacgccgatcattccgctgtttcacgaaaaatattattatgccttcaggaaaggattgagcggagtcaagatggatccttttttaaagctcgatttatcttgtctctatgatcatggacgccgcccatgatcctggaaatcatcggtctttcggtcgtatttgaaaccaattgcggagatagggtcgccgtccgcgatgcgtctttgacgattgcgcccggggagcgcttggccctgatgggagaaagcggatgcgggaagacggtcctggctatggcggtattggggctccttccccaaaacgtccgggtgacggggtccatacgattcgagggatgcgaaattctgaacagccgggaggttcccaagcttcgcggacgccgcctcgccgtctgctggtctaacgccgaacggttcttcgatcctgtaatgacggtgggagtccagattgcggaagcctatcgcgttcatcatccgggagaccggtcccaagccaaagaaataacgctcgccctgttgaaaagactcggcttcaaagatccggatgatgcctatcgccggtatccgttccagttgagcggggggatgaatcagcgggccatgattgctatgagcctcattaataatccccatctacttatcgtggatgaaccgacccgagggctggatgatcgcaaccgttatctcgtgattgaggctctcctcgatatccgcgaggcttccctgttcgtgatcacccacgaccttgacctggtttcgaagattgccggacgctttctggtcatgaagcggggtgaaatcatcgatcgcggaacgtgttccgatcaacggataagatctgatcacccttatacccgccggcttgtggattgctccttttcgtcttgggaggaaaagggcgtcgggtgtctgagtcaaacagaccgggaatttaaatgagcgggagtcttccggtgctggaggcccggaatgtccgagttttttacaatcatggattcctgtccccccggcggaattacatcactcctcccgtttcttgttcaattctggcaaatgagatcgtcggcctttccggtcccagcggttgcgggaaaacgtctcttggcaaagctttgcttggtttgtcgcccgcatgggaaggggatatcttctggcgaggaaataacatccgccggatgtctctccgccgattgaggcctttctatggctggatagggcaagagccgaccatggcgttcaatccgcaacgaaaaatcctcgacgctttgttggagacgctgaaggtgaatggaaggtccgacggcggccgccagcggattttcaagatgtgcgatcagctcaaccttgaacgagagttaatgttcaggcatccttttgagatgagtcctggtcagattcagagatgttctctcatccgcgttttcatgctcgaaccccggtttgtgctcctggatgaaccgacctcatcgctcgatccagtcaaccaaactcaaatatatgaatatattttttcctggcggcgggtccacggcctggccatcctcttgatttcacattccaacgattttctctcgcgaatctgccaaaagattatttctctcgaggaggacgaatgaacgctatttccgatcgtataagaatagccgtcgcgaacaacctcagggcttaccgcgggatcgtcaatgcttgggagagatcggaagaaagacaccgggacgccgaattccgttttaggtgtagagcgctttttcttaaacatctcaaaggcccgcggattcttgatgtcggatgcggcctcggttttgattcactagcctttgcctcttccggactgaaagtcatcgccactgatatcgtcacggaatttcttgacagaatcaaaacaaagaacggtggaagatgtgttgctctcgcgacgatggacatgacgcttccttgctttgcccgggcgtcttttaacggaatattcgcctttgccagtttccttcatgttcccggcgaggcggcgctgagcacgttatccggatttgcaaaaatgcttgtcccggaggggattctctttctgcatcatgcggcttcaaggcagggcgtttcagaatacgtcattgacaatctcctgcacggcaaagaaagcgtttcagctttttgccactccgaggaggaaatgactttcctcctcgagtccgccggattccgggtggtggctttacatcacgatcggattgaaaggaagacgtccgccctctccaaacgatatggactcgagacctatcagatcattgccggaaaaaacgaatgaggaacttgatattcatgtatgaggagatctccgccgctcatctggccgaggccattcaataccgggcgatggaccggtattattgaagaatagctggacgtattatcaaacgccgccttgacaatatatgacttgacggatagagtgtcctttaatgtccaataaaacggctcagccgttttattcctgtagcaaaaagaaatgcagcttaccgtaaaagacgtcacgaagcttctaaatataagcgaaaaaactatttacaggtggctaaaacaaggcagcctgcccgcttaccaggtcggaaaccagtaccgtttcaacaaggctgagctcctcgagtgggcgacgtcccgccggttgggcgtttccgtggatttgttccgcgaaaacagcgaggaggccggccaaagcaaaggcttggcggaggctctgagcgcgggcggcattcattaccgcatcgaaggcggcgacaaggaagccgtcctcggaaccgtggtcgatctcatgaagctgccgcgggaagtggaccggaattttctcctgcaggtgctcttggcccgcgaggcgatcgcctccaccgccgtgggcgacggcatcgccattccgcacgtccgcaacccgatcgtccttcatgtcaccgaacccatggtttccctttgcttcctcgagaaggccatcgacttcggctcgctcgacggccggccggtcaactgccttttcaccctcgtcagccccacggtgaaatcgcatctccatctgctgtcccggatcgccttcgccctccgggacggcgattttagaagactcatcctgaaacaaggcggacgaaacgagattttcgccgaaatcgcccgcgtcgaggccgggctcgatcaatccaaaatttcctcgaaagcggatcggagcgcgtaggtggtcctcttcctgcttggtttggccgtcattttctcaggcgggctggcctcgctgctgtgggggaggaagccgggcgcggcggacgggctcggggccgccggggccgtcgccgggggagtcatcgccgccgtccccgccttccggattctgctcggcgcccccgccgcctcgctccagtggaattggaatatcccctacggctcgttttacatccagatcgattccttgtcggccttttttctgattcccatcatcgggctgtcggtgatcgccgccgtttacggatccgattacctccgggcttaccgggaccggaaaaacctcggggtcgcctggtttttctacaatcttcttttgatcggcatgatgctggtcgtcgtcgcccgcaacggcgtgctgtttctgatcgcctgggaaacgatgtcgctggcctcgtttttcctggtcaccttcgaatatgaaaagcccatggtccgccgcgccggctggatctacttgatcgcgatgcacatcggcaccgcctttctcatcgtcttcttcctcctgctcggccgccacgccggatcgctgaattttgacgcgatctccggggtcccgtcttcgctggcgagcgccttgttcctgctcgcgatcgtcggcttcggaaccaaggccggcttcatgcccctgcacgtgtggctgccgtacgctcacccggccgcccccagccatgtttccgcggtcatgagcggcgtcatgatcaaaaccggcatctacggactggtccggacgttgacgatcctggggccgccccaggaatggtggtgctggacattgatcgcgatcggggccgtttcgggcatcgccggggttctcttcgccttggcccagcacgatttgaagcggctcctggcctatcacagcgtggagaacatcggcatcatcaccctcgggctgggcctcgggctgctgggcgtcaacatgaacgcgccgacgctggctgttctcggcttcgccggcggattgtttcacgtcgtcaaccacgccgtgttcaaaggcctcctcttcctgggcgcgggttcggtcataaagagctgcgggaccgggcagatcgacgccctcggcggaatcatcaagcggatgccctggacggcgttcgccttcctgaccggctcgatcgcgatttccggcctgcctcccctgaacgggttcgccagcgaattcctgatttacctcggcgtgttccggggcgatatcgacgccggattcaaggcggccatcccggagctggcgatcatcggcggcctggccctgatcgggggcttggccttggcctgtttcacgaaggcgttcggaatcatctttctcggccatccccgaagcgaggcggccgaacgggcccgcgaggccggctgggggatgagggcggcgacgacggctctcgcggtcctgtgcgtgctgctcgggttgctctctccgctggtcatccaatctgtgaaaggaccgatttccctgatttcgggattcgatgacgagctggcccgcgtcgtcctgggctacgcgacccggattctgatcggctttgtctccgtttccgccgtcctgatcgccgtgacggcgttcttcgccgtcctccgccggcggctcctgcgcgggcgcagcgtgcggcgggcgccgacctgggattgcggctatgcccgccccacgcctaaaatgcagtacacggccagctcgttcgcccagcccctgaccgacctgttcaagattttcctgcgcagcaagaaggacgtttccctcccggaaggcctcttcccgggccggtcgcatttccacacggacaccaaggatgtcagcgaggagtatctccacgagccggctttcgaatggatcacgtcgttcctcggcaaattcaaatggcttcagcacggccggcttcaaatctacattttgtacatcgccctgaccctgctggcccttttgatatggaagctttgacgaaatgacgatcctattgaaattgctcaacaccgcggccgggctggccttcgccccgctgttgatcggcgtgatcaacaggaccaaggcctggtgcgcgggccggacaggcccgcccctgctccagccgtatcatgatctccggaagctgttccggaagggcgcggtgtacagcgagtcctcttcctggatcctccgggccggcccggtcgtgggattgtccgcggtcgtcacggccgcgacgatcattcccttcggcggcctgcccgttctcttgtcgttcaacggcgatctcatcctgttcgcctacctgttcggcctggcccgcttcttcacgatcttgatggccctcgacagcggctcgagcttcgaggggatgggcgccagccgggaggcggcgttctcggccctcgccgagcccgtcctgctcctgacgctggcggtcatcgccaaatataccggccaaatctctttttccaagatctttcccgcgatcgacttcggctactggccgaaagccgggcccgccttcgttctcatcggcttggccctcctgatcgttttcctggcggagaacgcccggatcccggtcgacgacccgaacacccacttggaattgacgatgatccacgaggcgatggtgctcgaccacagcgggcccgacctcggcatgatccactatgcggcggccgtgaaaatgtggctcctgggagcgctcctgacccaaatcatcgttcccgtgcgcggcggcggtcggctcgcggacgtcgccgcggccctgctggcgatgatgcttctggccgcggtcgtgggactcatcgaatcttccatggcccgcctgcggctccagcgcgtgccccagcttctggtcggcgcggcggctctttccatcctggcggcgatattggtttagggcggcatcatgacgaattccgtagacatcctcatgatcacgctggtgctggcgaacctcgccctgctcggcatcagccggttgaacacgtgcatccgcatcgtcgccgcccagggaatcgccctggggctgctgcctctcgccctgaacgggtggcggccgggatggcatctcatcctcttttccctgctgctgatcggcttgaaggggatcgtctttcccgcgatcctggtcaaaacgctgagggatctgaagacgagccgtgaaatcgagccgttcatcggctacggcgcctcgatcgccgcgggggcggtcgccctcgtcgtctgcatgtggctcggctcgcgcctgccccggccggtcgacgtctcctcgtccctgctcgttcccgtcgccctgttcaccatcatgtcgggctttctcctgatcatcagccggaaaaaggcgctgacccaggtgctcggctacctcgttctcgaaaacggcatcttcgccttcggcgtggccctggtggaggaacagccgttcctggtcgagatcggcattcttctggacgtgttcgcggccgtgttcatcatgggcatcgccatctttcatatcaatcgagaattcgaccacatcgatacggacaagctgtccaacttgaggacttgacatcatgatttggagtctgctgctgatcccggccgcggccgcggccgcctcgctcatcatccggggctccctggcgaggcgcgtcgtcctcgtcgccgcggcggccggccatacggcggtcaccctggcggcctggacggcccgcccgaaaccgctcctgaacggctggctccttctggatgatcccggccttttgttcctcacgatcaccagcctccttttcttggcctgctcgatctatgctttcggctacctggccggggatcccggcgggaaacagcaggatttcgtggaaggcctgctcttcacgaacgcgccccaggcgatcttctgcgcctgcctcctggccttcctcgcgaccatgaccctggtcaccctctgccagcatttcggcttgttgtgggtggccatggaagccacgacgctcgccagcgcgcccctgatctattatcaccgccaccgccgctcgctcgaggcgacctggaaatacctgctcatctgctcggtcggcatcgccctggccctgctcggcaactttttcctggtcgtcgccgcctcaaatcccgggacggccggcaaatccatcgtcttgtccgttctcatcgaaaacggccaggctttggacgttccctggctcaaggcggcctttctgtttttcctggtcgggtatggaacaaagctggggttggcgccgcttcacacctggctgcccgacgctcacagcgaatccccctcggtcgtttccgcgctgctttcgggggcgctcctgaactgcgcttttctcgggatcctgagaagctaccaggtctgcgcggccgcgggcgaggcggacttctgccggggattgttcgtgttgttcggcctggtttcgatcggctgggccgcggtcttcatgctgggccaggccgatttcaagagattgctggcgtattcgagcgtcgagcatgtcggcatcatggccctgggcgtcggcatcggcgccgacgccgtcttcggatccatgtttcatgccgtgaatcactcgctcaccaaggcgatgctgttcctggccgccggcaatatcctcgccgtctacaagaccaagtcggtcggaaaggtcagcggcgtcctgaccgtcatgcccgccaccggcatgttatggacggcgggcttcctggccgtcaccggcatccccccgttcggcatcttcctgagcaagttcacgatcgccaaggccatgatcgaccagggaaaaaccggcctcgccgccgccttcctggccttgctggccttgatcttcgcggccatgtcgtccgtcgttttaaacatggtccacggacggaaaagcgccgaggccggggccggcgccaagccggcgtcgctgctcgagctcctgcctcccgcggccctcggcgccgcgaccctgctgctcggcttgtatatcccgcccgcggtcagccgccttcttcacggcgtcgccgcggcgttcggaggacgctgatgaacaccgggccctccgtcgcgatctataacggccagtccgtcggaacgggggacatcccggttgccggggtggaggaattccggacgttcgtcatcgaggccgcggcggcgggcctgggcttggcctccctgttcgccgttccctcgcgtcccggccggttccgtctctatgcggtcttggcggccgacgagacgggccggctttatgtttcctcgaccgaggtcccggacgaatatccctcgatcactccggattgtccccaggctcatttgttcgaaagggaagtcgcggaacaatgggcgatcgttccgcacggccatccgtggttgaagccggtccgcttccatcgttcctccgtccccggccgggacgccttcggacggagcgaagggcggccgatccttccgtccgtcatggactttttccaagtcgaaggcgagcaaatccatgaggttgccgtgggccctgttcatgccggcatcatcgagccgggccattttcgtttccagtgccacggcgaagaggtgctgcatcttgaaatctccctcggttatcagcatcggggcatcgagcgggccctgatcggagggccgggcgtccggacgctccattttatagagaatgtcgccggcgacacggccgtcggccatgcgacggcttacggtcagatgttggagtccctgtccggcgtcccggcggccccccgggcccaatcgcttcggggaatcgccctcgagctggagcggctcgccaatcacaccggcgacctgggcgcgctcgccggggacgtcggttatttaccgacctcgtccttctgcggccggatccggggtgattttctcaacatgaccgcctccctctgcggcaatcgcttcggccggggggtggtcgccccgggcggcgtccatgacgacttgacggaggaagaccggggggcgctctcggaaaagctcgcccgggccgggaaggacgtgagcgtcgccgtcaagctgctttggagcacgccctcggtcctggcccgcttcgaggagacgggcgttctcaccgccgatcaatgccggaccctcggcctggcgggcgtgccggcccgggcctgcggcctggagaccgacatccggttcaatttcccttccggcatctatcgtttttcgcagatgcccgtttccacttggcccagcggagacgttttcgcccgggcttatgtgcgctggctcgaaatccaacggtcgatcgcctttatcctcgaacagctccggacatgcccgccggggccggtccgggtcgaagtgaaggcgccggcggccgaccgcttctgcgtcagcctcgtcgagggctggcggggccggatctgccatgtcgggatcacggattccggcgggcgcttcagccgctacaaaatcgtcgacccgtcgtttctcaactggaccggattggccctggccatgagaaaccagcccgtctccgattttccgctctgtaacaagagcttcaatttatcctattgcggccatgacctgtaacctcaatcgaaggaagatcaagcagtgaaagcccttctcgccaggcttcagcaaaaacaccgaacgatctctttcccgaaaggggagccccggctgccggatcggtaccgcggccttccgattttgaacgaggccggctgcgagaccggctgccgggcgtgcctcgaggagtgtccgacgggcgccctggcgaaaacggacggccggctgagcctcgacctcgggcgatgcctgttctgttcccgctgcgagcgggcctgcccggcgggggccgtccggttcggccgggattaccggcaggccgtgcggtcgaggaacgacctggtcgtcggcggaccggagatcaggcgggccgcggccctggaaaagaaactcaagatcctcctgggccgttccttgaagctgcggcaggtttcagccggcgggtgcaacgcctgcgaggccgacaccaacgtgctgaccaccatcgtttatgacatcggccggttcgggattcaattcgaggcgtcgccgcgccatgccgacggcctgctcgtcaccgggccggtgacggaaaacatgcggtcggccttggaaaagacatacgcggccgtgccggatccgaaaatcgtcatcgcctgcggcgcctgcgccgtttcgggcggggtgttcgcggatcttccggacgttcagaacggggtcgagaaaacgattccggtggacttgttcattcccggctgcccgccccatccgctgacgatcctcgacggcttgctcaggctggcgggacggatcaatggttgacagcccccgggcgctctactacccttgcggcaggggattttcggatcagccggattcctaaccgcggcggagcggaaaaggcttcggctgaagccggaatcaaatcccggggaggattcatggcctggaaaaatcgtcgccctcggggaggggccgcggccgtcgccgcggtcgccgtccttctcgttttttcctccgccgccccgcccgaagacaccgtccttttccggattgagcgggccgatttggaccgcctgtcggccgatgcggccgccggtctttttgtcgtccaggagcttcaaacctgcctcctggcctcaggccccgccgctctccccggggaactggccgaagccggcgttccggcggtcgtcctcgacgggaaggcggaagggaaaatctattttcttgtccgaacgccccggcccgaggagggggacattctcgtcgggctcgggacggcggttcctctcgaagagcgcgtctggctcttttccccggcctccggggatccccgcgagattatccctccggctttccggctgaaacggctcgatctcgaccggtccgtcgtctggtcgcggggggcgcccgccggggaaaccgcggccggagcggtcgaggcgatcgttccggatccccggatcttcgaatgggtcgcccgcgtttcgaagtccaagttgaccgagaccattcagagccttcagaatttccagacgcgctatgcctcgaccgccgcctgcgagaacgccgggacgtttctttataaccgcttcgtccagctcggcttggcctgcgagtacgagacgttcaccttttcctgggctcagcgccaaagccggaacatcatcgccaccctgcccggaaaggccgtcccgaacagggtcgtcatcgtctgcgcccactatgattccatcagcgacgagccggaaaccctcgcccccggggccgacgacaacgccagcggaacggcggccgtcctggaaatcgcccgggtgctggccgccgcgccgctcgactacaccgtcaagttcatctgcttttcggccgaggaatgggggctctacggcagctccttttatgcccaaagggccaagtcccgcggggagcggatcgtcggcgtcatcaacatggacatgatctcgtacacggactcggacgatcccctcctcgaggtgtacgtcaatccggccagccgctggctggccgatcaatacctcgaggcggccgagatttacgctccgctggcggcgtccaagatcaccgactcatcggcgacgtggagcgaccactcgcctttttgggaccagggattcgccgccctgtgcgccatcgaggagtcggccggccggaatccctactatcacgagacgaccgacaccctggacaaactgaacatgaattattgcacgtccgtgacccgggcttcgctggcctcggccgccgacctggcccggccgcatgtggtccggcccgctccgccgacggggcttcaagcccggagcgagatcatcagctcgctgttcgccgcggtcaaaagtgtttcgctcgcctgggacgccggcccggcgtccgtcgccggctacaacgtctaccggacgacgacgtccggcggggggcacgtgaagatcaattcccgattgttgagcgagccccgtttctccgaaacgatgctggacccggcgacgacctacttctacgaggtcacggccgtcgacggccaggggctggagagcgatggctccgacgaggttcgcgatgatcaaaacaatgacgcgcttccgaattaaagccggcttgcgggcggcgcccgttttttggtggctgattctcgggatggggccggccggccttcgggcttcgacggccgccggacggccacgcgcggccgtatcgctggaggcggggatgttccgggcgggccaggcggctttccggacgctgtatggaaacgggatctccgccttatcggctcatgtccgggtccggctcatcgacggcctctgggccgcggccgggtggcggacggtcaaagccgggggcgcgacggcgatcgccggaccggccttcaacgaggaagaatacgccttggagttcgagatgacctcgatccggctcggcttgcgctatgccttcgatctcggacggatcgccgttttcgccggagcggggggcagcgccgatcgctatgaggagcggtgggtcgacgtccccggcctcggcgggagcggaaaaaaggcgggttggtacgccgaggcggggggagaatacgccgtctttcgctttctctcgctttccctccgcggagaatacacgtccgttccgacggccaggggctcgtccctggagccggacgtcaacttggggggcttggaggccgccgccggactggttttccggttttgagaggagatcttcagccgccggttgacgcggccggggaaaaccgataaatgagggaagatttcaaaaagcctttgtctttaatacgggcgtaaagaggacaaagatgaaaataaggaaatgggcggttctctattcgctgattgtcggcgtatccatgatcggaatgtggacgatgttttttgcatccggcgggatcccggagctcaagaccaagcccgttgaaatcaaccttcatctcgccgccgagttatcgacggccgttctgctcctcatcgggggctgggggctgatcaagaggcggccctggggaactcaagcgcattccctctccatggggatgctgctctatacgttgatcgcgagtccaggctattatcttcaaaagggagagcttcccttcgttttcataggcctgtccttctttaagaaagaagattttttaagcgagcctcgccgccgggattaagcccgaccccggccgggatcgtttccttattaggccgaacaccgccggcggggaaactcgctcgagaggttttccggggcggctcgccgggaggctcgttttcatcgtcacccgcgttctccgcgtccttgacatcgattccggcccgatttattctttgcggcgaaaggaagaatggctttaagaaaaccgcggccgggctgacgaggctccgccgctttcaggccgggcctctccgggattgtttcctcggggaaaagccggcataccccttcgggggcgatgaaagacaaggccgaaggaggatcggcggggccgctttccgcgcccgcaggagacgggagagaccatgaagcgtttcaagaccgcgcgccgccccgctgtccgccggttgagcccggcgcgcctattcattctcagcttcctgctggtcatcctgatcggcgccctgctcctgctccttcccgcggcgtccgtccgcgagcctctttccttaatggacgccctgttcacctcggcttcggcggtttgcgtcaccggcctcaccgtcgtcgacatcggccgggatctgtccctgttcggtcaagtcgtcacgctcctgctcttccaaatcggcgggctggggatcatcaccttctcgctggtcctgttcgggctgatgggccgcagcctctcgttccgcggccgcgagctgctgcaaagcacgtttctccacacgccgcggcgtgattttttccgcatcctgcgcttcgtcgtgtcgggaaccttcgtcatcgagggggcggggacgctggtccttttcctgcggttcctgtccgattttccgccgggccgggcgctgtaccaggcggtctaccacgccgtgtcggccttcaacaactgcggctactccctgttcgccgacaacctggcccgctaccgcgacgacccggtggtcaacctggcgatcgtctccctgatcgtcctgggcggcctcggcttcatcgtcatgtatgaggtcatcgaccgctggcgcggacggcagaagcgcctctcgctgcacgccagggtggtgttgctgaccaccggggcgttgatcacgggcggcgcgcttctgttctatctcttcgaggccggcaatgtcctggttggagtccgcggacccggccgcgtgctggcttcgttgttccagtcggtgacgccccgcacctgcgggttcaataccgtcgacatcgccgccttggccaatcccaccatcctgctgatgatgatcctgatgttcatcggcgcctcgccgggatcgaccggcggcgggatcaagacatccagcttcgccctgctggggctgatgatcatcaaccgcatccgcggccgcgacggcgtgaccatcttccggcgcaccgttccccaagagatcctcgggcggacaatcgccatcgtactggcctcggccgtatcggttctggtcatcgcctcggtcctgctgctggccgccgggcccggcgccggcccggacagccgccacttgttcgtcgaatacatgtttgaaacgctgtcggccttcggaaccgtcggattgtcgatgaacgtcaccgccgccctgaacgaaatccagaagctggccatcgtgctcatgatgttcatgggccgcgtcggaccgctcaccctggccttcgcctggtcgacgttccggcggggactggtctatgccgaggaaggcgtaatggtcggataggaggagccatgaagcgctgcgtcgtcatcggcctggggattttcggccaaaacatcgtccgcgagatttcggacaaaggattcgaggtgatcgccgtggacaagaacaaggaggcggtgcagcgggtgcgcgacctggccgggaaagccatcgtcgccgacggaaccgacaaggacctcatggaccagatcggcatccatgaggacgacacggtcatcatctctttcggcgacgacctggccgcggcgaccctgatcaccttgtacctcaagcagctgaaggtcaagtcgatcatcgtcaaggctcccaacgaggagcaccagatcatcctggagaaagtcggggccacggaagtcatccttcccgagaaagagatcgcccacaaagtggcccgcagcctgatctcgcccaacgtcttcgactatttgccgctctccgaggactgcatgatcttcgagatggccccccccgagagctttctggggaagaccatcgccgagctgcagcttcgctcgctctataacgtcatggtcatcgccgtcaaggacgtgctgaccgaccaggtcaccacccttccgccggcccacttcgtgatcaaggacggccaggtgctggtcctggtcggcaaggaggccgacatcgagaagctccgctgaggcggcggctggccttttcccccgctttgatgtatgtttgagcgataaaacgtcaaaatcccatgcgtccgaccgactatctcgattcacaagcgatcctgctcgatctgcccgcctccgacaaaggaagggctttctccctcatcgccgaccggctggccgaaagccgtttgatcaccgaccgcgtccggttcctggacgatgtgctcaagcgcgagcagcagggcggcacggctgtcggccggggattggccatcccccacgcccgcacgagggccctggagcggatcgtcatggccatggcccggctgcggccagcggtcgacttcggcgccgaagacggcgagccggtccgcctggtcttcctcctcggagccccggaggacaaggccggcgaatacctcaaggtcttggggaagctctccaggctgctgaaagaaaacggcctgcgcaaggagcttctgaaagccgccacgccggaggcggttttggagcttctggaagcggccgaatcccagttgtcctaagagcggatccggacagacaaggttttcccaaatcgtccgactctgataaaatcgctttcatcatgcgttgtcaggcggccggatgaaagcgctcgtcaccggggcgacgggattcatcggcgggcatcttgtcgaggcgctgatcgcccgccgcgatgaagcgttcgtcctgatccgccccggcggccggggggcgggatcgctccctcccgcggccgctctcgtccggggcgattacggcgatccggactccctggcccgggccgtttccggcatggacgtggtttttcacgccggcggcctgatcacctccctggacgaggcggcttatgaagcggccaacgtccggccgacccgggcgcttctttccgcctgcgcttcctccgccccggctttaaagcggttcgtctatgtctcgagcatcagcgcgaccgggccttcgccggccggcggacgtctcgacgaatccgctcctctccggcccgtctccggttatggccgaagcaaggccgcggccgaggaagccgtccggtcgttttccggccgcgtcccctggacgatccttcggccgcccaacgtccttggccccaggcagaaggagctgttcaactccatttcgctgatcgggaagagaatcaagccgctgatgggggaccggcggccgcggacgagcatcgccgccgtttgggacgtcgtccgggcgctccttcttctggccgatcatccggcggctgtcggccggacttatttcgtcacgtccggccggccgtatgcctggcgggaaatcacggatgcggtcgcggccgagctgggcgtgcggcgcgtctatcttccggtgccttatccggcgcagaaggccgtcggggccgtctccgagctggctgcccggatccgcggccgagagcctcttctgacccgggaagcggtcgacgccgcctggaaatactcctggatttacgacgattcccgcatccgaaacgagctgggcttcgtcccggaatacgacctggccggagcgatccggcggaccgtggcctggtatgcggagcggggattggcgaggatccgatgaatggaacggacggccgcggccgccttcggggaaacgcgatcgcccggctccacggccggcggatccgcgttttcggcttcccccttcaaatcaccgacgccctcgtcctcggcggcctgctcgtccaggcggccctgttccttttatttttccgccgcctcgaccggccccttttcctggcggcgaaaaacgccggcctggccgccttgtatcttctttgcgttttcctgctttcgaaaatcaaggcgagagtccctttctttctccttcgcaccgcctcggtccagcttctgttcgcgtatctctacagcgccactcatccgcttcagttgatgctgatgccgtggcaggaccggcccgtcctggccgccgagcaggctttcttcgggatccagccgaccctttggatggagcggttcgtctcgcctccgctgaccgaatggctgatgttttcctacgtgatttacctggttatttaccccctggtagccgggctcgtctttttcaagcacggcgagggagccctggaggattaccttttcaccttgggaatcgtcaacctggcctgcgatctcggatttatcctctttcccgtggccagcccgctctggtacatgcccgaggcctacgccgtcccgcttcaaggcggcctgttcacgtttctcggcgatttcatccgggcccacgcccatcaggccggcggatcgatccccagtccgcattgcgccgtggccacggtcatgtggctgaccgcccgacgctacgtccgcccctggttccatatcctcggccccgtcatcctcagcctctacgtctcgaccgtttattgccgctaccattatgtcaccgactccgtcgctggcctcgccctcgggattattgctatactggcggcgccggggatggtccgggcctggaaccgaaaggccggccgtcgatcccaggaagccgcatgaacgccgttttcatcaccggggccaatggattcatcggttccaacctctgccggcattttctagcggccggctggaaggtctccggattggtccgcccggcctccgatctccatcttctcgacgggctcggcctcgacctggtgcggggcgacctttgcgattcgtcttccgtccggatcccggaggacgcggcccatgtcatccacgccgcctcggtcgtttcggacgtggccgatgcggacgcctgccgctcccatatcttcgacctgacgcgcaatctcctcgagctccttcgaaggcggacggttcctctccgccggctggtctatgtctcctcggccctgaccctcggctacggggcgacggacatctccgaggatcggccgggcgttcccgcggaatttcttccctacacccgcttcaagatcctctgcgagcagtatctcctcgacgaacacgcccggcgcgggcttcccgtcgtcattcttcgtccggccgatgtcgtcggccccggcgaccggacgacctcggcccgcttgttccgcgaggcggagcgggggctgccgctcatcgtcggccgcggccgccgtcgtttcggcctcacgttcgtcggcaatctttgccgggcggccgaggcggccctcgtccgcgacggggtctgcggccgggcttacgcggtgaccaacggcgtcctgccgacgtggggcgaatatctcggggccgtggccgccggattcggaaagaagcagagaatttatgtccctgcttgggcggctttcgccgcggcccgggcgatggaagccgttcataaaatccgtccgtcctacgacccgaagctgacgacttaccggatccggcgggtgacgaccgacacgacgtacgacatttcccggacgcgggacgagttgggctatgtccctgacgatgatttcagccgccaagtcgcggaaaccctggcctggtatcgggaggagagagcccatggccatatccgttgagacgagcgcctggccgggaattctcctggcctacgaggccgtggccctgacccttcttcagacggttttcagccggagacggtttttgaaaaacgccgccggcggcgacctgccggcggtccggagctactttctcgcggttttcaccttcggcctggccgtcccggtgaccgcggtgttcagcctggccgccgatcccgtcgcggtcttccgcgccttgggcttgagcggcgggaacgtccggctaggatggattctggccgccgccgggatcccgacggctctggccgccggagcggtcggagccggcgatccgcggctccgcgatttctatcccttcgccaaagacgccttggcgggccggcgggcgttcatcggctacgagctgggttacttccttttctattacaccgcctgggaattcatcttccgcggcgtcctgtttttccccgtcgcggcctcagccggcctgcttcccgccctggccgtgtcgacgatcgcctcgaccctctttcatatcggccatccggaaacggagctttacgccgccctcggggcggggttcgtcttcggcctggccgcctggggagccggatcttttctttacgtgatcccgatccacgcggccgtcgggatcgccaccgacgccttcatctaccggagagcggcccgggagcgctcctcccggtgagactcctcgtcaccggggcgaccggattcgtcggagcggtcctcgttccgcgcctgttggataaatacggtccggcggcggtctcggcctttgttcttcccggggaccggatcccggactcctggaccggacggggcgtccggatccacgagggggacatcgccgacgccgcggccgtccgggccgcggtcgcgggccggacgcaggtcgtccacctggccggggtgatttcctactggaagggcgaccgggaaaggctgttccgggtcaatcgcgacggggctcgcgtcgtcggcgaggcctgcctggagacgggcgtccaacgcctggttcacctgtcctcggtgggagcggtcggatttcacaagaacggccggccggccgacgaggagacgccgtacaattggccggattcgatcctttacatggcttccaagcacgccggggaggaggccgtcgagaagcttatccggacgagcggcctccgggcggtcatcctcaatcccgcctcgatcatgggaccgggcgaccatgatccaaggacgccgcacaaccgcctctacgggatgatctcgcgcagccggatcagcgcctcgttttcgggcggactggccgtcgtcgacgtccgggatctcgtcgatttgatactcgacgccctggaggggaagggccgggacggcgagcgctacctggccgtcggggctaatctctcctatgccgaggtcatccggctcatcggccgggcttgcggccggggaacccgcccctttcggcttcccgccgccgtgatcgcggccggcgggggcctggccgaggcggccggttcgctgtcgcggaaacggccgcttctgaccttcgcctacggccggctgagcggctggcgcgcttactatgacaatgccaagagcgtccgcgagttcggacacgcgtatcggcccgtcgcccaaaccgtcgccgacggctgggaatattaccggcggatccaccggaaagaaaatccatgaatcaagcgtcggctcatagccttccccgcgtcctgggccttggggacgtcatcgccctcgtcgtcggcggcatcatcggttcggggatctttctcgtccccaaggacatggccgcggccgtcggccaccccctcctgatcctggcggtctgggtcgccgggggcgtcctcagcatgttcggcgccctgtcgttcggcgagctgggcgcctcgatgccggaagccggcggcgtttatgtctacctccgcgaggcctacggctcggcggtcgccttcctcttcggctggaccctgtttttggtcatcgacacaggggcgatcgccaccttggccgtcgccttctcctcaaagtacctgcctcatttcttcgcgatctcgccggccgggcagaaggcggtcagcatcctcttcatcctctttttgacggtgatgaactatatcggcgtccgccggggggccgatttgcagaacgtcctgacgatcttcaagctcgttgctttaaccgccgtctgcggagccatcttcctgttcgccgagggggatacggctcatttcgtccgttccggcggagcggagccttccggcggccttctcggggcgttcggtgtcgccctggtggcctcgctctgggcctacaagggctgggaggcggcgacgtacagcgccggggagatgaggaatccccagagaacgcttccctggggcatcttgatcagctgcgggatttgcgtcgttttttacgtcgtcgcccagctggcctatctctacgtcttcccggcggccgaaatcgccctttccgaccggatcgcggccgaggcgatgaacgccgccgtcggcgggctcggcgcctcgatcatctcgttcatcatcttgttttccatcctcggggcggccaaccagaatttcgtctgctcgccgcgcgtctattatgccatggccaaggacggtctcctgttcccgcagctggccgccctccacccgcggttcctgaccccccacaactccatcctcgccctggcggcctggagcatcgtcttgagcctgagcgggacgttcgagcagctgttcacctacgtcgtcttcggccagtggctctttttcggcctgacggtggccgcggtcatcgttctccggcggaagcgtcccgacctgccgcgtccctaccggacctggggatacccggtcacgccggtcgtcttcatcctggcctccctttacatcgccgtcagcgccctgatcagccagcccggcaaagccctggccggcctgggaatcattctcctcggcctgccgttttatttcttcggccggaagcgggcgaaaaaacgagttgcctccccgtaaaaggggctatcccctcaatctccgggttccagcggttttcagcttcaaatccgccgtcaaggcgatgtcaccgggcggagctcgacgcgcggcgcctctccgcccagcggatcgatcggtcttccgctcgagggagtctcttcatcgaaaaccttgattttttttcttgaatggcttaatttccttttgtatcgacgggaaaggagagattgaccatgaaaaaaaatcccggcttcatgatcaccgtcgcggcggtcatggtattgatgatgatcggcgcaggatgtgcctcgaaaaagcacctcctcaagatcgagcagcagggagcggagatccagcagtcccaggagaggatcgccgagcttcaaagaaacaatgagatcctgaccgggactctgaacgagacgaaagcctctctagtaaaagccgaggaaagccggtcggaggcggacaagcagatcaccgccctgaattcagatgtttcggccttgaagtcgcggaacgaagacctgtcgaaatcgatggaagccctcaacaaggaaaacgagggcaaagtccgccgtttgaacggacagatttactccctgcggaagcagcagacggaaaaagatgaacagatcgcggcgaaggacggagatatcgcttccctcaagaatctccaagcgagcctcgaggggaccgtatccgcccgcgatcagcagatttcccggctgaacgaggaaaaagcatccgaggccgcggcctcggcgaaaacgatctccgggaaaaacctgctgatcacgatcttgggcgttcttctggccctggcgatcatcgtcgccgttttcgctcttttcaagcggaaaaagcggtcgtaatcgtccggagcgactcggcgaaggcccggcgcagccggttgaggcgtccgaggtcgggcgtcccgtccgggttgatataaagagcctggttggtttcctgaaggatgagcggggcccggcgtccgatccgattcggcgaatcgatcgagtgaagggcgccgatatgcccgtagacggagaggtagtcggacgcgttgatcgtgacgctcacaccgggaaggcgcttccgaagctcttcggcataggcttcgatcaggacgtcggggcagaaccgaagaggctcttccccgggcgagagctggatattcatcaagtcgatctggtttccggacaccccccgggccgagacggtcgcgtgcccttccaggacaaggcccgctccgctcgcgatcgcctcgccgattcgggcgtgaaacggatcgaggtaccgggcggccatcctccggcgcaggtcgagacccggctcccggccgggacggtagaccggccgtccccagacatccttcaaggggacggccgcctccaggttacggggatcgcggttggcctctaaaaccaggctgcagtaggggaagacgacccggccgtcggcgaggatatcgcggaaatcgtacagctcgccggtatgccaatcgatgttccgggtcagctcggaccagttttccgccaggtcttccggacggatttcctcgggcacgagcaggccggcgtggggaatgacggcgagaacgagccggccggcgccgttttgggccgcttccgcccgggcgttcatttgggagccgcctcgggaacgggcgataaaacgggcagaacgtccttagccggctcggcgggattcggatgtttccggaaaggacccaaggccttgcccggcagcttgaattcaaggtgtccgtcggggaatagcgtggccgtcccgccgatcggcacggccggctcccggggtcccacgaggtggccgaaatcctcggccacgagaatcggcagcggccgtccggcgttccggcgggttttgaggatctcgtttaaaaacgccgtcaggaactttaacgtgctgtcttggaaggtccgtccttccggagtattgacatccaggcaaagggatccgacgacgagggcccggacgcgggagaaaacgcggtgacgccggagggcggccaggaggcgatggagatcctcgacgtcgatgctcagatcctcaagaaacaggatatgctcgagccacggcaggcgcggcggtttttcccgatttaagaaattgacgaaggtcgtcaggttgccgccgatggggattccggccagcggcccgtccggaggaggagtcaaccagaaggatccgcggaaggacacccggcggccggaaagcagggataggatccggccggtatggcctcgccccagggaaagcgaaggaaagaggactcccggcacgccggcccgggcgaagatttcgcacaagaggaaggtgaagtccgagtatcccaaaaacagggggcgccgcttccggataaccttcaggtcgtggcggtcgattctcgggacgatatcctcggccccggtccctccggcgaccgagacgatcagatcgaattcccggacgactcttttgaattcttccgccctctccgaggcggcggccgtcacgtgatcgatccggctgtcggaggagtaaagataagggctgagatagatccccgaggtctcgaaggattcggtcagaatgcggacggagcgctccaagaccggctggtcggagggggccaggctcgtcgacggagcgatgaagcagaccttgattccaatcggggagatgacacccatggggattcgctccttggagcttagtaattcataataacatatttaggcatttctgacaagagtctcggccgcgcccggcgcccgaatttcaaatcggtcttattctccgcccttgaccggaccgaggggcgggcgatatgatgcagggcgggccgataatttccccaggcggggccggccttttttcgcgaatcggaggacggatgagagtgcgtcttcggagcaaggccgcggccggttttctcctgggaatggggcttttatcgatcggcctcccggccgccgcgccggcgggggaatccccggactcgctcgttcttcaggttcaatggtttccccaagctcaattcgccggttacctgatggccagggaaaaggggattttcgcggccgaggggctcaacgtcgagatccgtttttccgacgagcacaccagcccgctgaccgaagtgttcgaagggcgggccgacttctgcaccgcctggatctcccagacgctgaccctggaccggccggtggtcaacatctgccaggtcctccagaaatcctcgctcatgctcgtcgccaagacggaaagcgggatccttcagcccgaggacatgaacggccggaccgtggccatctggggcggagatttctcgatccagccgacggcgtttttccgcaaattcaacatcaagccggtcctcgtcccccaatcctacaacatcgacgctttcgcggtcggagcctgcgatgtgacctcggcgatgtattataatgaatacaataagatctatctttccgggatcgaccaggaggagctggtccccttctttttttccgattacgggctgaattttcccgaggacggcgtctactgcacccgcgagacgtatgaaacccggcccgacgtctgccggaaaatgaggcgggccgtcctgaagggctgggaatacgccgccggacaccaggaagagaccctggacgtcctgatggattactgcgcaagctaccatgtccggaccaaccgggcccaccagaaatggatgctgaccgtcgtcctgcaggccgtcgtctacggcgttggatccgatccggccggttggggcgtgctccgccgggacgatttccggcgcgtcgccgaggaattgaagcgccagggattcatccaggttgttcccgcctacgaggacttcgccagggaatgaccgtcatgcgccgccgctcgtccgccgtgaaacggccgatcgtccggcggctgatcatctggatcggctttccgctgctcctcgtgtacgcggccgtggccgtgaccaactatgtccagagctcgcgggccgccgtcgaacggatgaattcctatctcctcgagttgaccaaccatcacgcggccgtcctggattcccgtttcaaggccatctcccagacgccgctgatcatcgccgaaaatatcgaggcgatgcgcctcctcaacgagccccgcctctatgacctcatggagcgccgcctggcgatcgatcccggcattttcggcatgagcatctccttcgagccgtatgccctggatccgggccgggaacggtgctcaccgcgcgttttccgctcggccggcggcttggagcgggccgggacggccggcctcgaggcctatcatacggccgattggtacctgattcccgagctcctgaagagctcctactggacggagccctactacagcgccgaaggcgggaacgccctgatgtgcacgttttcccatccctttttccgggaaggagcgttcgccggcgtcgtgaccgccgacatctccctggccgagctcgataagacgatgcggggcatcgagatcatctccggatacacgttcctcgtcggccggagcggaacgttcatctcccatcccaatcccgatttcgtcatgcgcgaatccctgttcagcctggccgaaatgctggaccggccggatctccgggccatcgggaaaaacatgatccgcgggcggcagggcgttatcgccttcaaggacctcaacaccggcgaaaagagctggatggtctacacccccatccccacctgccggtggacattcgccgccgtgatccccgaggaccggatccttgctccggtcaaggcccagttgatccggcaggtcatcctcatggcgatggggctggccggcatcctggccgtcatcgtctgggccgcgtacggcatcaccaacccgctgcggaagctggcggctttcgccggccggatctcctccggcgacttaaccggccgaatcgagggcatccgggggaaggacgagatccaagaattggccggcgtcttgaaccagatggtcggcgacctcaaccaatacatcagggacttcgcggccgcgaccaaggccaaggagtcggtcgagagcgaattgcgcatcgcccgccaaatccaggaatccctcctgccccgggttttcccgccgttccccgaccggacggagttcgacctctacgccaagaatgcgccggccaaggacgtcgccggggacttctacgatttctttttcttggacgaggatcatttggccgtcctgatcgccgacgtctccggcaagggcgtcccggccgccctgttcatggccgtcaatcggacgctgatgaagaccgtctgccgcaagggagtcgggccggccgaatcgctccgggcggccaacgagattctcagccgggacaacgacgcttgcatgttcacgacgatgttcctggccgtattcaatgcccggaccggcgggctgacctacgccaacgccgggcataatccgccggtgatcgtctcgcgcgatcggacgctccggacccttgaatccatgggcgacgtcttcctgggcgtcgagacgggggtgtcctaccacgaaggccggactcgtctcgagcccggggacctcctgatgctctataccgacggagtgaccgaagcggccgcgccggacgggagcttctttggagaggagaggctcgccggtttcatggccgagcgccgggacgacgccctgtcggcgatctggggccggcttgcggccgacctggacgaatttcagaaaggcagccaattcgacgacatcaccgtcgttctgctcaggcggaacgaatagccgggccgccggtccggggagagaggggaaacaagatcatggccgcggaattcatcaaaacgcttctcagcagcttcgtggctttcatcgccctggtcaacccggttcagaagatcttcgtgatccattcgctccagcggcaattcgacggcaaaaccacccggttcatctcggttaagtcgaccctcaccgccctgatcatcctggtggctttcctcgcggccggccatgtcattttcaactatgttttccatatcgagttgtacgcgttccagatgacctgcggcatcgttctgttttacaacggccttaccggcttgcagcggggcgtcttcttcaaaatggacaagaacatctcggcgaaggatctgactgccgtgcccatcgccatcccgatgatcgccggacccgcgaccatcaccgccgcggtgacattcccggccgattatgggaatggagtgaccgtgatcgcgatcgtcgccgccttggccgtcaacctcgttttcatgctggcggcgaaaaaaatcggggatgttctcatcacgttcaacctgatgaatccgctgatccgcattttcggattgattgtcgcgacgatcggcctccagatggtcctgaacggaatccacggctttatcctcccgatgacggcgagggggtagcggagggcgttcttttcaacgcgcctcgggctgacgcgggccgcgttcttccagacggagacaggtctttaatccgatccctcagggggcgcggtttattcggacgcggaagagcgaaccaaggccgggagggctcgtccctccgcggggcgggtttttcaggagcggggggaatcgggggcgcctccttgcggagacgcccccttgggacaaaaagggattgggacctagggggaggagtcggcccggtcgccgcggacgatccggccgccggagacgacgaccttgcctttcttgaggacgaacttcaccggattgcgtccgacgtggtagaccaggtcggcgggcgtcgtcatgtcgcagaggaccaggtccaggaatttaccgggctcgaggcttccgcggttctcgtgctcccggatggcgtaagcgccgttggcggtcgcggcgttgagggcttcctcgatcgtcatccgcatctggaagacgccgagctggatgacccactgcatgttcgaggtcatcgagcttcccgggttgaaatccgaggccagggcgacgaccgccccggcgtcgatcaggcggcgggccggggcccgcttgtcctgcatcaggaagaacgggacgttgggcaggaggatcgcggcggtgacgcttccggccaaggcggcgatgccgctctcggtgatcgcgatcaggtgctcggccgagaccgcccctttccgggcggccagctccgttccgccgagggggacgaattcgtccgcgtggattttaagtccgaagccggccgacagggccgcctccgccagcctttttgtttcatccagagagaacacgccctcctcgcagaaaacatcgaagaatcgggccaagctttgatcgcggaccgcgggcatgaccgtgtgaataagaaggtcaagatagtcctcctttcgatcacggaattcgtccgggatttcatgggcgcccataaacgtcgggatgaggtcgacggggtggagggcgtcggcgtcgcgcacggcttcgagctgcttgatttcgtcttcccggttcagtccgtagccgcttttagcctcggccgtcgtcgttccgtggaggagcatttcgtccaagcgggctagacacaagtcgcggagctcctcccgcgtcgcggaccgggtcgcccggaccgtcgagcggatgcccatgccccgggcggcgagctgctggtaggtccacccctggagacggagcgagaattcatcgccccggctgccggcgaacggcaggtgggtatgggcgtcgacaaagccggggaagccgacgagcccccgggcgtcgatcaccgcggctcccgcctccggccggaccgtccggcggaactcgtcctccggtccgacgaacacgatccgtcctccgcgtccggccagccaggcgttttcgatcacgcctgcgtcctgaagggcttcccggcgcttggggatcgggccgcggcaggtggcgagctctcggcacccggcgacgacgcaatcggccttgatcatgaggatttccggaattggtggcccttattgcggatgaacgccggcgtgtccaggctttcgtaatcgatctcggcgaacgtggacgggtgcggcgtcttggccgccgcccgggccgcaggcgaaacggcgtcgaaagcccggccgcccttcggctcgaattcgtacgggggggtgttcatccggagggggaacggcggaggcgttttccggtagaagggcgcctgtgcggcggccgccgccgtttcgccggcggccgcggctgcctcctggggcaaaccgggttcgaagccggtggcgatgaccgtcaccttgaccatctccttcatggtctcgtcgatgatcgccccgaagatgatgttggcctcggggtgggccagggtgtggatgagctgggcggccttctgaacctcgtgcagggtgagatcctttccgccggtgatgttgatcaggatccccttggctccttggatcgtcgtgtcgatcaggagcggactgctgatggccttgttggccgcctcggccgcccggttctggccggccgacaagcccgtccccatgaaggccatgcccatgcctttcatgatcgtccggacatcggcgaagtcgaggttgatgatgcccggcgtcgtgatcaggtcggaaacgccttggacggcctgccggaggacgtcgtcggcgatgcggaaggcgtcctgcatcgacgtgtccaaggagacggtctggagaagccgctcgttaggaatggcgatgaccgtgtcgacggccgctttcagatcggccagcccctcggcggcttgcttggcccgaagccgcccctcgaactcaaagggcagggtgcagatggcgacgcagagaatgtcgagctcggcggccaagttggcgatgataggagtagcccccgtccccgttccgccgcccaagccggccgtgagaaagaccatgtccgatccctccagcagaccgaggagcttctcggtgtcctccatagccgccgccttgcccgtttccggccgtccgccggaacccaagcctttcgtcagctgcggcccgatctggatcttgatgggcgcccggctggaattgagggcttgaacgtcggtgttgacggcgatgaagtcgacgccgttgatcccggcctcgatcatccggttgagggcgttgccgccgcccccgccgattccgatgacccggatgttggcgctggaggattcctccaccagctgaaacttaagcttgctgtttttttccgcgttcatgtcgccctcctagtcttccttgaatagattcttgaatctggcccacaggcctcgttttcgatcccggcccaggccgcccgggccggtcatattgtatccgtggagaaggagccccacgggcgtggcgaagtccggcgtccgaacccggtccatgaggccggccacgccgcccggatcgccgcgccggaccggcaggtcgaagatttcctcggccacgacctccaggccgtcgagaagggccgtcccgcccgtcaggacgaggccggcgttgagcgatttttcgaatcccatgcgcttgatgtcgttgtccaccaggcggaagatctcctcggcccgcggctggatgatctcggccaggagctggcgggagagaatccggggcttgcggttctggccgacgaccgggacctcgatcgtctcctgctcctcgcccgggggcggaagggcgcagccgaattttttcttgatcttctcggcgtcggggatggccgcccggaggccgacggcgatatcgttggtgaagttgtctccgcccagggggataatcgaggtgtaccagaggcttccgcgctcgaagacggccacttcggtcgtccccgccccgatgtcgatgaggccgacgccgagctccttttcgtcgggggagaggacggccgcggcgtcggcgatttggttcaggacgaggctctggatgacgatatcggatcgctcgatgcaggtccggaggttctggagcagggtcaccgcgcccgtgacgatatggacgttgacctcgagcttgatgccgttcatgcccagcggatcgtgaatcccgtcctgctcatcgacgatgaattcctggggaatgacgtggatgatctcccggtcgggggggatgggaacggctttcgactgctcgagcacccggcggatgtcctcctgggtgatttcccggtttcgtccggagacggcgatgacgccccggctgttgaagctcttgatgtgggcgcccgaaacgccgatgaacgccgcgtggatctcctggccggccatcagctcggcgtccgtccgggctttcttgatcgcctcggacgtttcgtcgaggttgacgacgacgcccttgcgcaagccgcgcgattcggccgtgccgatgccgatgacctcgatcttgcgctcctcgttgatttctccgatcaggacggtgaccgtccgcgtcccgatgtcgatgccgacgatatatccgtttttggccatgattattcctcctcgacggcggcttttagataaatgcggtccgggaaccgaaggtcgacgtattccagcgggccgaaagcggcggtccaacggtcgcgggccccgcggtattcagcgattttccgggcgaatccctccgcgcccagtcggagcctgacgggatcgtcccggaatgtcgccacgacatcgtccgggcgggtcacgtcgagacggcggacgcgttcccggtccgccgcgtccaagtcgtcccagcaggcccaggccagggcgagcttggcgtcccggctcgcggcgaacatcccgtcgtcatggaagagggggaggcgctcctggtccccggggcgagcgggttcgatcaaggcgttgtcgcggtcgagaaggaagccgcggccggcgtccaggatggccgccggcctccggggggtgatatcgaccgccagcgacgacgggaacactttgcggacgtgcgcttccttgacccagggacaagcctccaggccggctttcacccgggacgcgtcaagcaagagaatattgccggcggccgcccgggaggcgatcggccggacgagctccctcacggccgggtcggggcagacgacttcggccgagcggacgtccagcgtctcccaagtgagcaggaagccgtgaagccgggcgactccgaaaaagagagcccccacggcggcgacggcggccaagacgtggatcaaacggagaggggacgtgcggacgggctttttgactcgagcgggctccgcgttccgctgaaactgcatcgtgacgacgaatccggcttcgcggctcatgttcctttctccaggagacggatcaaatcggggatgatccggttgatgttgcccgcgcccaggacgatgacaatgtcgccgggccggacgagctccatgagccgggccggaatatcgcggaagtcggggacgaaccggacatccttatggccgaaccggaccatctcctcgtagaggctccggcccgacacgccggggatcggatcctcgccggcggggtagatttcggtcaggacgagggcgtcggcttggttgaacgaggtggcgaactcgtcccggagatgagccagccgggaatagcgatggggctggaagacggccacgaggcgccgccgcggccagccgagcttggccccgttcagggtcgcccggatttccgtgggatggtggccgtaatcctcgatgaccatgatttcgcggatgtcggccttgagctcgaagcgccggccggctcccgtgtactcggccagggcgtcgaggatgaccgacggcgggatgtccaggtcgcggccgacggcgacggcggccagggcgttgaggatcatgtgcgggccgggaacggccagccggagcgtcccgatctcccgccccttgtggaggagggtcgagacgctggagaaagcctcgtagcgcatgtcccgggcgtaaaaatccgcttgggccgagaatccgtaggtgatgatccggcgctccaggcgggggatgatcgactggagattggcgtcgtccaggctgagaatgaccgggcagtagaaaggaaccttattggcgaaggtgacgaaatcctttttgatctcgtccacgcccttgtacttgtccaggtgttcggcgtcgatgttggtcaggacggcgatgaagggcgagagcatcaagaacgagcggtcgctttcgtcggcctcggccacgaagaagtcgccctctcccagccgggcgtgggctccgacggtgttcagccggccgccgacgacgatcgtcgggtcgaagccggccttgcccaggacggcggcgatcatcgacgtcgtcgacgtcttgccgtgagagccggccacggcgatgccgtagcgcatccgcatcaattcggccagcatctccgcccgggggatgaccgggattttcatccgccgggcttcccggacctcgatattgtcctcccggacggctgaggagatgaccacgacgtccgcccggtggacgttttcgctccgatgcccgatagaaacggtcgcgccgaggtcccgcaggcgccgggtgacgtcgctgtcgttgaggtcggagccggacacccggtagcccaggttgtggagaacctcggcgattccgttcatgcctgtgccgccgatgccgatcagatggatatgcttgagcttgcgatagacagttttcaccatgcgattctcctatttcctccggcccatcaggctcagggctaaatccgccgtctttccggccgcgtcctccacggccaagacggcgagggcgtcttccatcgccttcagccgctccggccgctcgatcaagccgccgagggtcgcggcgaagcgctggggcgaccactcggactcgaggatgacgtccgctccgcccgcttcggccaggatctcggcgttcttgcgttgatgatcgtcggccgccccggcgaagggaacaaggatggccgccttgcgggcggcgatgagctcggcgcaggtcgttgctccggcccgggcgacgacgagatcggcttctccgaaccgggccggcatgtcgtcgaagaacggctcgacgacggcgtcggggaagccgtcctgggcatagatcctccggacttcggccagatcggctttcccggtttggtggacgatccggaggcggtctttccaccggcggaggaagggaagagccgcggtcacggccgtgttgaggaaatgggagccctggcttcccccgaagaccaagagctcgatgcggccgccgtggattttacggggaagccgggaaaattccggccggacgggattgcccaggaaaacgcccttgcccttgaggtggacgagggacgcctggaaggcggccgcgactttttcggcccggccgagcaggcgccggttggtgaagcccggaacggcgttctgttccaggaggaggatcgggattttcatccgcgaggcggccagcacgaccgttcccgagctgtacgagccgacgccgacgacgaggtgcggacggatccggcggaggatgcggaaggaccgggccagggcgaaggggagaagggccaggcttttcaggctccgcagcccccgccctttcaggccctcgaccctcaaggggatgaacggcacgccgtggcgggccatcagggcccgctcctcggcccggtcgctgccgatgaaggtcacctcgatctccggatccttctcccggagcgtccggccgaggaccagagccgggaacaggtgtcctcccgtcccgccgccgcagatgacgacccgccgtgcggtcatacgatcctccggacctcgccccgccgctgggagatgtgcagcaggatgccgatggccagcattgtgcagaaaagcgacgaccgcccgaagctgaccaggggaaggggaacgcccttggccggggccaacccgagaacgaccgtgatgttgagcagggcctggaagccgaggaagagggtcagcccggcggccgcgacctggctgaagaaatccggcgcgttcatcgatattttgatcccccgccagaccaggaaggagtagacggaaaccaggatgagcgtgccgatcaggcccgtctcctcgccgatgatggcgaagatgaaatccgtgtgggaacaggggaggaagaacatcttctgaacgctctccccggggctcacgccgaacagccctcccgaggcgaccgcgagcttggattgggcgacctgaaaattgaggttttccacgctcgtttgcggggagaagaaggccatgagccggttgacgcggtagggcgccgaaaagagataaaaaagaatggggggagccaaggccgcgctcatcacggcgaaatgcttcggccggaccccgcccacgaagaggacgaccaggcagaggaccaggattagaacggccgtgccgaaatcgggctcccggatgatgaggaaggtgaagagaacgaccactcccatcggggccaggagggtccggaattcgccgattttttcccgcttgcggtcgacgtaccaagctagaaacaggaccagactgagtttggccagttccgacggctggaagcggactccgcccaggaggacccaccggttggtccgggcgaccggcgggaggagaagggccaggagaagcaggccgaacgtcaggccgagaaggccgaaaatgacgaccgggctcttgtagaccggccggcggatgttgagaaggatcgcgagcaggaccaggatgacggcgaatccgccgagctgctggaggaagaagtagagcttcttctggtaggcctgctcggcgtaaacccctgaggcgctcatgatcatgaccaacccgatgaccatgaggatgatcgtcgcgtacagcatcttcttgtccaaggagtggcggcggtaggtttccatcgccgttatcccttcctccgggccaggcggcggacttcccgcttgaacacccggccgcgctcctcgaaatcccgaaacatgtcccagctcgtgcaggccggggcgagcaggacgatgtcgccgggagcggccgcggcccgggccgcccggacgacttccgggtatgtctcggcctcgagcaggggaacggtcccggcgagggcttcccggattttttcccgggcggagccgacgaggaccaccgctttgacgccccgccggacggccttccggagcggccggaaatcggatcccttgtccttgccgccgaggatgagaacgaccggccgggtgaagccggccagggccttgagggtcgcgtccacggtcgtggccttggagtcgttgatgaaggaaacgccgccgacggtggcgaccggctcgagacggtgctcgaggccgcggaagccgcggacggaggccctgatccgggacggggcgatcccgagaaggcgggcggcggccgccgcggccaggacgttctcccggttgtggaggccggggagcttgatctcggacacgggaaggatccgccgctcttctccgccgtcgcggacgaccacccagccgtcgcggacgaacgcgccccggcggaccggccgcttgccgctgaaggcgaagacgtcggagaccgccgcttccttccaggcccaaacccgggcgtcctcccggttgaggacggttgcgtctccgggcttctggccgaggacgagcttggccttggccgcggcgtaatcatccatcgttccgtgccaatccagatgattgccggacagattcaaaaccagggccagccgcgcccggaaggcgtggacgtattccagctggaagctcgagatttcggtgacgtagagatgatcgtcacggctccggtcgacaaaggagatcaggggcgtgccgatgttgccggccaggaaggccgggcggccggcgtccttcaggatgcggtgaagaagggttgtcgtcgtcgattttccgttcgtcccggtgaggccgacgatcgagcctttcagaaagcgggacgccagctcgatctccgaccagacggggattccccggtcccgggcggccgcgatctcggggaggcggggcacgccggggctggggatgatcaaatcggcctcaagaaaggcggccggcgtgtggccgccggcttcgagcttcaccccgcgccggatccacgtctcggccttggaaccgagctccgcccggggcttgctctccgtgatggtcacccgggcgccgcggcgaagaaggaacgcggccgtcgcctcgcccgtccgggccaggccgaccaccagcacgttccgtccgtctaaattcatggtcatctcaatttcaatgtggccaagctgaagaaggcgaaaatgaggccgaggatccagaaccggacgacgaccttctcctccggccagcccaaaagctcgaagtgatggtgaaggggggccatcttgaagaggcgcttcccccgggtcgccttgaagtaggacacttgcagtaggaccgagagggcctcgaggatgaagacgccgcccacggcgaagatcaggaattcctgcttgatgaggatggcgacggcggccagcgtcgctcccagggaaagggcgcccacgtcgcccatgtacacctgggccggatggctgttgaaccagaggaagccgaggcaggccccgacgagcgcgccgccgaagaccgtgagctccgcggccagggggacgcgggcgatgtacaggtaattggaaaacacggcgtggccggcgatatacgtcagggcggtcagggccgccgccccgatcagggtcaggccgatggccaggccgtccagcccgtcggccaggttgacggcgttggtcgaggacacgacgatgaagatgatccagggggcatagagccagccgagatagggcgcccatctcttgagaatggggaagaaaagatggaggttgaaatccccgttggcgctcaggaacatgacgaacagggcgaaaacggccgccaggaggatctgaaacaggagcttgctccgagcgaagaggccgcgggactgttttttccggaccttcatgtagtcgtcgaggaatccgatcccgccgaaggcgatcatcgtccccatcgtcaacagcacatacgtgttggccagattgccccagagaagaacggggacgatcgtggccgtaatgatcaggaggccgcccatcgtcggcgtgccctgcttgctcaggtgggaggccgggccgtccgagcggacgaattggccgacctggaaacgccggagcccgcggatgaagacggggccaaggaacaagaccaaggccatcgccgtgattccggccagggcggtccggacggtgatgtagcggaacaggttgaaatccggaaccgacgcctggagggttttgaaaagggcgtacagcacgtcagttctccttcatgagggcggtcagccgctcgacgatccgttccatccggacgccccgggatcccttgaccaggaccaggtcgtcggccttgagccgggccgggagcttcgccgcggcttcctcgctcgaggcgaattccggggtccgggccgcgtccaggccctcggcccgggctccggccgcgatccgccgggccgcgggcccgacggccgcgacgatgtcccagcccaagcgcccggcggtccgcccggcgtcttcgtggtattgatccccttccgggccgagctcgagcatgtcgccgagaacagccacccaccggccggccggaaggttgatatagctgcggagggccatgtccagggcccgcggattggagttgtacgtgtcgtcgatgaccgtgattccccgggccaggcggatgatgttcccccgcttggccgtcggggcgaggacggccaaagccggcctcagggtctcccagccgaggccgaaggccgccgcgaccccgagggcggccaggaaattttccacctgccccccggtcaggaaggggagggtgacttcgcgggcggccccgtcgtaatgcaggcggaactggaggccgtcatatcccgcgtaggccatcccggaagcccggacttcggcgtcttggctgaagccgaaagtgatgacccgccccggggcccggtcggcgagggtcttgctccaggggtcgtcggcgttgaggacggccgtgccgtccggcttcaatccctcaaggatttccgccttcgcttcggccacggcctggagcgattcaaaaaaggccaggtggaccggggcgacgttcgtgacgacggccacgtccggcggggcgatcccggtcagccgccggatctccccggccgcgctcatgcccatctccaagacggcgacctcgtgctccgtctcgaggcggagcacagaaagggacaggccgagatggttgttgaggtttccctcggatttatggacccggaagatcgttcccagaagggcggcgatgaattccttggtcgttgttttgccgacgctgccggtgacgccgacgaccttggccggatggcggacgagaaccgaccgggccaggtcctggagagccgcggccgtgtccccggtcttgatgagaacgaacgccttgtcggcggccgggacgccgcgggagacgacggccccggcggctccgcgggcggccgcgtccggcacgaagtcatggccgtcccgcccggcgacgagggcgaagaacagcccgccccgctcgatcgtccgggaatcgaggccgaacgaagaaaaaacggctccccggtcgccctggaggaccgttcccccggcggccgcggcgatttcggaggcgcgcagaagggccatggttatttcttctccaaagccgccaggatttcccgggcgacaccggcgtcgctgaacggcctgacatttatcccggatgtctgggtcgtttcgtgtcccttgccggccaggacgacgaagtcgccttcgccggcttcggccagggcccgggtgatcgcctcgcggcggtcggggatgatggtgtatttcgcgccgccggcggccgtgaagcccgcctcgatctcggcgatgatcgccgccggatcctcactccggggattgtccgaggtgaggaaggtccaatcggcgtaccgggccgcgacggcccccatccgggggcgcttggcccggtcgcggtcgccgcccgccccgaacacgaggagaatccgggccggcttgagatcccggacggtctcgagcaggctctggagggaagcatcggtgtgggcatagtcgacgacgacgtggaaaccgagggaattttcgattttctcgaagcgtccgggaatctgggcgagtccggcgataccctccttgatcaagggcacgggtacgccgagggccatggagacggcgaacgcggccaggaggttggataaattgtgccgtccggccaggggggaaacgatgggaatccggccgccgggataggaaatgacggcctcgatccccgccccgctgaatttcggtcgttcggcccggaccagggcttccggctcgagaccgaaggtgacggtggtcatcggaagctcggcgatgaggcgccggctccaggaatcgtccaggttgatgaccgccgttctcttcttggcgttgaggaaaaaaagctttttcttggcctcgaaatagtcttccatcgtccggtgaaagtcgaggtgttctcccgagaggttggtgaacacggccacgtcgaatccgatcccggagacccggtgaagctcaagcgaatgggacgagacttccatgaggcagtgggtgacgccccggtcggccatttccttgagcatgcgctggaggtcgaccgattccggggtggtccgggaggcctggagctcgaagccggggccgcggtgggaaatcgtgccgatgactccgacggcgtatccggcctgcctgaggatggattcgaggatgtaggaaatcgtcgtcttgcccttggtcccggtgattccgacgatcttcatccgggcggccggccggccgtagaaattggccgcggccagggccagggcttcacgcggattgaaaacctggatccaggcgacgttccgtcctcccggccgggggcggtcggagagaacggcggccgccccccgcccgacggcctcgtcgacgaactcgaatccgtcgcggagagtgcctttccaggcggcgaaaagaaagccggggcggacgtcggccgaggcgtaggccaagccggagatctcgagcttcggatcgccttcgagcgacacggcggaaatcccttggaggagatcggtcagattcattcctcggcctcctggcggaaagcgggcggcgcggcggacgcggcggaggcgtgcaccgtcgcgggggccgtgtcgggaaagacatggagataacggaggacgggccgggcgatggcccggaaaacaggagcggccacctggccgccgtaataggcgttgttccggggctcaaagagaacgacggccatggagagggccggcttgttcgaggggacgaagccgatgaacgaggccgtgtggcggctgagcgaatatttgccctcgatcggatcgtagatttgggaagtcccggttttgccggcgaccgtgtagccggggacggccgcggcttttcccgttcccccaagcaccgccctctccaggatttcgatgagcttctcggccgtctggggggagatcacctcgatcggcggagcctcgtcggcctggggcggccggggccgcccgtccaccgccttgatgatccgcggggcgagccggacgccccggttggcgacgatgttgattgcctggagaagctggaggggcgtgacggaaacctcgtagccgacggagacggaatcgatggaccggcgggaccagcggtccggcggatggacgaggccggccgattcggtcggcagctcgatccccgtgcgctctccgaagccgaaatccttgatggtcctatacatcagctcggcgccgacgcggcggccgatctggatggttccgatgttggaagattcggcgatgatcccggagaaggaaaggatgccgaacggcttgtggtcgcggatggggccgccggccacgtcgatcgcgctcgcccggcagtcgaatgtctcgtaggtcgccaccttgcggttttccagggcggccgaggcggtgacgatcttgaaggtggagcccgggtcgatccgccggctgtaggcccagtccatgcgcgcggccggatcggtcttcccgtagagattcgggtcataggagggggcgttggccagggccaggatctcgcccgtcgccggatcggagacgatcacggcgccccaggcggctttattctcggccaccgctttttcgatctcgcgctgggcgatgtactggatcacggcgtcgatcgtcaggtcgatgtcccggccgctttcgggggcgacggtctgctcgctccggtacggccgcttgtacgtgtcgcggtagatgatccgctcgcccggcttgccgcggagcgtgtcgttgaagaggatttccactccggccaggccgtcgttgtcgatattcactccgcccaggacgtgggaggccagggcgccctgggggtaaacccgctgcggctcctcctgggtgaagacgccgggaagccgaagcgcgtcgacggcggccgcggtctcgagctcgattttgcgcttgatccagatgaagggctttctttgatcggcggccgcctcgatccccgcgacggctttctcgtcgaggtcgagacatgaggcgagtttccggatgacggtccgccgcgccgcccgcgtctccttggccggcggggcgtagaagacggaccggagggaaaccatctgggccaggatcatcccccggcggtcgcggatcatccctcgttcggggaatatcttcaccttggcttggttctggtaagcgatctgctccttggcccggccgtggaagaaaacctggagctggacgaggcggacgacgatgcccccggcccagaggatcatgaccgccaggacgacgcgggtccggatgcgggccgtccggcgggcgatctcctcgccgggaaggaaggccgcggctttcatcgaaaatcctcgtagatgatttgatcctcgcgggggtcggtcaagccgagcttctcgcgggccgtccgctccacccgctcgagcgaaagaagggcggccctgtcggcctggagccggaggacttccttttccagcgcctttttctcgttttccgcctcgttggcctcgtatcccaggcggaccgtctcggcgacctgccagaggtagaaggccaggatgaagaccacgaccagggccgtcccggcggtgaagacgatctggcggcgggtgaacttcttatgaaccatgagcctgtttccggacagcccggagcttggccgagcgggacctggagtttcgggagatttccgcctcgccggggacgacgggatgcttcgtcagaagctcgacttgggcgggccgccggcccgtttcctggtcgggccgggccgcccggaggaaggtgtgcttgacgatccggtcctcgagcgagtggaagcagatcacggccaggcgcccgtcttcgggaagacgggcgatgacgctttcgagaaattccccgaggccggccagctcttcgttgacctcgattcggagggcttggaagaccttggccgcgggatgggtcttccccttctggggaatccaccggcagacctcctcgacgatggtccgcagctggaccgtgctttcgatcttcgtcatccgccggcgggaggcgatcgtccgggccagcttggcggccggccggagctcgccgtaattgcggaagaggtcggccaggcgggcttcgggatacttgtcgatgaccctggccgcgtccaagtgctggcgccggtccatccgcatgtccagcgggccgtccaactggtggctgaagccgcgggccggatcgtccagctggaacgacgacatgcccaagtcgaggaaaacgccgcggacggacgcccagtcgatctccacctcgaggagccggcggaagtcggcgtggtagagcgcgatccggttccggtaggggctgaggcggcgctgggcttcgttcagggcggcctcgtcgcggtcgaagccgaccagccgggcgccgggattgcgcttcaggatctcgcgggagtggccggccagcccgagggttccgtcgatatagacgccggaccggcccgcgtccaggagggtcagggattcatcgagcaggaccgggatgtgatcacgcccggtcatggccctttcctgcccgtcatgatctcggcgatcttcttgaagtcgtcgcgggtcagcggcttcttctggagcttctcgtcgagccgccgggtgtcccagacctcgaggtggttgttgaggccgatgacgacaacctcggcgtcgaggccggccatggctcgaaggtcggggctgatcaaaacccggcccttggcgtccagttcgcactgcacgccgaaggtgttggcccgccgcatgtaatcctcaacgtcgggatccaggtagagattgccgctttccgtcgaaccggtcatggccagccaaacgggcagggggaagattttgatcgtggagctttccagcgaggtgacgaaaaagtccaggccgtagcgctcctcgagcgccgtccggaatttttccgggaccttgagccgcccgcttttgtcgagcttggcccggtagcttccgatcagtaagtttcccattttgtcccgttttgtcccattttcgagtcaaatatagaagaatcagatggatttgtcaagggaaatcaacttttttcgagagagttgaaagggggggtataatgcggctaagtaattaataataaagataatatattgattcgcgggataaaacgggaaaaacaagcattttttttggaattttccgggggattttaagcggaattcagggattttcaagcggggggcggcggcgccgttttgccgcgctttcagcgctcgcaaggcgccgctttcggtcgtatcgggcggtgcttcgcggccgaaaaataacgaagaggggactcgaacccctacgagcggtgtgggctgtaacctgtccgtttataacatgagcgcgcccaaaaaagagcagaacaaatggtctattagctcagtcggtacagattgatgtttcaatcgttccgtccgcaagggcgtgatttagacccccgacctgctgattacgaatcagcaggtctttgctcaatccattccgcccggcgcatgatgcgaagaaccgccggcctgaggaatttcagcctatcacgcgccggcagggtttcaatccacgcgccccgcgcgggacgcgaccccgcatcacaaggggattcgaagcttccatgaggtttcaatccacgcgccccgcgcgggacgcgacgaccgacggccgttcgtttttcgttcacagtcatgtttcaatccacgcgccccgcgcgggacgcgacccagcgattcgagataatttttcccacctaaattagtttcaatccacgcgccccgcgcgggacgcgacttggccccgaatgtcagggctcgtgcatttatctggtttcaatccacgcgccccgcgcgggacgcgacacacggcgacggcgatgatgttggggtcgatcggtttcaatccacgcgccccgcgcgggacgcgacccatcgctgaacgctctcctcaaatggcattgggcgtttcaatccacgcgccccgcgcgggacgcgacgcggcaagggtaacaaggaaattagcatccacaacgtttcaatccacgcgccccgcgcgggacgcgaccaggattgggggacggacgttcaggggatcatccagtttcaatccacgcgccccgcgcgggacgcgacttactaaggacatgcggagcggatagcaatgcagtttcaatccacgcgccccgcgcgggacgcgactcgtttccatagcaatgttttttgacaggttcgcggtttcaatccacgcgccccgcgcgggacgcgacattcgcccccaggatttctttccacagtccagagtttcaatccacgcgccccgcgcgggacgcgacgccctcgggtttgttgatggcgtcaccggtgacgtttcaatccacgcgccccgcgcgggacgcgacctttttctttcacggcaattccgaaaaggtggtgtttcaatccacgcgccccgcgcgggacgcgaccccgtcgtgtttttttcgttcccaaggattatcagtttcaatccacgcgccccgcgcgggacgcgacgagggccggcggcaaccccggccagggaataggaggtttcaatccacgcgccccgcgcgggacgcgacacggtgattaagggcgtccggggacagctccgagtttcaatccacgcgccccgcgcgggacgcgactggggctgatctatcaggattcgccggattggctagtttcaatccacgcgccccgcgcgggacgcgacacaaatgacattcacgacccaccccttatgattagtttcaatccacgcgccccgcgcgggacgcgacccgttgaggcaatgagcgctgaggcgatcggctgagtttcaatccacgcgccccgcgcgggacgcgactggctccgcccaacagatcagcggccgcaacattcgcgtttcaatccacgcgccccgcgcgggacgcgactcataattcatcaaaagcagagaagttatcttcaagtttcaatccacgcgccccgcgcgggacgcgaccagacggagacaacggcgtatctggacggcaacggtttcaatccacgcgccccgcgcgggacgcgaccgtgaggctgtggggcgtatggccccggggccgggtttcaatccacgcgccccgcgcgggacgcgacaggccctcgggtttgttgacggcgtcaccggtgacgtttcaatccacgcgccccgcgcgggacgcgacccgggtacaaactggcctcggttccgaagggcctgtttcaatccacgcgccccgcgcgggacgcgaccgaatcccatgactccgacaggcccaaggatgggtttcaatccacgcgccccgcgcgggacgcgactccgattcgggctgtgtggggacacgcacattggtttcaatccacgcgccccgcgcgggacgcgaccctggccgccgatgataaaatcaccgccaaccggtttcaatccacgcgccccgcgcgggacgcgacccatataaccgtcgtctgtttccggcggctccggtttcaatccacgcgccccgcgcgggacgcgacccgccgcgatcgcggccatcgccaagcccaacgggtttcaatccacgcgccccgcgcgggacgcgacatccgacgttgacccatagccgccgccgtcggatgtttcaatccacgcgccccgcgcgggacgcgacgtgtcccagccggggagcgtccgcgcccacgcctcgtttcaatccacgcgccccgcgcgggacgcgaccgggcaaagatctggaggctgtatgagcagcggctaagtttcaatccacgcgccccgcgcgggacgcgacaccttcaggagataggcgttcgcgtaggtattgctgtttcaatccacgcgccccgcgcgggacgcgacacgggacgcaatggcagggcgaacaggaccgcgccggtttcaatccacgcgccccgcgcgggacgcgacgacgcgatggggacggaacccgatgacctcgtcgtttcaatccacgcgccccgcgcgggacgcgacctcgctgttcggaccattcggccagggcgatatcctgtttcaatccacgcgccccgcgcgggacgcgacccgtccctcgataaaattatcaagcacgggctggtttcaatccacgcgccccgcgcgggacgcgacatcgagagcggcggcgcggcggttggacatgatcgtttcaatccacgcgccccgcgcgggacgcgacacaggttatccgggcgacggattggcagcgcgagtttcaatccacgcgccccgcgcgggacgcgacggggggtctcccgtattggcgggagtactgggccggtttcaatccacgcgccccgcgcgggacgcgacgccgataaaagcccggagggacgggcattgaccgtttcaatccacgcgccccgcgcgggacgcgacgaggtttccgccagcctcaatgccgcccccggcccgtttcaatccacgcgccccgcgcgggacgcgaccaaaaacgtcgccgccagtttcggtttccgattagtttcaatccacgcgccccgcgcgggacgcgactcggcttgaccaggacaacgccgagggctccatgtttcaatccacgcgccccgcgcgggacgcgacgcgttggcggaggcggaggggcggttgacctcggcgtttcaatccacgcgccccgcgcgggacgcgaccgaagaatcgcacgagctggcaattggtcagcttgtttcaatccacgcgccccgcgcgggacgcgaccggccgcgataggagccgattccgccgggccatcgagtttcaatccacgcgccccgcgcgggacgcgacgtccatccgattcgccggctcgatttggcatccggtttcaatccacgcgccccgcgcgggacgcgacatcaccgtctgtaattgttcgagcgcaccagtgagtttcaatccacgcgccccgcgcgggacgcgaccgggtttacgtcgagcctaatgccgagccagggtttcaatccacgcgccccgcgcgggacgcgaccgaagctctacctcctgactcagcagtatggactgtttcaatccacgcgccccgcgcgggacgcgacatcgtcatttcgcacccccgcaaaccaggaacagtttcaatccacgcgccccgcgcgggacgcgaccttccttgaccggatatgcttcccagaattcagcgtttcaatccacgcgccccgcgcgggacgcgacttgccgccatgcgtgcggagtatcgcacgcagttggtttcaatccacgcgccccgcgcgggacgcgacccaggggaccgttggccaggcgatacattcgttgtttcaatccacgcgccccgcgcgggacgcgacttgccgccatgcgtgcggagtatcgcacgcagttggtttcaatccacgcgccccgcgcgggacgcgaccggtgctgactactggtacacccccgccaaagtaatgtttcaatccacgcgccccgcgcgggacgcgacaacgccatcccattgtgagtcgccggccagggcgagtttcaatccacgcgccccgcgcgggacgcgacatggtttgcccgacgcattctccgggatctttgagtttcaatccacgcgccccgcgcgggacgcgactgcgtcgactatcgacgggcgctcctcccggctgagtttcaatccacgcgccccgcgcgggacgcgacaggattcaatgcacgatccccgcccgtatccaatcgtttcaatccacgcgccccgcgcgggacgcgactcggggagccgtgcacgtatccatgcggacaaagtttcaatccacgcgccccgcgcgggacgcgaccgaaaaggagctgatgcactttgccgattttgagtttcaatccacgcgccccgcgcgggacgcgacgagcgcgccggtgagaatccccgttgccgtctgtagtttcaatccacgcgccccgcgcgggacgcgacgaggcaatcacctatctgggggttgccgatgccgtgtttcaatccacgcgccccgcgcgggacgcgacactgaacaatgtaagtatattaaaaatattgcgttagagcagtatttgcgcgtatcgagtcaaaatataaagtatgttttgtcattttttaaaaaaataataacatcgtgatgaaaacaaacgagatagacctagcgcgaagcatatctgatgaaaatggacgatacggattcgcggagggtattctaaaccaaaagcgtatcattttttaaatccaggctaggttttgcaccgaagtgttcgatacgccgttgccaattgctcccaagaaaatagaagcgaaggctgtccgcatcaaaattgatgatatcaaggagacgaattttcatctccgcccattgggccggatcgacatcacattcaaaaaccgagtgctgaacgcgttggccgcgatcaacgcaagccttggcgacacgccttaaccttgatcgtccctctttattgacggtcgatacatcataacttaccagaaccatcattgcagtacttcccttctctatttccaaataaaaggcggatacccgtccaggtcatctcgcaaatgccgggaaagcaggagcgcttggacaaatggaatctgtcctatgagaatcgattcatttaaaaagcggtgttgtatcgactcttgcttacgcttttgccaagccgtgatgacagttttccgagtgtcttcgtccatttcgacggctcccgtttctgttttattaaaaccttccgtcgttatttgacggaggttgatcaatgataaagccaaacgatccgccaggaacggacggagttcctccatcaagtctaaggcaaggctgacgcgtcccggacgatcccgatgtaaaaaaccggcttgagggtctaatcccaccgcttccaatgctccggtgcaatcatgaaccaggagagtataagagaatgataataaagcgttcatgttgtccaggggaggacggcgattacgataatgaaaaaagaaattctctttttggtttgtaatgaggtcgtcgaaaacgctgaaataagtcctgctcgcgtcaccttcaaggccgcggagttgatctaaagtctccgctttgcgcaaaagagaggcttgttttgcgagaattgcgacggcttcggatattctgtttattggaatcgtatcagaatgatcgcgaagagcccgttgaagaatcgttcgcgagttgatcgttttgcctataactgccgatcgcgcaatatgaagacatgctgcgggattatccgctcgccggtattgttcacggcgcaagagaatattgcccgaaacctttcccaaaacacgcgccagaaaacggccgttggcggtaagaaaactcacggccacgtggttttctccgcagtgtccaaggaggaaaggactgcaaagcacgttaccaaaacagataatacctcccaggttgtggatcggaatgcgaaatctttcttcgccttcaaccgatgcgacgacgcattcgccatccttgttcaggtacgccccttgtgttgtcacaaagagtgtgttaagaagttttttcattcgttttccagctccaggtccagataacttttaacagcgtttcgtttttggggcaatcggggaaggcagtgctcgattaaggaacatgacatacattttgtctcgtacaatgcgggaggtgttcgtcggcttgtcaaaagggaacgaagttccataaccttcttttcaaacgtgttccttaacatggaatcaatgacgacgatttcgcgtttcctggtttgtccataaaacagagcaccctcggggatttcaatgctcaacatctcttccagacagacgacttgtgcgcataattgaatacgatcgcagtcgttggctttacagcgcccatgtttgaattcaaccggatacggtcgtcgagctccagactcatccaaatgaaactcgatgagatcagctttccctgttaaaccgaagcgccttgaactgataggaactccatatgcccgacgaatatcgcggcgattctcgagacccgccttatgtacttttttatgaaggtattcgccttcgacggtaaggcggttttcctcccagatttgttcaatatgaatgagtccgcattgtcttgggcagaaaagaaaatgttgtaatgcggagatcggaataaaattatcttcttggatcgcggagtctgtttccgtttggttatcctttctttcgagcttctgacgatcaggtctttccatgatcgtaacaaaatcagatcaaaccgcgaaaaccggtctgtaatatcatccggcgccaatccggccatcgggcatccaatggcttactaataaggctgtttttattgaatctctaattcatgccaattctaataactctatgccttgaggaagcttagcccgatcaacggtcacattataatccgtgaaggaacgaggcggcttttctttgtcgccggcgcgttcgactttgacaagttcaaatagcttgccggagggcgcattgcccagggcggttgcgtgtttaaaaacaataagcttctgggtagtcatcagtcctctggctgcgctgcgatcgtgctcgaacatgtttttcaacgcatcccagaataattccaagtcggtttgactgaatccggtttgggcggcgagatgggcggaaacgaatccatgtgacacgtacaatccgtaagggatcgtgttttttcgacccatcgtccggttgtctccgctttgtttttccgcttcttcctcagttgcgacggccatcctcgtgatggagtgttctaatgatacgaccggatcaatcgaccgtccgaaagtcatctggaccggtccgcggacttgaccggcgttggcacccgtagacatcacagcgccaaaagcacgaatatcatagtattgacgacacatctcggagcgggcacggtcgacttccttcccctggccgactccctcctcgtttctcttcttcccatccttctcgtcagcgggccgttttgttagatcaatccccaaattctcataagcggaatcaatcagtctattcaagaccgccttttctttcacgaaaatctcatgccccttcagcatcacgtaatttctgacttttcgtttcaagcatacgtccgttacgagtccgcatccggtttcggcgtcgagccgaggcagatttccggcgtcgggatctccgtttgggtttccgtcgcgtacgtcgaaaatcaatacaaactcatgccggttcttaatgggttcactcatgttcaatcctccttttccggattatgatttttcttcgaatagaaatcttgcatttggtggtaatagccgatggcgaaccggccttgatccgccatgcataggtgagcgggaaaatcgacgatttcggacacgatttcaccgagcagtttgtcaaaataaatccttcgcccgacattttcgagtttagagagatgatgattcttgagccgcatcaagttgccgaaaacagtaaccggcgtgctggacgcggcgccgtagaagcgatcacggatcgtggcgttgatgccgggaaccgcttcagattggattttctccagcgccgcgaacaatcgacccagccgataaccgatgtttggattggcggtgtcgagactcactttaagttcctccttgtgcgtaggattattaaatcgaagagcgcgattaagacatgccttgatgagggcggctcgagggtaagtcatttctcgttcaatccttgcgcggcggaccgcagcctgtagaagcgtttgaggatagggtagaccttccaagacggaacgcatcatgtcgccgccgaggtttggagctatgtttttcgcctctccaagtgcggccgtggatacaagcagccgaaacaaagataaagtatctttatcgcgcgggccatgaacgaccttcgtatcctcgaaatgacggcaaattttttccgccatgccggctatcgtgtcaacgatccaaaaacgtatcgagatacgagaagcattcggcgcaaggccaagcgtataaaaccgtgtgtttgaatcatcagaggaataagcccctgttcggacggccttgaacaatgcctctacggccctgacattgcgatcgggatcatcttttgggggttcgttgaagaagctcggcatgagttcttccatgggatcggctttttgcgaccagaagacggtcgatgcatcgccgacttggattctttgttttgatgttttatcgagcaaatgatttaacgcggtggtataggaaaaagcggccgttttccctacaggagcgtttgctccttgttttttattgaaagaacggaatgcgtccaaattaaatgatacgatattcgcaccgcttttttgagcgccccaaacgcccttgatcgcggcgtgcacttgttctgtttcgtcccgctctccagtcaccatgcaaatgctttctcgccgcgtggagagagttttcgtaattgcctctcgaatggccggctgttcaagaatgagcccgatttgtcccacaatccggaaggaaagataggcgccggtttttctcatctcctcaaggcggtcgccgaaagcttccaataacgtcgatttttcaggattggctagaaatttttggacggcaagcaacgcgggatcatggggaagtttcaagtcatcaaggcgttttctgaacgcaaggtgctgattagcaacgcgggcgggttttcctttgcatacaatcccgagcgcgtattcgggattatcccaaagtaaatttgcgcttatgtccactgttcgcttgacggattgaggcactaaaaatttttttgcctgtcgttccttgcccattccttcatacgtgtcggtaagattaacgggaattccatcagcgttaagaactaagacgtacggaatctctttcatctcaaaaccggcacggggaagatcaggtttccggtcataatattccttgagcgcttgaagaatcatccgcgcacctcgacttgatttcggtcaatgttgatgattcctttgacgatttttgcttgaaagaaaagcggtttgggatcatccgcattcgaaaaatccatatcgtaaagcatccagccgagatccttggtcaaatcaatcggaattgaaggttcttctagatgatcgacaagccgaaacgatgccgagaactcgcggcaacccaaataaggttgattgaaacactgtccttttttcgcccgacgctcaaacattgccgcatattttgccggtgtttcattccccctgtcatcggagacatccgtgctttcgctaagataggaaggaacgggatttcgaggggattcgcgtttctctgtcggcaagaaatcgaactccgcatgtagcctgtatttcacgtcgcgcaagaacaatccagcccgttgctgtcgatcatcctcgatgaaaacgcctccgctccgcggcgacgcgactttccccacttcattccggcggagggatatccagcggatcggggcgaggacttcaatttgcttcatttcccaacgaatggccggtttccaaaggatggcttcgaaaatcgcccttgcggcagagggagtaataacatcataactgacgcgttccactttcatttcaggtctcgtgaaacacgcatagggcccgctcacttccaggcagaatcctttcatatcgctcctttccgtcagatcattagatcctcaatcggcaattgttcggcaaatacggctaaaccggttttttcatcatagatctttaatccacattggatcagaatccccggctcgatttcctccatccgtccatcggattgcatagcttctgcgacctggacaggaatattcacagtgaatctttgaagcgcccgtgtgatctcccggcacggcccggcgtagcgcaagcggtttatataatggttgctatctccatatcgaacgatcaccggccgttgggcttgatcatctataagcttaaattgttcggccgcggtcctgaactgaacgaagagatttggatttacatcctttgtcaataattctcgaaaatcgctgccggcatcattgattcgagaatagaaaagccgaaagtagcgaaaaaccgcgcccggctggtcgggatttttcatatcctcgaacatttcgcatgttgtgtcctcacccttgcgcagtaaacctctgggcgccggcctgggagccataaaaacttggacttcgccgagttttcccgatttgtttagaacgccttcccggttgcagcggccggctgcttgagcgatggaatccaacccggctaaagcgcgatagactaccggaaaatcaatgtcgactcctgcttcaacaagctgggtgctgatgacccgagtcggcaagtttttctgaagccgcaggcgaatcgactgaattatggccgatcggtgtgctccacacatcaaagccgataaatggtacgtcccctccggcatcaatttaaaaaggtcataacaatcacggcgggtattcacgatacagagaacttgctcgtgttgttgtaatcgttccgcaagcgacacccaatccttaggtcgaattgtcgattccggaaaaacgatttttgtccgtttcaatcggtcatagaggttcatttccggcgggatgatttccaaggccggctcgagattcggcaaaaggggttgagtggccgtggccaaaaccaagctgactccgtaattccgaacaagctcattcatcgactccacgcagggcatcaaaagattaggtggcaacaattgggcttcatcgaggatgacaacgctgttgatgatattgtggagcttgcggcaacggctcgatttggctgcatagagcgattcgaagaattggacattcgtggtgatgatgataggcgcatcccagttttctgaggcgagttgcgaacgaaatgtttctttttccggatgaagattgctgtgatgttcaatgacattttcgtgaccgaaaacccgggaaagagtgtgcccggtttgttcgatgatactcgtatagggaattacgtagataatgcgtcgttggccgtgctttatcgcatggcgcatggcaaaggccattgctgaaagggttttcccgcccccagtgggcacagttaaagagaataagcctttcggcgaatcggctttccgctcacaggcacggcggatttccgctcggatttcatttaccgatgattgaggtgccttctgttccagatcatctaaaaaatcgaataaacgaggagcgagagaagagagataaggataatggcttcgttgccgggatttctcttcatccatgaactgttcggtgtcgagataatccgcatcaaccaagcatgagaacaacatccgtgcccagaagtggaagttggccgcgttcacaaaagacggcttcgtcattggcagaagtgataaaatcaactcttcagagaaagctcttatccgtttcgaattttcacgtccttctttaagacgcattgaaagggcggcatttgccgattccgatgaaaaccaatcgggcaatcccgcgtgatgccccgctattaaataggcgagtatgcgtccgaacggcttgatgccgtcttcggcgcatgaggctcctgttgaggaatgattgacgcggcccgagtcataatctgaatcgtccagttcgttgcagcggaggagatatccttgaaatctcgaatcgctttttcccaagtcgtgcaagagacccgcattgtaagcccacgctccggattcccaagtttctgcaaaatgacgcgcattattcgcagtcgcgtgaagatgttcttccaggggatgccattgattttgcggcgtatcggctttggaatgcgcatacaatttcatgacgacgatctaaaggcaatctgataccgatcttttatgcttttcccctttgtgatttttacagcgaatatattatagaccgcggaagctgaaaaaagtcaagttgtttatttctcggaatcaagaaaagtaatcgggttccaaattccttgactaacgaaggagcgtgtggaatattgatccgttcaaaaacacgaacgggagatgatcatgcgctggaagaacgcgggtccgaaaaccaatctattcaaaaacgcccgctggcttctgattccggccgtcctggccgccggcgcctggctctggatcgtcaagttcgagttcgagaagccggcggtccgcctgcttcgcgacgggccggcgctcggccgggaattatccctccggttcgaggaccgcaagagcgggctggcccggatccgggtcgaggcggaccaagccggacgaaccgttgagcttctatccgaggaatttcccgaacccgtcgtctcagtggaaaaaacgatttccctccgtccgcttccgggcggtttgaccgacggcgaaatcattctccggatcgccgcctcggatcattcctggcggaagggaaacgcggccgtttgggagatgagaaaaatcatcgacacgcggccgccccggatgacgttcctcggcgggcctcattccatcgctcccggcggagcgggcgttgtctccttcatgcttgacgaaagcgccgctttgtccggcctccaggccggaaattcctttttccccgcctacgaagccggcggcggccggtatttcgtttggtacgcccttccgtgcgacgccccgccggacgttcccttcatcggggtggccgaggatgaagccggaaaccggaccaacgtccatttccggccggacgtgaagtccgtccggatcaaaagcgacgtcctgactctcaccgacgcgttcttcgagggcgttgttccctatttcaagagccttgatccctccctcaaggggacggatctcgagatatttctggccgtcaaccgggaccagcgggcccgggacgacgagcgcctccaggcgatctgccgcgacaccgggccccggccgttgtggcgcgggacgtttctccgcttgccccggtccaagacgatggccgccttcggagagcgccggacctatctttacaacgggcgggagatcgaccggcagattcatctcggcgtggacctggcttcggtcaggaactgcccggttccggcggccaatgccggccgggtcgttttcgccgggccgctgggcatttacggggagacggtcatcctggaccacggctgcggattgttcagcatgtactgccacctgagccgcatcgacgcggccgtgtcttcatccgtggcccggggcgacgtcctcggcttgtcgggggcgacggggatggccgggggcgaccacctccatttcgccatgctcgtccacggagtcttcgtcgacccggtcgagtggtgggacgcccgctggattcaaaacaacgtcgcaatcaaaatggaatcggagtaggatgattccgatggacatcgccgggccgatcggggttttcgattcagggtacggcgggttgaccgttttccgggaaatcgccgccgtccttccggactgcgatttcgtctacttgggcgacaatgctcggacgccctacgggacgcgatcgttcgagactgtccatcgcttcacctgggaggcggtccgctggctgttcggccggggctgccggctggtcatcctggcctgcaacaccgcctcggccaaagccctccggacgatccagcagaaggatcttcccgctgaacatcccggccggcgggtcctcggcgtcattcgtccggtcaccgagcgcgtcgggacgctcagccggagccggcatgtcgggctgttcgcgaccgccgggacggtccggtcccaatcctaccccctcgagatcgtgaagttcttcccggacctggtcgtccattccgaagcctgcccgttctgggtcccgcttgttgaaaacaacgagttggacggccccgggacggaatttttcgtccgccgccatgtcgagcgtctcctggccctcgatcccgggatcgacgcgatcatcctcggctgcacccactacccgctcctggccccggtgatcgcccggttcctgccgcccgcggtcaagctgatttcccagggcccgctcgtcgcggccgccttgaaggattatctcaagcgtcatccggagatcgacggggcctgcacgaaaggcggccggagggaattttggacgaccgacgatccgggggacttcgaccggctggcgggcttgttttacggggcttccgcccgttccgaaaaagccgtcctctagtctattaaagagactcaatacccatttccctcattccccgcccgccttgcttattttcccgccctccgaccgggccggcggggaaataaggggaattggtgttgtgtctccggatttgatgatgtaatcttccctctttcctttcggggaaagccgattttgaatgatccgatcacgaggtgacgatgaaacgcctccgctttttccttcccctgatggccgccgcgctgaccgtcccgcccctttccgcccaggtggcgttcgaccgctaccatccgcccgcggaaatggccgcggccttccgcgatttggcccgctcccacccggacttcgtcaagatccatgagctggccgaaagtcccggcggccgcgaggtcctggtgatcgagctgggtcccgaggccggccggacggtgaaaacgcttcccgctgttttcgtcggggccgattttgaaggcctccatccgctggccggcgaggcggccttgtacctcgtcgggcggatcgtcgacaagcccgaggtccgccgggatctgacctggtacgtcctgggttgtcccaatcccgacgcggccgcccgctttttcgccaagccgctttgggccgatcccggcaacggccggccgtggaacgacgacatggatgacgccgtcgacgaggacggccccgaggatctcgacggcgacggtcttatcacgacgatgcggattgtggaccccggcggcgagtggctccccgcgcccggccagccccgcctcctgaagaaggctgattgggccaagggcgagcaggggatttacaagcttcttcccgagggcttggacaacgatcgggacggcgcgtacaacgaggatcctcccggcggagtgaacatcggcgtccagtttccccacttgttcgccgctttcaagcccggttcgggcttgtggccggggagcgaggaggaaagcttcgccgtcctcaagttcgtgaacgagcacaaggaaatcggcctggccgtcgtcttcggcggagctaatttctgcttgaatcctccgcccggcggccggcgcggggacgccgatctgaaccggattcgggttcccaaggacatggccgggttcatcaacgccgaccccgacaaggattacaccatggaggagctcctggagctggccaaagcctcccttcccgagggaatgacggtggatgcctcgttgatcgcgagctttctcggcctgggggcggccgtgaatccgctgcccgaggacttgaaattttacgcggagctctcggacaagtacaaggaattcctcaaggccgcccggctcgatgaaaagcgtctcgcccccgcggccgacaaggacggctcgttcgagctgtacgcctattatcatctgggcctgccctcgttcgctctcgacttctggactctgcccgaagcgagggaggaaaaagccgctcccggcctcgctcccggcgagctggagaagatgaccggcgaggagtttatcgccctgggcgaagagaagatcgccgccttcctgaaaacgtccggcgctccgccggaattcacggccgcccaagcgattgaagcgatcaagaccggccggacctcaaccaaggaaatggccgcgatgatgatgcggacgcccccgccttcctcggccgagggggccgatccccgggacaaagcccggctggcttggagcgacaaggaaccggccggaagggcgttcgtcgactggaagccgttcaagcacccggtcctgggggacatcgagatcggcggggccgttccctacgccgacacgactccgccgccggcgatgatcgagccgctgctccgggagcaagtcccttgggttttcgaactggcttcccggatggcccgcatccggctcgggccggtgacgatccgcccgctcggcggggggctccatgagatcgaggcctggatcgaaaacgccggctacctgccgtatccgacggccatgggacgccggaacaaccggatcttcccggtgatcgtcacgctcgaaggccgggatttggccttcatcgagggccggccgcggaccgcggtcccggccgtcgacggcagcggccggcggaagatccggtggattgtgcggtcgcccaagcccgtgaagatcgagctccgggccgccgctcccagcgcctggggagacgtccggactctcgagcttggaggtggaaaatgaaaaacatcgcgccggcgctcctggcgttcttgatcgtgtccgcggcggccccggccgtccgggccgaggccgcgcttccgcttcggttcgaccattactacacgttggccgaagtgggggaggcgctccaagccctccacaaggcttatccgggcctgacgacgctggaggagatcggccggagcgaggaaggccgcccgatttgggccatgacggtcaacaatcccaagaccggtccggccctggccaagccgggcgtttatgtcgacggcaacatccacggcaacgaaatccaaggcggcgagatcagcctctaccttctcgactacctcctgggacgctacgggaaaaacgaggaggtcacggccctcgtcgacaagaattgcttttacgtcgtccccgtggtcaacgtcgacggccgatatcatttcctggccgatcccaacaacgcgagctccggccggggcctgcgcatccccatcgacgatgaccgggacggcctcctcgacgaggatcctcccgacgatctggacaacgacggcaacatcacccaaatgcgccgcaaggaccccttcgggcaatacaagacgaatccggaggatccccggctgacggtgaggatcaagccgggggaacggggcgaatggacgctcctcggcgaagaggggatcgacaatgacggcgacggccgggtcaacgaggacgccgaaggctacgtcgatcccaaccgccaatggggcttcgactgggccccgtcctatgtcgagggcggcgccggggaatatcccttccaaggccggggcctccgggcgctggccggctggatgatgaccaagaccaatatctgcctgggctggtcgttccataatttcggggggatgttcctgcgcgggccgacccgcaaggggctcggcgactatcccccgcaggacgtcgccgtctatgattacatcggccggcaggccgagcggatcacccccggctaccggtacatggtcagttggaaagatctctacaccacctacggcgactcggtcgaatggctggtccgccacctcggcgcctacggctattgcggcgaggtcttccaggcctcggcggagtccttcaagaccggggaggaagccgaacgaacgactccccgcggggaagtggagcagatgctgcggggggatttctgggccttggagcggatcaagtacagcgacaatctgaccatgggcgagatgtacaagccctgggccccgttcaagcatccgacgtacggcgatatcgagatcggcggatgggtcaagatgagcaaccgcttgtccgcgccgttcatgctgcccgacctcgtccaccgaaacgccatgtccgtccttttctcggccaagcacacgcccgaagtgactttggacgtgaccgaggtgaagaagatcggcgacggcctcttccgcgtccggacccgcttggccaacgccaaggccgtcccgtcgatgagttttcaggctcagaaggaccggttgtatccccaggaccggctgaccgtctccgggccgaacgcccgggtcctggccggaggcgtcctcgtcgaccgggactttgaccgggtgagccacaagaaggaccggccggacgtccagtttctcgtggttcccgggttcggacgggtggagcaccagttcctggtcgaggggcggggcgaagtcaccctccgctatgtctcccggcacgccgggatccgggaggtcaggatctcgctttgaggcgccgcttgcgggcgtagtagtccttcaagatttcggcgtggtcgaaggccagggggaagtcaatctcccggcgggtgaagattcccaggttcttggcgtcgtcccgggcggccggggtcccctcggcccgggcgatgaacaccgtcgaaatcgtgtggcggcgcggatcgcgggccggatcggaatacgtccccagctgttcgaccaggcggacgcggagcgacgtctcctcccaagcttcccggaccgcggccgtctcgagcgattccccgtattcgacgaatcctccgggcagggcccagccgggcgggggattcttccgttcgatcaggacgatgccttcccggccgcgggcgtctcggatctcgatgatgatgtcgaccgtcggaaacggattgcggtaccggcgagggggacgacgggattccatgacggcattgtaggccgggaccgcggccggggcaagaagcggaacggaagcggatcagcggaaggatccggtgatccgaagcggcgccccgagcacgacccggagggcggccgcccgcttctggaaatccggcagccaccgggccggcagcggcgcgaccggcatgaatttcgccgagaggggattgagataggatccaaagcgcttgatccggtaatcaaggtgcggtcccgtggattcgcccgaggatccgaccttgccgatccgctgtcctccctcgaccctctggccggcccgtaccaggatcgtcgacaaatgcatgtaaatcgtctcgtagccgtttttatggctcaagcggatcatccggccggccccgcccttccagccggcctcctcgacccggccgtcggccgtggcgaaaacgggcgtgccgaccggggcggcgtaatcgacgccgtaatgagcccggaagacctttcggaccgggtggaggcggcgggaggaaaagcgcgaggtgatccggtagctctgcagcggcgacttgaggaactccttgcggagcgatcgcccgtcggggtggaagtacccgctcttgaggcttcccccctcctcgtagtcaaaccggcaggcctcgattctccgcccgtcgttccaaaattcggcggccaggatgtccccgtagcgctggaagcggccgtcgaggtattttttttcgacgagaacgcggaaggcgtcgcccgtccgcagcccggcgtaaaaatcgacgtcccagccgaaaatctgctcaagctcgatcgccaggccggccttttcgcccccggccaggaccgcgccgtaaagatgctcgtcgatgacgccgtggacgtagacggggcgggtttcgtaagcgtaggcttttttctcggcggcatacccctccccggttcgggtcaccaggaggaattggctttcatcgatcgggtaatccagggacagaagctcgcccgagggggcgaacgtcatcttgaccgtccgtccggagacgatccgggccaagttgaaaaccggccggacctggcggaccagggcgtcgatttgagcgggcgagaggccttcgtttcctaaaatttccgaaagcgtctcgcctggaaggatgacttcctcaaccgtcgtcgggcccggctcggccggctggaggctctcggccgagtcgaccgccgggacgatttcccggcctggaccgaagggacggaaaaccaggacggcggcggcgatcaggaggacgacgagggcggccgcggccgcgacccggagcggccgtccggcgggccgctttttccgcggcggccgccgcggagccagcggattcggaccggaaagcggcgggagaaaaacgtcgggttcgccgcgcggcctctttcgtctcatgccggatcgagacggccttcccggccggcgcggccggggggccgtcctttcctagaacgaaaaccggcggttccgggtttcactttaccggtcggcccaggcatgagcggccaggaacgagagcttggcgatatcgcccataatggagggattgatccggtaaatagtgtctcccgtctcgtggtaggccaaagagggaccgttggccccgaccgaggcgacggggatgcccttgatcctgaaggaggcttgatcggagccccggacgccgggcggtccttggacgacgcgcatgccgcggaggatcccgacgtgccgatcggcttcgaggaagaccttccgcaggttttcctcggtcgtgctgccccacgccccgtcgcccgcgccggtcatgtcgtaattgaacatcgcgtcgatcttcgggaagaccgccggcggatgatcggcgtaatagatcgagccctggaggcccatttcctccccgccgaacaggacgaagacgaccgagcgcttgggtttgcgggccagtccggcgaaggcccgggcgatctccatcaccgtggcactgccgctggcgttgtcgtccgccccggggtaaaggaagcccatgtgcaggccgttgtggtcgaaatgcccgccgatcacgaggacgtcccggcggagtgcgggatcggagccttcgacgtagccggcgatattgtacccgatgccgtccggatgataatcggcctcgactttcgtccggatcacggatttgaggggaaagccgatcggccgcttaaaggcggtcagggctttcttgagctcggcgctggtgctcccgatttcgttgagaatcgcgtcgccgattttctcgctgatcatggccgggaagaaatccttctgccactcgccattggggttggaaatgggcgaggggtagatgtagatcaagccgacggcgcccttgtccttggccgtcttcatccgggtgcggtgctcgtcatagtggtagaaccgcgtgtcggtccggtcgggctggccgcggaagcaaaggacgaatttgcccgcgacgtccaggccggcgtaatcgtcgtaattcagctcgggggccgagatcccccagccggcgaacaccatcccggcctcggcgcttcccgcgtcagtgtagaaaagcgggagaaaatcgacgttcggctcgagcttcgtctcggtttttccgtccggggcgaccagcgtcatctcggccgcgcggatgaccgtatagggcgagggatagggcaggagatagccggtcttcggatcgacgggcttgaggccccattttttgaacagcccggcggcccagcgggcggccgcggtgtagccttcgtggccggtgtagcggccggcgaattcgggcgaggccatccgctcgacataggcgtaggcctccgagccgcggatgccggccagggctttggccacgccgggatcgagcttgggcttgtcctgggccccggccgccagggcgacggcgagcatcaggacggcgcaaacgatcggtcgaagagttttcatttcatgctccttgtcttgttttcttttctcaagcggcgcttgcgttcgatctcggccaggacggccttgtggaggacgagcgcgtaataggcgcccatgagaccgaggacggtgagtccccggttgatccggcctccggcgaggaggacaaatccgtaaatcaccaggccggcgaatagtccgaggtggacgagggcgatgatcgtccggcccatgacggatgatcctgaggcgtatctatcgggcggccgcccgccggaccgaaagaatgaccaccgggacgcgcgggacgtcgtcgtatcccatttgagtcgaggtcggaaccgcggcgatggcgtccacgacgtccaaaccggcgacgacccggccgaagacgcagtattgatgctggtccaagctgaagttgtccacggtgttgatgtagaactggcaggtggcgctgtggagggccgcttcccgggccatggcgatggttccgcgggcgttagtcaatccgttgccggattcgtttttaatcggcggcttggagactttctgggccatgtcgggccggtgtcctccgccctggatcatgaaattctgaatgacccggtgaaaaatcgtcccgtcgtaaaacttggcgtcgacataagaaaggaagttggcgacggtgcggggggctttctcagaatcgagctcgagggtgatatccccctggctcgttttcatcacgaccgcgaccggtccggccggggcggcctcggccgcggccagggcgaaggcgaagaagacgccggccaggctgaggaacgcggggagcatcgttctcatgtgaacctcctcagggatcgggccgccggcgccggtccgaaggaaagcggccgccgccgggaatccgaaaaacgatgatagcggatttaccggcccggcgcaaacgacccggcgaggaggcgatcccaggcggatcttttgcgcgcctccggcgcctcgtgatatcctggccgggaatgcgcgaaggaggtccgttatgccgcgtataaaaaatcttctggttcttccgatcctcgcctcgatcttggccgcatccgccgcggcccaatatccgggggcggccgccgcgccgctcactgacgagcagaagctgctggaggcgacgcgcttgatccgaagcgagaccctgttcgaatacgtcaaggagctgacgtcggagacatacggcggccgcttgaccggaacggccgagtacgacgcctgcgccgattgggtgatttcactcatgaagaaatggggcgttgccccgggcggggacgacggcacatatctccagaagttcccgaatccctacaccctggtctttccgggcgggacgtgcgtccttcatcttccggtcaaggacggaacagtcaaaaagttctataagttcgaggaggagttcatccccggcggaacctcggcctcgggcgaggtgacggccgaggtcgtcttcgtcggctacgggatcaccgccccggagctgggctacgacgattacgccggcctggacgtcaaggggaagatcgtcctgatggatccggaggtcccggtccggccgggcgatccggccggcgccttcccaaaatggcggccgtactccttccaccagtacaagctcgagaacgccttcgaccacggggccaagggaatgatctacaactacgggccgatcggcaatcccaacaactcctaccgcgagggattcatctaccatcacgtcggggcggcggtcgtggccgacgtcttcgccgggacgggacggacgtacgccgagacgatcgcccggattcgcaaggagctcaagccccgatccttcgccaccggcaagacgatgacgatcaagaacgtgaccgagcatcatcccgagggcgtcgggtataacgtcatcggggtcatccccgggaccgatccgaagctccgggaggaagtcatcctgatcggcggacacctcgaccacctgggccggatgtgggagctcatgccgggggccgacgataatgccacggccgtggccgtcggcctgggcgtggccgaggccatggccaagtcggcgatcaagccgaagcggacggtcgtcttcaatttcttcggcagcgaggagcagggcgtggccggatcgaaatattacgtggaacacccgttgttccccctggacaaaaccctggtcttcatcaacatggaggggccgggcggcggggacaagatctccgcctcgggggccaagacgtacgcggatttctgggcgttcatcgagcgggccaaccagaagtacgtccaccggatcatcggcggcggcgaggcggcgtacccggcccgtccgcggcaggattcggcctggttcttctgggccggcgtcccgtccctgaccttcggggcctacggcaagaacgcgccgtacccgacgtatcacaacacgaaggaccggattgagctgatcgactccgagacgatggaggacatggcccggctcttcttcatggcgatcatggacatcgccgacgaggaagccgtcaacttccgcgtcgccgaaaaatagggacggggttttctttttttgtcaggcggcttttttccgagggagaaggaaatagccgaagccggcggcgaagaacaagtagatcgccgcgatcccccagccgagcggattcagcgtcttgttgaagagcaagaccagggtggcgatgaggccgatcgcgtcgtagacgcagaggttccagcagatcgccttccgggcccgcccttcctcgacattccgggccagccaagccaggagcatgttgccggccaaggccgccccgtattcccgggcggtcagggccgcgcccgttccgaacgccagcccgaaaagcccgagcagccaggccgggaaaaaaagcatcggcggcgcgaatcccaggcagacggcggacttgatgatcatcaggcttttgaacttcatgttttcctccttatcctttatggcgaggacggtcattcgcacggaaggcgacggcttaaggaagggaaaaaagccgaaccgggcgggaaaatcaaggctggccgacgatcccccggcttgaggtcatcatcagtcaaatcctcttttaaggcagaaagtgatcccctcggcccggagggagaaccccttctcctgagaagagagggtttggctcttcgaaagcccgccgcccggatcttttcccttgtctgctgataaaaatagggcgggaatcagggaatgtcaaccggcggaaagcatcgaggccgatcggcccgttttctttttagaggtggagctcgacgatgtcgccgtcctcgagggcgaagtcgcggttgaccatcatcccggtgatttcgtttccccgccagaggcgggcgtaggcgagcttctcgacgaaatccttgtggacggccgaggcgatccgcatgacgtcgcttcggcgggggaggatgaacggcgactcgaactcggctttcttgccggggaccttgctgtagacccggatgacgtggagcaggtcgaaaatcctccggcgcagatcctcgaggccgtcgcccctctcggccgacaccggcaggaccggaagctgggcctcgaagaagaatcgcagggcctcaagcccgtccccggctccctcgaggtccgttttcgccgcggccaggatcgttttttttcggaagagccggaccgcttcttccgccggcgggacgaatccgtcccggacgaacgcgatgcgcttctccgtcagccggctgaaaacggtttcgagcgaccccggcgattccggatcggccgcgtcggcgacgacgcaggccgcgtcggcgaccttgatcatctcgatctgcccgctctccaggtattcggccgaaaccggcggcaggtcgatcaattggatcttgatgttctcgaaccgcatcatgtagggggcggcggcccgggtggtgaagggataatctccgatttccggatcggcccccgtcaaggctttgatgaggctcgattttccggaattcggcggcccgacgaacacgacctgcccggcgccttgtttttcgatcaggacggacagcccgtgttttccggatccggccttctgggcttcttcccgcagcttggccagcttggccttgtgctgggcctgcatcttctccgtggccttgtgcttcgggatgaggcggagcatctcctccagggactcgattttttcggaaacggtcttcgcctcgcggtaccgtttttcggcttccaggtattgaggcgtgaggttggccgccatcggtttctctccgccgcgattataccaaaatcgccgccttttcgtgacccgtttccccggtttttcccctcttttccgagttggaaaagaaccgtggaaaaagcctcccctccgttccgcccggttctcccaaggccttgggccggatcctcccctccgccccaaaatattgtgtttttgatcgaaaatttcgctttactttttccctcgattcagggtataattcagacatgaaatccgcggcgtttttttaagagcaatacacttataactcacttgaattcaatgagatagaatcaaatgacaaaagagaagtattcggcggaaagcatcaaggtcctcaaaggcctcgaagcggtccggaaacggcccgcgatgtacatcggaagcaccggctccgagggcctccatcacctggtttacgaagtcgtcgacaactccatcgatgaggccttggccggcgtctgcaaggacatcgaggtcttcatccacgtggacgactcggtgaccatcctcgacgacggtcgcggcatcccggtggccatgcactcgaaagaaaagaagtcggcggccgaagtggtcatgaccatccttcacgccggcggcaaattcgacaacaagtcctacaaggtctccggcggactccacggtgtcggcgtctcggtcgtcaacgccttgtcccggcgcctggacctggaaatcaagcgggacggcggcatcttcgtccagagctacgaacgcggcgttgccgtggcccgcctcaagcaggtcggcaagacaaagaaaaccgggaccaagatcacgttctggcccgatgacgagatcttcgattcgacggagttcagcttcgaaatcctgacccagcgcctccgggagctgtccttcctcaaccggggcatccgcatctcgatcacggacgagcggatttccaagagccatgaattccagtacaagggcggaatcgtcgaattcgttcagttcctcaaccagaacaaaaacgtcctcaatccgcgcccgatcttcttcgagtcgaagaaggacgacgtcatcgtcgagctggctttccagtacaactccggctacagcgagacgattttctccttcgtcaacaacatcaacacccacgagggcggcactcacctgatcggctttaaatccgccctgacccgctgtctcaattcctacgccgaatcgcataacctcctgaaggacctcggagccggctcgctcggcggcgacgacgcccgggaggggctgtgcgccgttctcagcgtcaaaatgcgcgacccccagttcgagggccagaccaagaccaagctgggcaattccgaggtcaaaggcatcgtcgaatcgctggtcaacgagcagttgggcgcctacctcgaggaaaatccgaccaacgccaagcggatcatcctcaaggccgtcgaggccgcccgggccagggaagccgcccgcaaggcccgcgacctggcccggcgcaagagcgtcctggaatcctcgtccctccccggcaagctggccgactgccaggagcgcgatccggccctggccgagatcttcctggtcgagggggattcggccggcggctcggccaagcagggccgcgaccgccgcttccaggccattcttcccctgaagggcaagatcctcaacgtctggaaagcccggcaggacaagatcttcaacaacgacgagatcgggacgatgatcgccgccctgggcacgaccctgggcgaggaggaatcgagcctggagaagctccgctaccacaaggtcatcatcatgaccgacgcggacgtggacggctcccacatccggacgcttctcatgacgttcttctaccgccacatgaaatcgttgatcgaggaaggccaccttttcatcgcccagccgcccctgtacaagatcgtccggggcaaggaggtcacctacttgaaagaggagcgggcgtacgaaaagtggatcgtcaagaagatctccgaggaattcaagattcgggtcaagggcgccaaggaaattttcgagggcgagaaattccgcaagctcttccttcggatcatgcagaagaggaattacatccagctcctggagagaaaatcgtatcccttcttccttctcgagcggctcatccacgagggcgtcaacggcttggagtttctccaggacaagaaggcggtcaagcgcctccaatccctcctccaaaaggaatacgacctggacgtcgaaatgacccacgacgaggaatacgacgcctgggagctggccgtgaaattcggcgtcaacgggatgacggtcgtctgcaaggtcaactggaacctgatcgactcggccgagtacaaggcccttttcaagattttccaggagctggccgatttcaaggcgccgttcgaggtcctgtccaacggcgagtgcatcgtcgtcgagaacgagaccaagctcctcgagtacctccatgagaaggggaaaaaaggcgtctccatccagcgctacaaggggttgggcgaaatggcccccgaacagctctggtcgacgacgatgaacccggagaaccgggctctcctccgcgtctcgatcaccgacgccgtgaccgccgacgaggtctttacgatcctgatgggcgatgaagtcgaacgccgccgcaacttcatcgagaccaacgcggcccacgtcaccaacctggacatttaacccatggctaaaaaagaaaaagaaaaagagaaagagagagaaaaaaccaagcccaagatcgcggccaaaggcggccgcggaggccggggaaaaaccccggttccgccgcctgtcccggagccggagatcccggcttccgccgtcccgggcggagacgccccggccgaaaaaacgccggcccgggaaaaagctccgtccgcccaacagccgctctttccggccgcggccgagctgtccaacgtcgccctcgaggaggagatgaagcgctcctacctcgattacgccatgagcgtcatcatcggccgggccatccccgacatcaaggacgggcttaagcccgtccaccggcgtgtcctttacgcgatgtacgaaacgggcacggtttacaataagcctcacaagaaatcggcccggatcgtcggcgacgtcatcggaaaatatcatcctcacggcgaccaggccgtctacgacaccctcgtccggatggcccaggatttctcgctccgggccctgctcgtcgacggccagggcaacttcggctcgatcgacggcgatccgccggcggccatgcgctacaccgaggtccggatgaccaagctggccggcgagatgctggccgacatcgagaaggacacggtcaacttcatccccaactacgatgaaagcctgaccatgcccgaggtcctgccgaccaagttccccaacctcctggtcaacggaagctcgggaatcgccgtcggcatggccaccaacatcccgccccataacctgggcgagatctccaacggcatcgtccacctcctggatcatcccgacgcctcgctcgaagacatcatgaagcttgtccccgggccggatttccccaccggcggatacgtcttcaaccagcagggcatccgggacgcctacacctccgggcggggcaccatccaagtccgggccaagacgacgatcgagcggggcgacaagggcgaacgggagcggatcgtcatcaccgagatcccctacgcggtcaacaaagcccggctcatcgagagcatcgccgaccttgtcaacgcgaagaaaatcgagggcatcgccgacctccgggacgaatccgaccgggaaggcatccggatcgtcgtcgaggtcaagcggggcgagcttcccgaggtcgtcctgaacaacctctacaagcacacgtcgctccagacgtcgttcgggatcatcatgctggccatcgtcgacaagcagccgaagatcctcggcctgatcgacatgatgaagtatttcatcggccaccggcaggatatcgtccggcggcggacccggttcgacctgaagaaggccgagcaccgggctcacatcctggaaggcctgacgatcgccctcgatcatctcgacgcgatcatcaagctcatccggtcggccccgaccgtggacgcggcccgggccgggctgatggaaaagttcaagctgtcccagatccaggcccaggccattctcgagatccagctccagcgcttgacccacctcgagcgggagaagatcgtccaggaatacaccgaggtcaaggccctgatcgtcaagctcaagaaaatcctctcctcggacaagctcgtgaccgagatcatcgccggggagatgaaggagatcaaggagacctacgccgacgcccgccggaccgagctgcgggacgaggttgtgaccgatatccgggccgaggacctgatcaaggaggaggatgtcgtcgtcatgacgacccagtcgggctacatcaagcggacctccctctcctcctaccggttccagatgcgcggggggaaggggcgcaagggaatcagcatgaaggccgaggacgtcgtcgatgacgttttcgtctgctcgacccactcctacctcctggtcttcacgaacatcggccggatgtactggctcaaggccctcgaaatccccgatgtcggcgtggccgggcgcggcaaagccatcgccaacctcctcgagttccagtccaacgagcgggcgacctcggtcgtgtcgatcaaggatttttccgaggaccactacgtggtcatgctggccaccgacggccagatcaagaagacccggctgagcgagttcaagaacatccgccgcggcgggatcatcgccatgaatctccggccgaagaaggagctcatgtggacccggctgacggacggcaagcgggacctcgtgctcgcgacccggctgggcaaggccatccggttcaaggagaaggacatccggccgatgggccggaccgccgccggcgtccgggcgatgaccctggccaagaaggacgagatcatcggcttcgtggccgtcggcgacgaggacaagtacattttcacggccagcgagaaaggctacggcaagagaacggaggccgcctcctaccgcatccagcaccgcggcggcaaggggctcatcaacctcaagatcacgcccaagatcggcaaggccatcgccgtcctgggcgtcgcggaagacgacctcctggtcgtcaccgtctcgggcaaggtcatccggatcaaaaccgagcagatccgctcgaccggccgggccacccagggcgtccgcctgatcaatcttgaggaaaacgacgccgtctgcgccgtggccaaggcccgcgaaacagattgaatcctccggcggcggggggatttcccggcgccgagacgtccctcccccgcggaccggattttgactttttcctccattcggagttataaaaaccgcatcatcggagacgctcctccgggcggaagatcgtccccggatcagaggaaggagaacgcttggcgccgaccgggcggaaaggattctcgtttctggcgaccctgccctccgggtcgaaaacaccgttccgcgccgtttcgggcgtcgtcctcgtcggccgccgccttccgccggggccggatcactggagcctggaggacgagatggtctccgcccggcacgcccgtctcaccctggatgacggcggcgtctggatcgaggatcttcaaagcgccaacggaacctgggtcgacgggaagcggatccagacccggacgcttcttgatcccgcctcgatcgtccggctcggccggaccaccctgcgcctggcggccgtcccttcggccgccccggctcccccgccgtttccgccgaaagggaaaacacccctgcctttccagccgccggccgaggccctcgccggggatgaatccgtccccaacctcgtcctggggggagcgacggccgaggccgtccgagaacggctgacggccgtttttgatctcacggccgccctaagcgggatcgactccgtcgaaaccctggcctcccacctcctggagcatcttcaccgggctttcgcctcgttcggcccgaacactcacagcgggctcctgatgggaccggagctgatcctcaaggcctaccgccccgaaaccgatcctccgacctgcagcctgaccctgggccgccacgtcttttccgagaagaaggcctgcctttggcgcctgggggcggccggagaggtcgatccgtcgatgagcctgatggcctccgggacgacctcggccctctatgcccccttggcctgggcgggagaagtctacggtgtcgtttatttcgatttgacgtccgggacgaaaaccttcggccgggacgacctgcggcttgtccagctgatggccgcccagacggccatgttcatcaagaatctccagctcggccaggtccttcagcgcgaggcggcgatcaagacccgcctcctggcccagttcccgccctccatcgccgagcgcctggcccggctcccggatcacaccgccgtcccctccgagcgcctcgaccgggtgaccgtcctcatctcggacgtgcgcggattcaccaagctggccgcggccatggagccggaagccgtcgtccggatgctcaacgacatgttccacgaattgaccccgatcatcctcaagcacaacgggacggtggacaagtacatcggggatgcgatcctggcggttttcggatgccccgagcccgacgaacagcaagccgagcgggccgtccaggccgccctggaaatgcaggaggccgtccggaggctggaaaccaagcgctggaagggccgggcgccgtttcgcatcggcgtcgccgtccacaccgggccggccatccacggcttcatcggcgcgcccgagcggatggaatacacggtcgtcggcaacacgatcaaccttacctcgcggtattgcgacgcggccgctccggggacgattctcgtcagccccgagatctaccagcggctgcattactgcctcgacgtcgagcatccgcccctcgaggtcgagaccaagcatgaaggtccgatcaaggcgtatgtcgtccgcggctggaaggggggccggccggccgggaaggaaggtgccccatgaccgcttccgacacgaaaaaaaagacgaaaggaaccggggcgggccgaacccccggcccggcctcgaagacggaagccgtccggatctgcccggcttgccgcgcggaaaacgcggcttccagccggttctgcggcaactgcgcgacccccctccaggacaccggagctcccctcgaggccgcccccgatggaccgcggacggtccgggcctcgaccgtggagctggcccggggaaaccggctggccggccgctacgagatcatcgaggagctcggccgcggagggatggggaaggtgttcaaggcttatgatcacaagatcagcgaggtgatcgccctcaagctcatccggccggagatcagcgcccaggagaaggccatcgaacggttcaagaacgagttgaaattcacccggcggatcacccaccgccgcatctgccggatgtacgacctgggagaggaggacttcctttactacatcacgatggagtatgtcgccggcgaggacctgaagcggtttgtcaggcgggccggaccgctcaacgccgggaaggcggtgatgatcgccggccagatctgcgacggactggccgaggcccatcggatcggagcgatccatcgcgatctcaagccccagaacatcatgatcgacgccgacggcaacgccaagatcatggacttcggcatcgcccggttcaccgagatggagcgggtgaccgggtccggggtgatgatcgggacgcccgaatacatgtctcccgagcaggccgagctgggcgaggtcgacgcccgctcggacatctattcgctgggcgtcgtcctcttcgaaatggtgaccggaagagtgccgtttgaaggagccacgcccctcagcctggcgatgaagcacaagatggaggttccccggaacgtccgggaatggaacgcccaagttccggccgggctggccgcggtcatcgcccggtgtctggaaaaggacccggccaagcggtatccgtcggccgaagagctgaaagcggccttggaggacgccggccgggacatcccgacggccgaatggcccgccccggcgggcgcggcggcggcgaagacgccggtcgcgcccggagcaaggaaaattccggttccgctgatcgcggccggggtggtcatcgcggccgcggccgtctatttcattttctcgaagcccggcgctccgcctgttccggcatcggagacggcggcggataccggatcttcggcggctctcccgggcgacccgtttccctcggtcgtcatgaaggaggcggcgacggaaacccggacgacggagtctcggcccgccccgcccgaaacggtcaagagccctcagattccgaagccggtttcctccggatccagaagcgccgcgccgccggcgaaaccgccggccgtgtcgcccctggcgcctgaggaacagaaagcggtcgacatggccctggcccggatgaccggggcccggagtctcgccgtcaaacagggccacggatcgggatccgcgtttttcgaggccgctgaaatgcttcgagaaaaaggcgcgtcggccgcgggcgccgggaaggggaccgacgcccgatgttctttcacgatctcggaaaagatgttccgcttatgcgtgaccgaaaaacgcgacccggcccgctggcgcgagctggcgaagctcgtcgaccggctgagggaaaacgccttggaggcctggaaaaacgtcccggcggatccgctcttccaggaagcccagtcccggtcgacccgcggcgatgccgcccgggcgaaggatgatctcgccggcgcggtcaaggaatacgccttggccgctttcgattatgagaagatccggtggacggtggaagcggccctgaaaaaatagagacgcgccgcggcgccggacggtcctttcgtaattttgggttgaccctgcctgtctttttccatagaatgggcgcattcgttcgcagaaatcgtggaggacaagatgccgaagaccctgcccgagatttttttgaatacggtccggagctacgtcaaaccggacctgatgaaggtgaagcgcaacgacgtctacagcgacatctcaacgtccgaattcgagtccgccgtccggaacctggccctcggcttgaaggatctggggcaccgtccgggagccaagcttgtcatcctgtccgagaaccgtccggaatggacgatcaccgatctcgccaacctctgcctcggcggagtcaccgtgccgatctacacgacgctcacgggcgaccaagtcaagtacatcatcgaggacagcgacgccgagatcgtggtcgtctccaacttctaccagtaccagaaaatcgcggccctccggcgggaccttccgcgggtgaagcatgtcgtgatcttccagccgcaggcccccgctcccgacgtgcttcccctggccgccgttcaggcccgcggcgcggccctggaggccgctcgtcccggcctgttcgaggaaaccgcccgggccgttcagccggacgacgaggcctcgattatttacaccagcggaacgaccggcgtccccaagggcgtgatcctcacccacgccaatttcgtcagcaacgtcctggcggtctcggggatcatcgagttttccgccgccgacacggccctgtcctttcttcccctgtcccacgttctcgagcggatggtctcgttcacttatctttataaggggtgctcgatcgcttacgcggagaacgtcgagacggtcgcccacaacctgctcgagatccggccgcaggtcatggtcagcgtcccccgggttttcgaaaagatctattcgcgggtcatggaccaagtcctctcgagcccgggcttgaagcggaagatcttcttctggggcatcggcgcgggcaaggccgccggggagaaaaagctggccggcaaaaccgccgggccgctgttagggctcaagctcgccctggcccgcaagctcgtcttttcgaaaatcctggataagacgggcggccgggtccggttcttcgtctccggaggcgcgccgctgtccaaggacatcgccgagttcttctacgccatcggcctgacgatcttggagggatacggcctgacggagacatccccggtcctggccgtgaataccttcgacgccctgaggttcgggaccgtggggcgcgttctgccgggcgtcgagatccggatcgcccccgacggggagatctcggccaaggggcccaacatcatgaagggctattacaagaagcccgatgaaacgcgggacgtgttcgaggacggctggctcaagacgggcgacatcgggttcctcgacgccgacggattcctgacgatcaccgaccggaaaaaggacctgatcgtcacggccggcggcaagaacatcgccccccaacccatcgagaacatcctgaagacgaatccctacatcacgaacgcggtcgtcatcggcgaccgccgccgctacgtcaccgccttgatcgttcccaattttgagaagatcgaggagtacgcgaaattcttcaagatctcctaccgggaccgggaggacctgatccgcaacgagcaaatcgtcaacttcatccggtcggagatcgaacgggccacgccgaacctggcctcctatgagcggatcaagaaaatcgccctcctggaccgcgaattcgacatcgcccagggcgagatcacgccgaccctcaaggtcaagcggaacatcatcgagagccgctaccaggaaatgatcgaggatttgtacaaagacgacgcgtactgaggaacggcggcggaaaacgattcgtccggcggatggagccggggaatcagccggtttctttctccggatcggagtcgggcggatccgccggctttcggtggtaaagaatccggccgcaggcttcgcaggtgatgatttcgttcatggcccaaagatcgtcgaggatctggggccggatgcggagctggcagatcgagcagaaatcgtcggtgacgggggagagggcgacgccggccgtcttcttggcgatccgctggtatatcgacagctgttcggccggaatcgcggggagaagcgcgctccggtctttttccagccggtctttcttcttctcgatttccttctgttcggccagggcctggtcgcgctcgatcttgagcttgccctcttcctccccctgctttttcagagccgccttgatctccttttcgatgtcgtcggcggcgatcatctcgttgagaatctcctcctcgatccgggcgatcttctggtccgtttcctcgatttccttgaggagggcggaatattccttgttggtcttgacgtcgttcagttggcgcttgaatttggccgtttgttcccgaatgcccttcacctcgccttcgagctcccggcgcttcttctggttggccgccagcttgtcccgggcccccgagacgagaaccgccgtcgccttgatgtcctcgtcgatcgcctcgatttgatccgggatcgagtcgagatgggcgttgacgctgatgatttcggaatcgattttctgaagcttgatgagcttatcaaacgaaatatccaccgggtcctcgcgatcaaatgggcctaccaggattcgaacctgggacagaccggttatgagccgggagctcttccgctgagctataggccctttgggattttatatcaaaattgccgatgggacgcaacggaattttgcgcccccgggagggggaggcccggggccgccccggcggcgggcttcggccggactcacccgaagccgttggtgaacgaccggagttttttcgaccggctggggtgtttaagcttccggagggctttggcttcgatctggcggatgcgctcgcgggtgaccttgaactgctgcccgacttcttccagcgtatgttcgttgccgtcgccgaggccgaaccgcattttcagaaccttcgcctcccgttcggtcaggcttttcaaggcttcctcgatctgctcccggaggttgatgtggatgaccgcgtccgggggcgagggcatgaccttgtcctcgatgaagtcccccaagtggctgtcctcttcctccccgatgggcgtttccagggagatcggctcctgggcgatcttgatgattttccggaccttgccgacgggcatgtccatctttctggcgatttcctcgctggtcggctcgcggccgatttcctggacgagctggcggctgatgcgaatgagcttgttgatcgtctcgatcatgtggaccgggatgcggatggtccgggcctggtcggcgatggcccgggtgatggcctgccggatccaccaggtcgcgtaggtcgagaacttgtagccgcgccggtactcgaacttgtccacggccttcatcaagcccatgttgccttcctggatgagatccaggaactggaggccccggttgctgtattttttggcgatcgagacgaccaggcggaggttggccgcgaccagttctttcttggcctggtcgctgatctttttaccggtcgtgatcgcccggatgatccggcggagatggggggcgtccaggccgatgtccttctgggccgcccggaggtttttcgcgatctccttgatctgcggttcgaggtcctgggccgttttcttcttccgggttttgttccggagggcttcgagctcttcccggcgttcttccagatcgttgatgatccggagccgggcccggaggatttcgatgatccgctcctgctggatcgcgcgcatattcagatcgcggatctgcgagctcatcgcgacgatgatccgggagcgggtgaagaccatccgcttggtgttggggatcttgtcgagcttgcggccgagatccttgatttttttgatcttggccaggatgaacttcttcttttcctcgagtttgccctcggccacgtcgtcttcgctgacgtcgaagacctcggtgatgatcatcggatcgatcttgatcttttcctcgagggccaagacctcgttgaggacgaggcgggtcttggacagggctttgacgatggccttttccccgcgctcgatttcccgggcgatggcgatctcgccctcccgggtcaggagcgagatgttgcccatctcccggagatacagcttgaccgggtcggtcgtccgctcgagcccctgggtggagacgacctcgtttttcctccggcggggcaccagctcgctgcccttggtatcgaggatcttgatcccgtagtcgtcgatggaagaaaggaagtcgtcgaaattggcgccgtggtccaagtcgtcttggaacgtcttgtcgatgtcctcgtacagcaggaatccctgccggcgtcccttggaaatcagctctgaaatttcgtctttcgggaacttgttgtcagcggccacgcgcggctccttggcgtccgaggtttttcgtcggccgccgttttacgccccccgccgggggatcgatgggcgttttcatctcaaagccaggacctggcgggtcaggtccagcttccggctcatcaaggactccagcttctcccgatcgcccgatttttccgcccgggcgatctccccttggatttttcgaagagcgttctccttgccggcgactcggagggcccagaggcaatcgagcgcttcctggaggctcggcgcttcgcgcctttcgaggagagcctgggacaactcccgggcgagccccggctcgacgctcttatgcatctcgttcagggaaaaatcctgttcatttgcgaataagcgcaacattatggcaaaaatcggctcgcttttcaagccggcgatgtcttcctcgcagagctcggagaagatatcaggccggagatcggcgttttccatcaagatttggagaagccgcttctcggcgggaaggaatgtctccgccggccgggcggccgcctcgcccggctttacctgggacaaggaacgaagaagggactcatccactccgagatgttcagccgtaaggcggaagtattccgaccggacgatcgcgtccgggacggcttcgacgatgtccatcaccgcccggaggacccgcgtcttgacttcggggacatccaggcgtttctctcgggagaggtaatcgatgatgaatttcaggcccggggcggccccggggtaaagaaggtcgtaggcggccgctccgttcttccggaggaagccatcgggatcgagattctccgggaggatgagaacgcgggtttccacgcccttttcgaagaacagcgggaccgctcggaaagcggccgtccgtccggccgggtcgccgtcgtaattaataacggctttcggggcgaaacgcatcgccaacccgacctggcgggaggtgagggccgtccccagggaagcgaccacgttccggcgtccggcttggtaaaggctgagaaaatcggtgtatccctcgaccaggataaactccccggcctcccggatggcgtccttcgtgacgttcagtccgtaaagcaggtgcccttttgaatataagggcgtatcgggtgaattgagatatttcggatcctggccgaaaagggaccgcccgccgaaagcgacggctttcccggtgacggtgaaaatcgggaagatcgcccgtccccggaaccggtcgtagaattcgccctgcttccgcccgggaacgaccaggccggctttctccagcagggccggggcgacgcctttggccttgaagtatttgatcagggcgtcccaggaattgggggcgtatcccaaggcgaattcctcgatgacagcggcggacagcccccggcccctgaggtattccagggcttttttcccctcggctgtttcccggaggcttttccggaagaaggatagggctccctccaggaccttccggatttgttcctcgagcttgagggcttggggcgagagacgtttcttttcggggagggggatgtggtatttctcggccaggaaggcgatggcttccgggaagtcgagattctccttctccatcaccagggtgaagatgtccccgccggccccgcagccgaaacagtggtaaagacccttgtcggcgtcgacggtgaaagacggcgttttttcggagtgaaaggggcagagaccgacgtgttttttgccgcgttgtctcagggccgtgtactggccggcgatttcaacgatattggccgcgttccggacctggtcgagaatctccattttaaaagacggccgccttcaatgaaagaataatttcgcgaattttttgtaaatataaggtccggcctacggattgtcaagctagcgattgatcaggctggccaagtaggccgccccgaatccgttgtcgatgttgaccacgccgacgccccccggacaggaattaagcatggccagaagggcggccacgcccttgaagctggccccgtatccgacgctcgtcggaacggcgacgatggggacggagaacaggccggcgaccacgctggggagggcgccctccatgcccgcgcagacgatgatgacccgggctttctttagccggccgtattcgctcagaaggcggtgcaggccggccacgccgacgtcgtaaaaccgctgcacccggttgccgagcatgcggcaggtgaccgcggcctcctcggcgaccggaatatccgacgtcccggccgtcaagacggcgatcattccccggccgggaggagccgggcgcttcctcagataaatgatttttcccagggcattgtaagcggccttggggacggcttccttgaccgcggcgtaagtggatgcctccacccgggtgatcagaaggttgctgcctttttggacgatggctgcggcgattttgacgatctggctgtccgtttttcccaggccgtagacgatttcggggtatcctttacggatttcccggtggtgatccaccttggcgaagcccaggtcctgaaacggataatccttcagcgcggccagggctttcctcggggtcagggttccccggcggaccttcgtcaggagatcttcgatctgggttttcatactccggattttagcaaaaaacagggagacagaatacttgtcccggcaagactccgatttcccgtcgtccttcgggcggaaaacgacgaaaccggcgaaaagaagcgaggagaacgggccctggtctctccctctcgggaaatccatgatagaatgtccttacgagagaaataatgacccgttccaaaacactggctgcccctgtcttttttgaaggcgtcggtgtccattccggccgatccgtccgcctccgccttctgccgtcgtcgatcccgggaatcatcttccgccggaccgatttggataacgccgagctgcccctgaccaccggccgaatcgattcccagaacagcaccactttggtcggcgaccgtttccgcgtccggaccgtcgagcatctcctggccgccctgtgggttcccggcatcgacagcctgacgatcgagctcgacgcggatgagatcccgatcatggacggcagcgccgagccgttcgccctggctctccagacggccgggatcgagaggctgcccgatttccagcccttcctgaggatcgtccggccgtttgccctcgccgacgagggcgcggcgatcgactttgcccctccgatcgaggacggcgggctcgagctgtcctacaccatcgattaccctcacccggccatcggcgggcagacgctgcggcggccgatccgctggggggtgttcgtccgggaaatcgccccggcccggacgttcggcttcctcaaggacgccgagagcctgcggtcccggggcctggccctgggcgcctcggccgaaaatacgatcctcatggacgacgagtcggtgatgaacggaccgctgcggtttcccgacgaattcgtccgccacaagctcctggacctgatcggggacctcgccttgctcggccgtccgctcgccggacgggtgagcgccgtcaaggccggccaccgcctccatttcgccgccgtcaggcatcttctcgatcatccggaattgacggtcttgggggaatagcggatgccgaaaccccgctgtccgaaaataatcaaacgccggacgttttccggaattgtcttccgtctcgacgccggcgaggcggcgggcgtcggccgcaaagcgagttttcctccgacgcgatgtaacgaaaacgaacggcttttcccgtcttctcgcggccgaatcccatcatgaagggcgggggatctcttgtctttccgcttgatcttggataaaatacacgccatcttggatccggagagaaccctttgaaagaagaaaaaagtaaaaaggacgaataccaaaaagctttgaccgcctacggcgacgccatgaaggagttccgtaaatcgaagtgggacaaagcccaggaatcattcggggcattcatcgagaaattcccggctgaacgcgacctagtcgcccgggcgcggacctatcaatcgatcgccgccgagcgcttcaaggaaccccgggaaattccagcgctcaagaccgccgaggattacgtccgcgccgcggtctataaaatgaataccggggccgccgaggaggccttgaagcttgtcgaaaaagccctgaagtccgatccggccgacgcccgcctcctctaccttcaggccgatctcctgtgccggcgcggccggctcgacgaatccctcgaggcccttcgccaggccgtggccggcgaaaaagcctaccggatcctggcccaaaacgaagtcgacttcgctcccctctgggaagacaaacggttcaaggccatcaccaagacgtcttgagacaggccccaaagattcatggataacctcctgatcgggttgatttcagcgggaggggaagacgaaggcggattcaagtccacgactccgaaagcgcttcattccctcctgggaatgacccttctcgaatgggcggccgcggccgccgccggggccggggccaagcggttggtcgtcgccggactcgatcccgaagccgtcaagaccgggattcccggactgtccgccgaggtcgtcgcggccaaggcgaaggccggcaatccggccgcgatcgtgcaatcggcccggaaggaatgggccggaaacgccgcggccgacgtcttgattctccccgccgacctccccctgatcccccccgccgttctccggaatctcgtttcccggcaccgccggaagaaatacgccggcacgatgttatgggccgagtccgccgaaattccgccctcaagcgcgcggattccgattctagaggaccggggggcgattccgcgccgcgtcccgacaggcgtgtttgtcttccaggccggcgcgctcgaccgggttctgccccgggccgcccggacgggccggaaaggcggatccgacctgaccgccgccttcggccttctggccgccgtcggaaatccggtcggcgtcgttcttgctcccgagcccgaggatgtccgtcggatccagacgcggttcgaccttggacaagcggccgaccggctccgcctgcgcaagatccgggacctggcggaacacggagtgacgattttgagcccggcgaccacctggatcgattggaacgtccgcgtcggggccgagacggtgatttatcccggggcggtcatcgaggggccgacgatcatcggacgcaacagccggatccatccccatgcccgcatcgtccgatccgtcctcggcgacaatgtccatgtcctcggctccagcgagattgaggatgcgaccgtcgccgacgacgtccgaatcggcccgttcgcccggatccggatgcagacctcgcttcgagccggatcccgggtcggcaatttcgtcgagatgaaaaagacggatttcggtccgggctccaaggccatgcatttgtcctatctcggcgacagcgaagtcggcgcggcggccaacatcggcgccgggacgatcacctgcaattacgacggcgtccgcaagaatcggaccgtcatcggggccaaggctttcatcggctcgggcagcgagctcatcgctcccgtccgcatcgggcggggcgcctacgtcgcggccggctcggtcatcaccaaggacgtcgccgacgacgccctggccgtcgcccgggcccggcaggtcgagaagcccggatgggcggcggtccggagggcgaagcttcaggcggggaaaaacggcggatcgaagtcctagcgcggccgtcccgcgcgggggatgatccgccccgaggaagggggttcgcatgtgcggaatcgtcgggtatatcggcccgaaagacgtcgtccccgttttgctcgagggcttgaaaaagcttgaataccgcggatacgactcggccggagtggccgtcgccggcggtggaggcatccgcctttgccgggtccggggcaaggtcgccgctctggaggagtgcctgggccgcgcgccgatcgagggcgcctacggcctcggtcatacccggtgggcgacccatgggtgcccaagcgaggccaacgctcatccccacgtcgactgcacgggcgggatcgtcgtcgtccacaacggcatcatcgagaattatctcgccctgaagacaaagctgaaggccgagggtcatgtcttccggacggagaccgacaccgaagtcatcgcccacctggtcgagaagcatttctccggatcgttggaggaggccgtccgggcggccctggccgagatggagggcgccttcgccgtcggagccatcgcggtcaaggatcccggccggatcgtcgcggcgaagatgggccccccgctggtcatcggcttgggagacggcgagacgatcgtctcctcggacatcaatccgatcctggcccatacctcccgggtggccttcctcgaggaccgggagatggccgtcatcgatgcctccggcccccgtttcctggatttcaagggcgcgccggttgaaaagaaaatcgagaggatctcctggagtcccctcatggtcgaaaagcagggtttcaagcatttcatgctcaaggagatctacgagcagccccaggttatccgggacaccctcatgggccggatttccctcgaccggggcgaggtcctgctggccgagaccgggatcccggccgaggttttccgggatgtccggaaggcggtcatcatcgcctgtggaacatcctcccacgccggcttgatcgggaaatacttcctggaatctctggccggcatcccggccgacgtcgaatacgcctcggaataccgataccgggatttcattctcgacaaggatgccctggtcatcgtcatttcccagtcgggcgaaaccgccgataccctggccgccctccgggcggcgaaagggagggcggccgcgactctggccgtcaccaacgccgtcagctcatcgatcgcccgggaatcccggggcgttctgtatacccacgccggcccggaaatcggggtggccgcgaccaagacgttcaccgcccagctgaccgccctggccctggtcgccctcggcctggcgcaggcgaagggggcgggaacgaaagaggaccggctcgcggtgatcgcggagctccagcgcatcccccacaaggtcgagcggatcctccatcgggccggggcgatcgaagacctggcccagcaattcatggctttttcccattttctctatctcgggcgctgggtgaattaccccgtggccatggaaggcgccctcaagctcaaggaaatctcctacattcatgccgaagcctacgccggcggggagatgaagcatggaccgatcgccttgatcgacgagaagatgccgacgatggctttgatcccccgcgaccgggtctacgacaaaatgcggagcaacatcgccgagatcaaggcccgggcgggctttgtcatcgcggcggccgatgaaaacgacgcggccctccgggagcacgtggacgcggtgatccccttgccggcgacccaccctctcctcaccccgttcctggcggtcgttccccttcaactgttcgcttaccagatcgcggccaagcggggagcggacgtcgaccagccccggaacctggccaagtccgtgaccgtagaataaagcttaaaacttgattttcgccgacaagcgcgcttggcgcggctgctggcgtccccaaacgtcgccgaacagcggcgtatcctccttgacgtaggaaacgggccgctggctgttgaagacgttgaagacgtccaggcggacggccacggccgcgtcggcgaagatccccgagcccggcagggcgaaggatttctcgatcgaaacgtccaggaaggaatgggcgggcgtggtccgcgcgccccggccttccgggaaggcgtaatatcctccgaaaaacgggacgtagcctgttttttcccaggggtagccggaaatgaattcgaaggccgcggcgacctggatgccggccggggcgctgtaaacggcgttgagcttgacgtcgtggtccacggaataggggagacgcccgtaccagccctcatcgccgatgttccggccgcccagcccggccagggcggcatcggcccaggccttcagggcggccagctcgggcatgtcggggacgtagatatggtttccgaacatccccaggtaatacgtgctgccttcctcctcggaccatcggccggtctccgattgtccgggattcgtgccccgggccagggcatgggcataggaggcgttgaggaacaggcgccggccgatcgacccggtgatttccagctccaatccggtgtaatcccggcgcttgtattcgaagttgtcgtagaggaaacggtagatcgtccgcggatcgaagatcatcaggagctcgaggaggttgtcggccgtggtccggacgaaacgggcccggaccgcccaggacggcccgatccggcggtcgaattcgacaagccagcgcgtttggaaatcgggcttgaggcgcggattgatgtcgaatttttggctctgctggatttcgaaggcccagaagtcgggattgtggacgtcggcctcgccgggcgactccggcccggcccaccggtatagacgataggtcggaaccattccggaattgaagaagccgagggccatcgtcgtgatcatgtcgctgaaccgcccccaggccagcttgaggacgttccggccgtccttggtcagatcggccgtgaaggacacccgcggagagagaaaatccccgaggccccagctccagagcgtctcccccgtatcggataagcaggcttgggtttgagcgcggaggccggccatgagggtgaagcggtcccaggaaaccttgtccttcaggaaaagtccgatccccctcgaggcgttgattaaatcgaacggcccgtactcgtagaagccggacggaaccccgacgccgcccttccgggtttcgaagatgtatttcgtgccgacatcgaagccgttgccggggaagagatcctcgttctttccgctgaaatccacttcgaaatccgaagacacgtcgtagtactcgaacccggccgtgatctcgtggcggccgaaccgcggcgtttcaaagtaggtggtcatcttcacctgggcgtcgaaccgccgctcgtcatcgatcacgttgccgtaggaattatggacgttgcgggccaggtccttgacgtagtacatcgccggcccgagatcgccgtcgaccggcgtcgtgtccaggtcccgccggacccggcccaggccggcctcgacaaacgtccgggggctgaggatgccccggtagttgaggcggaacatggcgtcccggacccgcttttcctcgttcatctcgggaagcccgatccctcccctctggggaaacgactggtcccggaggaacgtcagggaaaggccgtgatcggcgtgaggggcgaagctcagcttgacgaagatgttgtcgcggccgatcgttctccgtccgcccggaacggccaggtagccgaaggccgcctccttcgtctcctcggtcagcgactggtaatcgttggaaagaaaaaaccaaagcttgtccttgaggatcggaccgccgagattgacataagcgctcgtgttgttgaaggcgtccggctcgctgacgaccgaaagctgggattggcgggccgcctgaagatgcctgttttcgatcagcaggctggcttcgccgtggaaccggtttcccccgcttttcgtgaccatgttgatgatgccgccgtaggacgagccgaactctggggagaacggatcggagatgatctggatctcctcgagcgaatcgtaattaagattgaccccggaatccttcatccggactccgctgacggccaggccgtcgatgacccagttgttgccctccgcccccgccccgcggaagctgggctgaccctcggtcgacgtgccccgccgcgtgtcggcccggatgccggccgccccgggcgtgaacttgacgacgtccacgaccgtccggttctgggccgggattttttccaggtcggccgcccccagccgggtggaggtgtcggtggaggaccggtcgatcagcggggtttcggccgtgacgacgacttccgtttccaaggccgcctggggcatccggacggtcagggtcgtcgtcaagccgagccggacgatggccgcctcctggacgatcgtggtgaagccggcgagcttgaaggtcagggaatacgtcccgacggggaggagggggaaatgaaacgagccgtcccgtcccgaaaaaacggtccgggcgccttggagggccgggctcgccgcccggatttccacgccgggaaggccgaggccgctttcatcgaggaccttgccccggatctcgcccgtttgggaagcggccgccgtcccggccaggagagccgcggcgagaagaccgccccagagccgttccgcccgagaaatccttcttcccgtgttcatgagttccgtccttgaggaatgtccgtcgccggcgcgggtattgtaactgaaccgcctttcctccgtccatcggcggtctggatttcggccggtcgatcgagtagaataagcccgacgtccgtttctcggaggtggccatgtccgatccgaaaaaagtgctcatcatcgacgacgatccggcgatctgtgattcggtgaaagcggttctcgaagcggtcggttttcaaaccgaggtcgcctacagcggcaaggacggcgtggccgccttccgccgcagccgtccggacgtggtgttgtgcgacatgatgatggaggacctggacgccggggcccaagccgccaagatcatgcgcaaggagcggccggacgtccccatcttcctcctcagctcgatcggagacgcgacggccgaaaccgtgggattcggccatctcggcttcagcggcatcttccagaaaccggtcaatttcgacctgctcctggccgtcatggggcggatcgccaagagctgaagagcccgtccttacggggcgggggctttccctctaacccgatgctcggagagttatacagtcgttgccccgatgcggaagccttccggcatgccgtcgaggcgctcggcggcgatttcgtcctcgacgccgcggaaatgatcgagctgggggaagcctatttccggcggcatcccgacacaagctgcaaccgggaccgcgaatccgtcctggcgggatacgccctcgtccggctctgcgtcacggagcgtctgatccggcggttgtccccggcggagcgggaattttatcgcggagtctttcagaatccgggccgggtcggggttctctccggccgcttttcggatgacgagcttcaggccggcttggccgccgtcgaggcggcgatggccgaaatccgggaatcgatcgaaggaattcccaaagggccggtcaaggaacggttcatcggagggatcagccatctgtgcaccgttctctatttaatccgcctgcatctcgataaacgaacgcccgggctggattcaggacagtccggaggaggaaaatcatgaccgcaaccgcttcgaaaccagccggaaaacgcttccgcagccgggcgttcgcctcttttggactcctctggtctttcctggcggccgccgtttccgggatcgtcatgtatttccgtccggaaggaagcgtggccgcctggagcggctggtccgttctcggtctcgataaaaagagctgggaaggggtgcatacgctgatcgtcgtcgccttgatggcgttcgccgtcctgcatgtcatcctgaattggagagctctttggggctatctccgccggagggcttcggctctttccggggcgaaaaccgaatgcctggccgcgacgctcatcgtcgtcgtcctgacggccggggcggtcctccggtggaagccgctgtggaggctgatggacgcccgggcggcgatcaagcagggcgccctggccgtcacggttccccccccgtcggccgaggccgccgggatgagtctggccgagctttgccggagcgtccccgtgtccgtggaggacgccatggaacgcctggcccgggccggttggcgggtcgacgatccgtcccggagcttggaggatctggccgcatccttcggcgcctctcccgagcgtctttaccgcgcgctggcggggcggtgattcgtccggccggcggccgttccttttccttggtgtccgccggcccgggaatcacgtcccggtatcctcaggagggacgcggctcctcgttgtcctcctcgaccggaagaaccggttcctcttcttcctcgcgcggacgacgcgccagaatttcgtcgatcgtccggagaagatcgagcggcttgagaggcttggagatatagccgtccatccccgcctccaagcatttctcccggtccccgaccatggcgtgggcggtcatggcgacgatcggctggtgggccttcgtggcgacctcccgccgccggatttcccgggtggcctggaagccgtccatcatcggcatctggacatccatcaggatgagatcgaacgggcccttctccagggcgtccagcacctcctcgccgttttcgacgaccgtcacccggtggcctcggttttcaaggattttgacggccagcttttgattgatgatgttgtcctcggccaggaggacggaataacgggaacggttctgggcgatggagtggcgggtgatcaaccgggcttggccggcgggagcctccttgtcgcccagcgacatcatcaccgcgtcgaggagaagcgactgcttgaccggttttgttaaatatgcggccaggccgagatcccggcagcggctggaatcgccccggaatcccgaggagctcagcagcatgatgagcatgtccttgtaatggggctcttccttgatccgggcggccaggtcgaagccgtccatctcgggcatgttcgcgtcggtcagcatcaagcggaacgggcgaccctcgaggcgggcctgctggagcgccaggagggcggcctgggcgccgtcgacggtcaccggcctcatcccccagtgggacagcatttcgtggaggatcctccggttcgtggcgttgtcgtccacgacgaggacgggcagatccttcaggtccgaaagacggagcggcgtgaccgccttcccttcctcgtgatgaaggccgaaaggaacggtgaagaagaacgtgctgccccggccgatctcgctttcgacctcgagctttcccttcatcagggcgacgagctgggtggaaatcgccaagcccagcccggtcccgccgaacattcgggtggtggtcgtgtccgcttgggagaaggcctcgaaaatgaggcgctgcttgtcgggcgggattccgatgccggtgtccttgacctggacgcggagccagacttgatcatcggcccgccgggccgcgtcgatggaaacgacgacttcgccctcgttcgtgaacttgatggcgttgctcaagaggttggtcaggatctgccggaaccggcccggatcgccgatcagcccgtcggggacggtgcccgggatcgaataggccagctcgaggctcttccgttcggccaggagggcgacgccggtcacggccgcgtggaccgtgtcccggaggtggaaagggattttctccatctcgatcttttgggcctcgattttcgagaagtcgagaatgtcgttgatgatcgtcatgagggaatcggccgatgccttgaccgcttccatgtactcgcgctggtcgggggagagatcggtttcgagagccagctcggtcatgccgaaaatgccgttcatcggcgttcggatctcgtgactcatgttggccaggaactcgcttttggcccggttggcctcgcgggcttcgccctcggcctttttcaattcggccgtccgttcctggactttctcctccagctcgatcgtccgacggtgaatgttccggatgcgcttgcggaccgccccatagatcgccaaacccgccagcaggacggccagcgcttgaatccagcggatcatatagaacggcggaatgacccggagatggaccgccgtcccctcttcgttccaaacgccgtcgttgttggaggctttcacccggaagacgtaacggccgggatcgagattcatatagctcacgaaccggcggccctggacttcctgccagccggtgtcgaggccctccatgatgtaggcgtaacggttcttttcaggcgcgacgtaatgaagggcggcgaactcgaaggtgatgacccggtcgcggaaccggaggtcgatatcggtcgtttcagtgatcgatttatcgaggaggatccggccgttcacctcgccgccgacggggaccggcttgttgaagacctcgaaattggtgatgacgacctcgggccggaaaggattgtccttgaggttggccgggaagaaggcgctgagcccgctggttccgccgaagaacatttctcccgatttcgcccggtacctcgctccgccgttgaactcattgctttggagtccgtcggagatgtcgtatgttttcagagccctcgtttgggggttccatcgggccaagccccggttgctggaaacccagaccgagtcctcctcgtcgacgaggacgccgtagatcgcgttgttcggaagaccgttcttctcctcggtgtagcactcgaacgtcccgtcggccggattgaagagattcaagccggccgtcgtcccgatccacagccgtccccgggaatcctcggccatgttggggatgaaatcgccgcagagggtggccgaggccttggccgggtcgtgccgccagacggcgaagccgccggtttcccggttgaagcggttcaacccgccgccgaacgtcccgacccacagggttccggcgtgatcgaggtgaagggagcggacctggttgtggcttaagcttgccgggtcgccgggatcgttccggtagcggataaacctccgggcgcggaggtcgagcaggcacaagccgccgccgtccgtcccgacccaaagccgatccggaccgtcgacggccagacaccggacgtcgttatagctgaggctttgcggatcgcccggatcgtgaacgtaatgccggaacgtcttggtccgcgggtcataggaattcaatccgccgccgtaggtaccgatccaaagggttcccgaatcgtcgacggcgagggcgtagacgagctcggaattgagcgagttgtcgacgccctcgacgcggcggagatgggtgtattcgcccgtggcccggtcgatggcgtccacgccccggtcctggagcccgacatacagaacgccgccgtcggggctttcggcgatggcccggacgtaacccgatcccaggctccggggattgccgcgccggggctggtacagggcgaagcgggaattttccgcggccagcttgtcgatgccgcggccgcgggttcccacccaaaggacgcccgtccggtcctcgaataagctgtagacgtcgtcgaaggccaggctcttgggatccgtcggatcgttgcggagaacgaagaaatcgtcggccgcctcatcgtacaggttgaggccgttctgggtcgcgacccagagccgtttcaggcggtcgcggaagacggctgtcacgtaattatcgctcaagctccggggatcccgggtggaattgaaataacgggagaaacgcccggtctccggatcgaaccggttgaggccgttggccgttcccacccagagcatcccgttgcagtcctggtagagggccaggacgcggttgtggctcaagctgtgggggttgcccggatcatggttgaagcggacggattcgccggagcgcggattgaagcggttcaatccgtcggccgtgcccacccacaagtaattcgcggcgtcgcggcagagggagaggatttcgtcatggctgagagttttgggttcggcccttcggctgaggaaggcccggaattcgccggacgccggatcgaaggaattcaatcctcccccggctgttccgatccagaggattccgtcggcgtcctcggcgagggccgtgatgtagtcgtggctcagactccgcggattggccggatgcggatgaaactgggtgaagtcgtcgcggtcccggtcataccggttcaggcccctcatcgtcccgacccacagcgtcttcttggagtccaggaatagagtgttgatgaggctgtcggagagaccgttcggccccgccgtcggacgatagatcttaaagccgtacccatcgtagcggtttaacccatcctccgtcccgatccagagaaacccccgttcgtcctggaccatggccatggccgagccttgggacaagccgttgaaaatcgtcaagtggccgaactgaaaatcaccgggccggcccacggcgccggacgccgccgtagcggcgaggcagagcaaaataggcccgagcgccaaggcgcggaatgattttttcatggcgttctccggacgggaatgagatcggacgaggttttttctcctttagaaaattcactttatccgcttcggccggttctgtcaaacaccccctttactttcttcacgagatttgctagattggcacctaggattttcctcttatccaattcctagaaccttctgtcgggccgaagtgtcttgaagactcgatttcggccgtccggaccgccggggacggaacatcgatcaacgtccttcccccgaggagggaggacgaggagcggtcatgagctatcaaaccgggatatgcaatttctgcggaacaggatgcggccacatgctccaggtggaggaagggacgatccgcggggtgttcccctcgtcctcccatcccgtcgggcggggccggctgtgcggccggggctggcacatccacgagcttctcaacaccgaggagaggattccccgccctcttgtccgcaaaggcggagggctgactcccgtttcttgggatgaggcgctcgacgtcgccgccgcccgcctgggggcgttttcgggagaggagatcggcttctgggcttcgccccgatcctccaacgaggacgcctacgccctggtccggctggcccgcggggtcttccgctcggccaacatcagcgtcttgtccgacgtctggtatccgacgacggccgaagttttaagggaaggaaccggccggccgggcgccctgggttcgatcgccgacattcggaaggcggacttcatcttcgtcgtcggcaccgacctgacccggcagaatccgatcatcgccagcgacgttcatttcgccgcccgcgggggagcggacgtcgtcacgctcagcacgcgcctcacccagatggccaagctcagcgggacgcacctgcagaacaagccgggaacgaaaaacatcgtcatggccgccatggccaaggccctcctcgaagaccatccgccggattcggcgtcgggagcgccggcgggctttgatggattccgcaaatccctggagggtctcgaatccgccggcctcgaggcccggaccggccttccgttcgacaagatccgggacgtcgcccgccgcctggcttccgcccggagggccgtcatcatcttttcgaccgggatcaccggattgacccgggaaaccacggccctcattttcaacctgttcttggccgccggaaaggccggccgggagggatgcgcgatccttcccgtgaccggcgtttccaacctggccggggtcaacgacatgggcgccgccccggacgttctgccgggctggcgtcggcttccggacgaggccgcggcctcgtccttcgcccggagctgggggaaggacgtcaacgccgggcgcggccgttcggtcgaaagcctcctggccgacgcttcctccggactcaaggccctggtggtcgtcgaccatgatcccgagatcgagcttctggccggccggatcaagtcgctcgagttcgttctctacctcggagcatacgccaacccgttcaaggaaacggcccatgtcgtcctcccgacgacgacctacgccgagacggacggaacgtacaccaacacggagcggagaatccagctcaaccgccgcaagattgagccccggttcgaggcccgcccgccctggcggatttacgccgatttggcggcccggcggggacaggcctggccctaccggtccgcggccgacgtccaggaggagatcacccggatgattccggaatatcacggggcggcccacccggccctggaatcccggttcggcggatggcagtggccgggcggatccggaccggaccaaagccgccttcgcttcgtccccctcaacggcgccttttccgccgccgccgagccggccccggccgaattccccttccgcctgatggccggccggtcttatttctattggcacttgaacaacatcatgaaaaacaccttcatcccccggcgggaatacaacgccctccttcttctctatccccggggcttggtggaggttcatcccgacgacgcggccgccctgggccttcgggacaagcgtcccgtccgggtcgtctcggcccgcggatccatgactccgctggcccgggtctcggaagaagtgccgcccgggacggtgtacgcgccctatttcgtgggttcgatgatcccggattttctcgtgcctcacgcggacgcggtcgaatacggcgaggatgccgtcatccccgtccgcctggaaaaggtgtgaccatgtatcttctggccaaatccgacgttccccgctttctctccgccctgtccgcccgcttcgagatgtacggcccccaggtccatccggtttccggggacgtgtttttcgataaggcggccgattcctcgtcgatccggctggacgccccgatcccggccaattctcccaagttcgcggtcttcccccactgggagcgcatcctttcttatgcctatgaccgggaaaccaaggatctccggatcgttccggaggatctcgtccggccgaaggccctcgtcgggatccggtcctgcgacctgacgggtcttctttgcttcgaccgcttcttcctcggccaggaattcgtcgatgaattctaccgggcccaccggcggcggatgtttctcgtctccgtcacgtgcgtcacccccttcgcccagtgtttctgcgtctgcaccgacagcggtccggcggcccgcgagggatatgacgtcaacctgaccgacctcggcgaggcctacctgttcgaggccgggagcgacgccggccgcgagctggccgcgtccctgagcctgcctccggccgggccggacgccggccggcggcgggacgaggtcatcgaccgctcgatctctcggttcgaggcggcggcggtcgagaacaaggcttggatatcccgggcggtcaaccgcctgacgaccggtttcgtcaagaacgagacctgggaatacatcggccagcagtgcttcgagtgcggggcctgctcgttcgtctgtccgtcctgttcctgcttcaacatcgaggatgtcaaccgccgggacgggacgaccgagcggctccggacctgggattcctgctcgttcgagggctacgcccggatggccggggagcacaacccccgccggcccgtcgaggaccggcggaacaagagattcttctgcaagctttcgttttctcaatcgaaaaaatacctccggccgggctgtgtcggctgcggccgctgcgtccgggtctgccccggcgacatcgggatggccaatgtcgtcaccgcgatccggcgcgagatcacggggaagtaagccatggacaagagaaaaaacgccgccgcggtcgccgttccggttccggccgtcttgacggagatccgggacgagatcgaggacgtcaaaaccttctatttccgcttcgaggacccggagctcgagcgctccttttccatccgttcgggccagttcgtgatgtgcaccgtgttcggggccggcgaattcgccgtttccctgccctggagcccggagaaggaccgccgtcatctttccgtccggaacgtcggcaaggtcacctccgcccttcacgccctgggcgtcggggacaagatcggcctccgcggcccgttcggcaacggctttccgttcgaggagatggcgggccggaacctcatctatgtggccggcggcatcggcctgatcccgctccggtcctcgatctttcatgccctcctccaccgggagaagttcggccggatcatccttctctacggcgccaagtcgtcgaaagagctgatgtaccgtccgctcatcgacgaatggcggaggacggagggattcgagacgtatgtcacgatcgaccgggaggagcccggctggacgggcgaggtcgggttcgtccacaccctgattgaaaaagccaaggtgccggtggacggcacgacggccttcgtctgcggacctccggtcatgttcaacgccgtgatcggggagctgtcccgccgcggcctcaaggacgaatgcatcatctcgacgctggagcgccacatgaaatgcgggatcggcaagtgccagcattgcgcgatcggccggaccctggtctgcaccgacggcccggtctatacgtatcggcaaatcaaaaccctgggggagacgatctgatgtccacgctcagcaccccgatttctccggctctttgggccgccttcggccttctccttctcgccgccctggttgcccccctgttgtcccggcggcgtcgggcggccggaatcgttcacctggttctgaccgccgcggccgcggctgtcttcctggtcctcggcgccggggctgttttcggccgcggcatggccgaggcccggaccgtttccctcggcccgatcgcggttccgatcctcttggacggcctggccggcttgtttctcgtcatcgtgtccttcctggcggccatgagcgcgatctatgccgtgcggtacgcggaccgttttccggccgaacgccgcctggacggattttacgccgccctgcccctgttcgtcctggggatggccggcctggtcgtcgtcaacgacctctcggccggattcaccatcgcctggcaggtcatggccgtcgcgtcctttttcctgatccgtttcgagaaaaacgcggcctccgtccgggccgccggcaagtttctcgttctgatggaagccgcctggttcctggtgatcgccggaggcctcgcggccggcggaagcttgggggaatccctccaggctctcggccaaaaagtccaggcgatggacggagccggctttgtcatcgttatgaccctgttcgttctgggctttggattcctggcgggcgtctttcccctcggccggatctggctgcccgacgcccaggcggccgctccggcgccggccaacgccttgttgtcgggggcgatgctcaagatcggcgtcttcggcctgttccgggtgtttttctgcctggctccgtccgcggccgcgttcaatccccgcttctggggccccgccctggccgcgatcggcgtcttgaccctgtttgtcgggacgctccagtcggtcaagcagagcgacgtcaagcggctgctggccttcagctcgatcggccaagtcggctacatcgtcctggccctgggcgtgtctctctgggcctcgaccgcctccgacccggccctccgggccctggccgcggtcgcccttctcggcgctctcttccatgccgtcaaccacgccgccgtcaagggcctcctcttcctgatatccggcaacctgcattacgcggccgggacgaaggacctgaacaagctcggcggcctgatcacgctcatgcccgcgagcgccgtcatcgccgcgatcgcctcgctgtcgatttccgggatgccgcccaccagcggcttcgcttccaaggaaacgatcatctcggccgcccttctctccggcgcggtttcccccgttctcgtcctgttcggaatcatcgccctgttcaccagcgccgtcaccctggcctgctacgtcaagtttttcggcctggctttcaccgcctcgggggcggaggaaacggcccggaaacaaatccgcgaggtcccgcttccgatgctgctgccggaaatcatcctgggaatcctggtgattctccagggcctggccccgtccttgttcctgggcggggtgtcgtcggccgcggagcgggcggccggcctggcggccgtcccgggtatcggcgaggccgccgccgggcatttcagcgcgctgacgccccttcttatcctggggctgcttgtcgtcgcgatcctggcggccgcgctcctgcgccgctcggcgggatcgaagacgcgggccgtccccacctggctgtgcggctaccagcagctcgacgggaagaaccggtacgtcgaccgcgggatgttcgccgccctgaaacatttcttccgctggaccggcggaggtgagtcatgactccagaaaaaatcttcgaagttctcaaggcggaattcggcggcgccgtcggcggatcgagcccggccgcgcccggccgcctgtttatcgacatcgacccgtcccggctccgggacgcggccaaccggctcgtcggagccggcggccgctaccaggtcggggtcggcaccgacgaccgtcatcggaacgggacgttgggcctgatccatttcttcgccttcgacggcgaccatttcaccgtcgggctgcggacggccgcgccggccgatcatccggacttcgactcgatcactccggacattccggccgccggctggtcggagcgggaatgccgcgatcttttgggaatgaacttcccgggccacccgaagccgaaaaagctcgttacggccgacgactggccggacgggatttaccctctccggcgggaggttccgtacaacctcatccctcccgcggccgaggacgtcgcctaccagctcgacgaggcgccgcccgggacgacgatcattccggtcggcccgttccacgcgaccctccacgagccggcccatttcgccgtctatgtcgacggcgagacgatcaagcattgcgattaccgcggcttcatggcccaccggggcatcgagaagctgtgccagacgcaggtcagctacaacgaagtccccttcatcgccgagcggatctgcggcatctgcggctccgtccattccgtcgcctattgccaggccgtggaaatggccgccggcttggcgatcagccgccgggcggaattcatccgggtcgtctgcctggagcttgagcgcctccactcccacctgttgctcatcggcgtggccggccatctcatcggttacgacaccgtcttcatgcacgcctggcggatccgggagcaggtcatgtggctggccgagaaaatcaccggcaaccgcaagacgtacggcatggtgatcgtcggcggcgtgcgccgggacatcacccccgagatcaagacggagacgctggccatcctcaagagcctcgaggccgagctggtctccttcgaaaaggcgatcgtcggggatacgctgatccaccggagaacgaaaggcgtcgggcacgttccgaaggaggaagcggttctctggagccttttggggccgacggcccggggccgcggcgtcgacatcgacgcccggcgcgatcatccgtatgccgcttacgacgagctgtcgttcgccgtcccggtcgttccggacggcgacgtgtggggcacgatcgtcgtccgcctggccgagcttttcgaatccatcaagctcatccgccaggccctcgagcggatgcccgacggccccgtcctgaccgaggcggccgaagcccttcccgccctccggcccggctggtcgatggtcgaggcgccgcggggcgaatcctttcattacgtcctgacgggggaggagaaccggccggaacggtggcgggtccgggccccgacgtacaccaacctccagggcattccccgcatgctccaggacaaccagttcgccgatttcccgatcatcctcgggagcatcgacccgtgcttctcctgcaccgaccgggtcgcggtcgtcgaccgccgctcgggacgcagacgcgtgtggagcaaaaaagaaatggaccgtctttcccggagtcgctcatgagctacgtcatcccgttcctcaacgtgattcttttcctcctgctcgcgccgctgttcgacggcgttctccggaagctcacggccaaggtccagtcgcggcagggccctccggtcatccagccctatttcgacctgttcaagcttctgggcaaggaacgcctggacgccgccggaacctggccgttccggctggcccccgttctggccttcgccgcgaccctggcggtcgtggccgtgatccccttcggcggacgggcgggcgtcttggccggatggatggacgcgaccgtcgtcatttacctcctgaccctcgccggcgcctcggtcctgttcggtgccctggccggccgcaacaccttcggcctgatcggggccagccgggagatgatcacgatgatcatggtcgagccggtcctggccatgaccctgatcctcggggcggtgaaaatcaagagcctgagcctggccgcggccgcgccggcggcggccggagcggccttcggactttcgtccgccctgatgctggtcgtctacctgctcgctctgcaggcgttcgtcgcccgccagccgttcgacatcgccgaggccgaggtggagctgctggaaggtccgttcatcgaatactccggccctcacctggcccttttcaaatatgcgataatgatcaagcggatgttttacgcctggctgttcgtctcggtgttcctgccgttcctgcggaccggcgtctacgccctcgacatcctcgtccagctcctggccatggccgtcgtcttcgtcctcatcgccctggtcggggcgacgaatccccggctccggatcgaccaggccgtccgctattatgccgtcctgatcgtggccgccctcgcggccgtcggtttaggagtgctcggacggtgaaagaagaggaagaatcatgtggctgaccagcaagatcaagcaaatcgtcctggccctgagtcccgggacggtgaccctgaaataccccttcgtcaagaaacccgtcccccggggattccgcggccagccggtctgggatcacacgaagtgcatcggctgcggcgggtgcgccaaccactgtccggcccggacgatcctcctgcgggacctctgccaggaaatccgcgtccttctctatgacggatcgcggtgcacctactgcggacggtgcgccgatctctgcccggaaaaggcgatcgtgatgtcgccggagttcgagctggccgccggccggcgggaggatgtcagccagacgatcgagctgttcatgctgacctgcaaccggtgcgggcggtgcttcgacatggaaatcaagaatgcgatcgacaagctggaccttcggggctaccgctatgacagcctcgaggcccggaccgtcctccggaggacgacggaccggatggccccggaggcgctggccgagaccgaggcgtaccggcgccctgaaaagatcggaggtttatgatggcggctctctttgcccgggcggcggcgaaagcctttcccaagtccctgtggctctatcactgcaacagcggcgcgtgcaacggctgcgacatcgagatcctcaacgtcctcacgccgtattacgacgtcgagcggttcgggatcaagctcgtcggctcgccccgccacgccgacgttatgctcctgtccggggcggtgacccggccgacccttcccctggtcaagcgggcgtatgaggcgattcccgcccccaagctcgtcttcggggtcgggtcgtgcgcggccggcggcggctgctggttcgacacgtacaacgtcaccggcggcggggcgacggccgtccccgtcgattatctcatccccggatgcccgccccgcccggaggcgatcatctacggcgtggccctcgccctgggcctcgtcccgcagaaatccgcccccgtggagctcaaacaggtggaattcccgatcgacgcgtacctccggaacaaggcttgggaggagcgcaacgtcatctacaagctgatcaaggattaaggggggatcatggccaagaaaatcctcatcgtcgacgacgacaaggacctcgtcgagagcctctcccaggtcctccaatcccgaggctatgagacggccgcggcctacagcgcggccgaggggctgaagaccctgctggccgaaaagccggacttggtcatcctggacgtgatgatggaaacggacacggccggcttcgaggcggccgggcagatccggagcgcgcggccgttctcccgctaccgcgacgtccggaccgtccccctcatcatcctgacggccatcggccaagtcaccaactcccggttctccctcgatcccggagacagcttcctgcccggcgtcaacgcctttctgaccaagccggtcgacctcgacgagctcgtccagaaaatcgcggccctcctcgggtgatccgccggccatgcgccgccgcttgttcccttccaatatccggttcaagctggtggtcagcctcctgctgatcgtggccgtgacgggctcgctctccctggtcatcggggtcaacatcatcgacaagaacctcgtccgcgaggcgaccgagtcggtccgcaactccctggccgcgacgaccgagctttacaacgaggaggtcgagaagcggtcccggatcgtccagtacgtggccaagacctccgagatcgtccaagcgacgatgaccggcgaccgggcctatctccgggaggccttgggccggatcaagacggagttcggcttcgatatcgtcaacgtcctcaatcccgacgggaccgttctcgtccgggccaacaatttcgacgcctggggcgacagcgtcgcccattaccggcacatccaatgggttctccgcaaccggaagccggccgccgggacgggcattctcggccccgagaacatccgcaacgaaggccgcaacctggcggagcggacccccatcaaggccgtcccgacgccgctgtcgcgccggcacgagtcgagcatcgaagaccgggccctggtcatgaaggccgcttccccgatcatggagaacggccgaatggtcggccttctgtacgcggccgtcctgctcaacaacaacgacagcttcatcgaccggttccgccgcctcctcttcaaggaggagcggaaccggggccgcgaagtcggatcctcgacgattttcctcgaggatgtccgggtggccacgacggtcatggacagcgcggggaagcgggccatcggcacgctagtctcggacgaggtcttccggaacgtcttcgaggagggccggacctggatcggcccggccttcgtcgtcgacagctggtacatttcggggtatgcccccctgaaggatatcgacggccggccggtgggcatgctctatgccggcgtcctcaaggacaagtacgacgacgttctccggacgaccgccgtcctttatcttttggtcatcggcctgaccaccctcatcgcgatcgtcctctcgatctacttggtcggcctctggacgcgcccggtccgccggatcatggccgccacccaggacatcgccgacggcaactatcaccggatcgagacgctcccgaaggacgacgacgacacgcggaaaatcgcccagggattcaacgtgatggcctcggccatcgaggagcgcgaccgcgagctccaggccatggccgaacggacgattctcaaatcggagaagctggcctcgctcgggcggctggcctcaggcatcgcccatgagatcaacaatcccctgaccggcgtgctcacgtacagcagcctccttctcgaggatctccaggggacggaatacgccaaggacctggaggtcatccgcgacgagacgctgcgctgccggaaaatcgtccggggaatcctcgatttcgcccgggagaatgttccggagaaaatcctggccgatatcaacgccgtcctggacaatgccctggctattttggagcggaacgttcatttccaggatatcgagatcgtccgggaatacgacccggacctgccccgcatccccgtcgatgtccaccagttcacgcaggtgatcagcaacctggccatgaacgcggccgacgccatgccgggaggcgggcggctgacgctgacgacctcgttcgaccgggagaagcgccggatcatcctccggatcgccgattccggcacgggaatccccccggaacaccaagtccggctgttcgagccgttcttcacgacgaaggataagggcaagggaacgggcctgggcctgcccgtcgtttacggcatcatccggcgccacaacgggacgatcgacgtcaagagcgccgtcggccggggcaccgagttcacgatcacgctgcccgccgattgacgggtgcaaaggataggattatggcgggaaaactgcttttcatcgacgacgaggagattgtcctgcggagctgccggaggattttcgccaaggaggatttccagatcgacacggccctgtccggcgaggaaggcctggccaaggcccgggagggcgactacgacgtggtcgtcaccgacctgaagatgccgggtatcggggggatggaagttctccggaccctccggaaggagcggccggagatcatcgtcgtcatcttcaccggctacgccaacgtggagacggcccgggaggctttgaaaaacggggccttcgactatattcccaagccgttcacccccgacgagatcaaggaggtcgtccgcaacgccgtcaaagcccgggccggaaacgccgaggcgaaaatgatcgacctcttggccatcgtctcccatgagctcaaaagccccctggccaccgtccagacgacggccgagacgctctatcgcgggtatttcggcaagctcgagccggcccagcaaaaaatcgtcgaaaccatcctccgtaattgcgcctacctggaggacgtcatccggtcctacatcgacctgtccaagatggagatcgacgacctggcctccttccagaaggagatgcggatcggggccgaggccgtggccgaaacgacggccgtgcccgagatcaaggacaatctccgccggatgccgatcgtcgtcgaggtgaaagaggatccgcccgtcctgggcgacccccaactgctcaagatcgtcgtccgcaacctggtcaacaacgcgatcaaatacggccgggaagggacgcctgtccaggtgaccttggagcggaagggcggagaggcggtcttgacggtccgcaacgagggcgtcgggatctcccccgaggacatccagaaccggctcttcaagaaattcgagcggctgaaacagaagggcaccgagggcgtcaagggctcgggccttggcctctacatctgcaagaagatcgtcgacaagcacggcggccggatctgggccgagggcgaacagggatcctggatcgccttccatgtcgccctgccgacggccgccgccggcggtccgaatcaggccgggacggaggcatgagcggagaggatggcccgcggatcatccggaagatcgctgtcgtccggaccgagtacctcagcgcccggggcatccacgccaaccttgaatgccgcgtccgaggcggccggaacgttcctccggccggggccctctcgccggaaatcgactgcaccacggtctcgggcgagcgccttaccatccgcgtccgcgattacgacgtccggtttttggaccgggtcgcctccagcgaggccctcggccacctggacctcatcgtccgggcccggaggggagacatcgaagcggccgccgagctgcggcgccggacgaacgctctttatctccgcatcgcggcccggttcgccgagccgtccatcgtccaaaacgacctggtgatcccctataccgcggccggcgaatatccggcctcggtcatcagccagaaggggcggatcctgttcgacctgtcccggcgcggcctgtcgaccgcggatttctgcctgctttcgtccgcggcctatcatctacccccggaggagcgccggaaacatctccgggaagccgtccatgacctggagatcctgaccggccggaagctcgaaaatccggacgacccgctcctcatcgccgtccgctcggccctgcccgaatacttcccgggattcatgccgacgtacctgaacgtcggcctgactccggcggtattcaaagggcttccccgccgctacgggaaggaagccgccggcttgatccggctcaacaaccggaaaacgatcctcgaggccctcgatccggaggccttcgccccgatcgaaaaggagattcatccgtctctccatccggcccggacccgggagctgaccgaggccgtcgaggccttgatcgcccgccgcaacccggagctcctgacgtcggcggccgcccagctcgaattcttccaggagaaggcctacgcctattatgagacccacctggacgccctccggaatttcatggaccgggagatccattacccgtccctgatcctccagcggatggtctgcaccgtcatggacgaccaatcctatccgggcgttctctacagccgccacccccgccggggccagggcgtcttcgtccagttcgcccgaaaggtgttcggggaagacctgatgaccggccgccttcagcccgaggagcggacgttcttccaccgggaggaagcccgggaggaatttccggccatctatcatttctgggatcgtctcaatcagctggaggagatcttccggggaccggtcatcgtcgagttcacgggcgtgcacgggacgttcacgactctccaggtcaacgcggccgagctggccggggccgggatggtgacggcggtgatggatatgcaccgggccggccggatcggggccggccgagtccgggagctcatcaagccctaccatatccggcagatcgagtccgacgccatcgaaccgaaatccctggaagtcctgccccggctggcccaggggatgtcggtcctgccccgggcggccgtctcgggccggctctatttctcggcggaccgcgtccgccaggccaaggccgaacggcctcgggaaaacgtcatcctggccaaggagcgcttcaccccccaggacgcggtggatctgccggtcgtcagcgggatttgcagcctgagcccggcggcgatccatgtcgtgaccgccgctcaaaacctgggcattccctcgcttttgagcctcgaaagcgacggcgtccggattgatccggacaagcgggagatgatcaaccgggacggccgggtcgtccgggaaggcgactgggtcacgatttccagccgctggcgccgcctgttcctcggaaaagccgtctacgccccggcccgcctgctgcgcttcatggccggggagcacgtcgacctgacgcccgccgagcggccccggttcgagcagctggcccgggactacgcggcgtaccgggatctcatggaaaaattcggcgaggccgagttcggcagcctccaggacctgggccacgctcttcgttacgggaggctccgggacagcgccaaggccggggagttcatcaaccgcagcttcgacctcaacgagggccgggtgatcgatcatctgttcgaggcgaccctcgggacgcacctcatcaacctggcggctttcgagcggctgacgccggacaggcagatccgcctgcttcgagccgccctcgccctcggccgggagcgggggattttcgggtacgaggccggcgccttcgtcatcgggggattcgtccggccggaatggccgggatcgttctggcggcagttcgagccggcggatatcgtcgggctgatcaacgagtgggttctccaccagaagtacctcgtcctgatggacgcggtcgacgagcgccgcctgcggcggattcgggaggaaatcatcaaccacggcctgccccgggtcctggtcacgaccggattcgtccggggctttatgtccctgaagcttgccggaatcaggcttccggcggaaaacgaggatctcgaccctcaaacgtccgaggtcctcgcctgtctcggccggccgtacggcgactttttcgattacgccgacgagcggagtctcggcgtcctccggcggctttgcgaaaaggagagcgtcccgctcccggggccggaggaccgctgagaaagaaagaccgccgggtcctcgcgcttcgggaggcgtccggggcggtgttcatcgtcgcgaccggtccgatccttcccgtcgtcttcgaagcggcgggcggccggcgccggattattttgaatcggcgcgaatgctccgcggattcctccccccggggaatccgtccgccggccggggacaggctccgggcctatcggacggcttccgcgggcagaaccgccggcttcaggagccggtagatcggaacggtcgtcccgaccgtccccccgccccagctggaggacaggtgcttgtcgaggtagttccaagcgaccagcccgtctccgctttccggttccaacaggcaggcggccagcatgccgagaggctgggcggtggagatgacgagggttccctccgggaaggccgctttccccggatggtactcgcccttgaccgcgttcagccggtggccctggtagagccggtcgggcgccttgatctcgctgatcttgaacgtctcgacgtccgcttcgaccggggcggtcaaccgctcgacggccaggccgtggcggagcagcaggtcgaggacggcgggctcggtcaccgggacgaggtaggcggccgggaacggaaccgagcgggtggcgaagccgtcggcgtaatagggaaccgtccggacatgaagcttgcccgtggaccggcgccggggccaggcgccctcggtcccgatgacttcggtttcgtaggcgtagacggtgatgggattcttgaggggacggtaatcgtattccaagccgaacccatcgccagcggacgggttcattccccgccggacggacctggcgtcggccgccgcggccagggctttcatctcgtcgacatgggccgaggcgtattcgaggagggactcgagataatgataattgccccagacccggtccttgtattcggcgtagacgttgttctcgatcaggatggcgaagcggttgcgcagggcgaaataattggtcgagaagcggggctcgaattccatcgccgtccagcccttgtccggatccttatcgtcgcggaaatagccgtagccgcacgtcaggacgccgtgcttgtcctcgttgattttctcgacggccggcatcatggcctcgctcatataagttcggatctcgcggtcgacgttggggttggcgctccagccgtaggtgaccacctcctggtggaaggagccgttggtcgtgtggcagtcgacgaagatcaggggatcccagcgcaggtacacgttgcggacgacggccgagatctccgggctctccagcttcatcccgtcgcggttgaggtcgaggttccagccgttggtccggagaccgacgccctcggccggcccgggctggtaggagcggttgcgggggtcgattttctcgttgccgtcggcgttgaggttggggacgatgaccagaacgattttttccagccagggacgcttcgccgcggcggcgatgtcccgggccagcatcaggcaggcctccttgccctcgacctcgccggcgtggatgttggcctggaagtagacgacggcccggccgtcgcggcgcagctgttccggcgaagcgaccggcgggtcggccacgatgagggcggggatgtcgaagccgccggccgtccggccgatggattcaatccggacgagcgggctgcgtttctgcagctcgtcgatgaaggcccggacgtcggcgtggcgcgaggtggccttgaagtccgtcgcctcggccttggtcaggagaggcggatcggcttggaggcgcgtcgcgatcggcccgaggcagagaaagccgagggtcagaagagcggcggccgccggccggaaggaacgcgggagaatcgtggtcatggcctctatccttaaaagaatttcgtcgaaggcttaaaataggccatccggtcaagtctgtcaaacgcgggaatgaatccccatccccgaggttctcaccggtgagcggcgggagattccccgattcccgggatcccgcgccgggtgaaggagcttcgataggtattccggcgcccgggcgggtggaggccgcgggaacggatccctcgacgcggccggccggctcagcggaaatcccggccgaggatgaggagagaggattggccggaagtgagggcggcataatattcccggagcgcctcctcgcgggccgcgggcaggcgaagccggatcgtgacatgctcgccgtacgtctttccggtgacctcggcgtcctcgccggccaggaagctttcgaacgtgccgagcaggggataggggacttccgcctccgcctcgaccatccaacgaagatccttgagccccgatttttccagcacccgcttggccgcgtcgccgtaagcccggacgaggccgccggcccccagcttgacgccgccgaaatagcgggtgacgacgagcaggacgttggtgacgccgttctttttcaggacctcgagaatgggcgggccggccgtgccctggggctcgccgtcgtcatggtagcgggcttgttccccgtcccggccgaggcggtaggcccagcagtggtgggtggctccgggctcggacgcgcggagcgttttgaccgcggccagggcttcgtccggcgtcgagcggatgaagctccggccgatgaaccgcgaccgcttgacctcggtcttgatttccgcctcgtcgacgatcgttcgcatgccggtctcaacgtagcaaaagaaatcaggagacacaagccccctctcctcgatttcgggcgaagaggtctttccgtgtctcccgatttcacatcccgcggacggccgatcccgccggctcgcccgtttcccgattttaaaacaaaaaaggaaaagaccgatgcggaaaatccgcggatctggcccggattcggcggaaatcgggagtcgtcggcggaccggggaatcctcgaggggacggatcctcccttgtccgcgccggggcgaagggcgataacccgaagcgggtaaaaacgtatataataaatattcacgcctatttgctatatcgaggaggaaccgatgctcgcgtcaaaaccccggttgatcggcggaccgcggctggcggccgccgtcttagccctgaccctggccttggccccggccctgtccttcggacagctggccgcctcggccgacattcccttccacaagacggtcctggacaacggcctgaccgtcatcgtccacgaggatcacaaaaccccgatcgtggccttcaacgtttggtaccatgtcggctcgaaaaacgagaaacccggaaaaaccggattcgcccatcttttcgagcacttgatgttcaacggctcggagaaccacaacgaggactatttccccttgatggagaagatcggggcgaccgacctcaacgggacgaccagcgaggaccggacgaactattttgagaacgtccccgcgacggctctcgaggtcgccctttgggccgaatcggaccggatgggccacctcctgggcgcggtcacccaagccaagctcgacgagcagcgcggcgtcgtccagaacgagaagcgccagtacgagaacgagccctacgccctggccgacgaactgatcgcccaggcttgtttccccaaagggcatccctacagctggacggtcatcggctcgatggaggatttgtcggcggcctcgctttccgatgtccacgaatggttcaagacgtactacggcccgtccaacgccgtggtggtcatcgccggggacatcaccccggacgaggcggtcgccaaggtcaaggcgtatttcggcgacatcccgcccggcccgccgctcgccctgcccggacggaacatcgccaagcggaccggtgagcagcggcagaccgcccaggaccgcgtcccccaagcccggatctacaaaatctggaacattccgccctggggcgaccgggacggcctcttcctggacctggccgcttcgatcctggccgacggcaaatcgtcccggctctataaccgcctcgtctacaccgaccaaatcgccacccaggtctcggcctacgccgagacgcgcgaaatcgccggcctcttccggatcgaagcgatggtcaagcccggcgtcgagccggccgcggtcgaaaaggcgatcgacgaggagctggcccgcttcctcaaggacggcccgacggccgacgagctgatccgggtcaaggcccagaccatcggcggtgtcatccgggggatggagcggatcggcggcttcggcggcaagagcgacatcctggcgacctcccaggtgttcggcggaacgcccgacgcgttcaagaacaacctggctgtgtatgacgcggcgggcgcggccgacatcaagcgggcggcccaggcctggctctcagacggcgtatacgttctgacgattctgccctatcccgaaatgacggtcgtcccgtcctcgatcgatcgggcgaagatcccggcggccgggacgcctcccgacgcccggttccccaagctcgaacgggccgtcttgtccaacggcctccaggtcatcctggcccgccgggacgcgatcccggtggtgaacttcagcctccttttcgacgccggcacggcctcggatcaattcagccggccgggcacggcctccctggccttgaacatgctcgacgagggcacggccaagcggacgtcgctccagatcagcgatgacctggccaagctcggggcgaccctctacaccggttcgtccctggaccactcctcggtccggctttcggccctcaaggccaacctcgatccctcgcttgaaatcttcgctgacgtcgtcctttcgccctccttcccggagaaggaattcacccggctccagaagcagatgctggccggaatccagcaggaaaaggcccagccgatggccatggccattcgcgtcctgccgcgcctcctttacggcgagggacacgcctatggaacgccgctcaccggctcggggaccgaggcttccgtctcggcgatcaccctggccgacctcaaggccttccatgaaacctggtttaaacccaatcacgccgtcctgatcgtggtcggcgcggccggcatggatgaaatcaagccccggctcgaaaagctgttcgccggctggaagccgggcgacgtgccgcaaaagaacatcgggccggtcgccccgaggacggcgccggaaatctacttgatcgacaagcccggctcgccctcctcgatcgtcttcgccggccagctgatcctgcccaaggccaatcccgaggagatcgccatcgagacgatgaacgacatcctgggcgggaccttcacctcccgggtcaacatgaacctccgcgaggacaagcactggtcctacggcgccggaacggtgatcctggattccaagggtctccggccgcttatcggctacagcgcggtccaagccgacaagaccatggaatccatccgggagatggccaaggagttcggcgacctcatcgccgcccggcctccgacgcccgaggagctcgggcggacccgggacggcaaagtcctcggcctggccggccagtgggaaacgggggcggtcatcggcggactgatcgagaacatgatcgcgttcggcctgcccgacgattactacgagacatacggagcgaaggtcagggagctttcgctcgaccaggtcgcccgcgcggccaagaccgtcgttcagcctcaaagcatggtctggctcgtcgtcggcgacagggccaaggtcgagccggccctcaagaccctgggctatggagacgtgaaggtcctggacggcgacgggaacccggttaaatcacagtaacaaagtccgccggcttcggccggattggaacgaagtttggaaaaaggggcgatcctccccctcaagggggggatcgccccggcttatatcgtttcctcttcttgacggccttcttccggagatttttccgcggcttttgacactcttttccgttttcgacataatgaaagggaatttacatcaaaggattgtccttgcgccttccgtttcgaagtcacgtcccggtcgcgggcctggttttggttttagccgcggcggcggcgctgttccccggatgttcgaaggttcaggcgcccgaaaatgtcgttttcatcaccctcgacacgttccgggccgatcacctgggcgtcctttcgggaggccgggcggccacgcccgtcctggacggcttggccgcccggggcattctctacgagaacgcctggagcccgattccgatcacgctgcccgctcacaaatcaatcttttacgggcgccctccccacgtcctggagacgtacaacaacggccagatcaccgcctcccggcgcgacaccccttcctttgtccaggccttccggaagaagggttttgacacggccggattcgtctccttgggagtcctgacgcgcgaatacggaacggccgagggattcgaccattatgatgaccggtttccggccgaacgctggtacttgacggccgaggaggtcaaccgccgggtcatcccctggctggaggcccgcggcggcaagccgtttttcctctgggttcattattccgatccccacgatccctatgctcctccggacatgccggaggacctcgccctccggatcaacggccggccggcggccgcgctttgcctgaacgattatgcccggcatgccgtcgagctcgacctcaaggcgggggagaatgtcctcgtttttgaagtgcgcaatccgtttcaatcgaatccggaccgtccggcggcccgtttggacgagatccggctccgtcccggtccggagacagcgggcgtctcttgggagcccgggggacgctggatatcctttcccgggaaaacggcccgctttttcaaggacggggcgacgatcgttctgcgggcgccgtcggcccgcaaggtgacgatggaattcttcggacaattattcctcccgatcccggccacccggacgcagtacgcccgcgaggtcgaatatctggacgggaaaatcggcgagcttttagccgtgttagaccgtctcggccttcgcgacagcacggccgtcatcgccgtcggcgaccacggcgaagggctgggggaattcgccaacgaggccggcgaacctcactgcgggcatatcaagttcctcgagaaagtctatcttcacgttcccttgatcatcgcccttcccggcgaccgccgggccggaatccggcggaccgagccggtgaccctcttggacatcgcccccacgttccggacgctcttcggcctggacggactccgggacctgccgggccgcgatcttctctctcttcccgagggcgcgtcgatcccggtgttcgccgaaacctaccggccggaatccgatcggaaccgtttcgccctctatgacggtccttggcagatgatcctgaatcccgagctcggccggcaccggatgtacaacctgtcggataatcccgcggaaaccaaggacctttgggatacggaggccgtgccgccggccgtgaggatcgatttcgaaaaacggctcggcgacttcgcccgccgaatcctatccgaaaagacggacgcctcgatcgatcccaaggccgaggagatgctccggtcgctggggtatatcgggaactagctcatgccccgacgacgatcctctccggccgccgttgccgttctcgccgccgccttgatttcggcggcctgcgcgggaaacaacgggaaacccgaaaacgccgtcttcatcaccctcgacacgttccgggccgaccacttgagcgctctttcccggggacgggcggccacgcccgtcctggacgccctggccgcccggggcattctctacgagaacgcctggagcccgattccgatcacgctgcccgcccacaaatcgatctttttcgggcgccctccccacctcctctcgacgtataacaacggccagatcgtcgcctcccgccgcgaccacccgtccttcgtccaggccttccggaagaagggcttcgacacggcggctttcgtttcgctgggcgttttgacccgcgagttcggcacggccgagggatttgaacattatgaggatcaatttccggatgagcgctggtatctgacggccgaggaggtcaaccgccgggtcattccgtggctggaggcccgcggccaaaagccgtttttcctctgggttcattattccgacccgcacgacccctacgccccgccgggcatgccggacgacctcgccctgagcctcaacggccggaaggcgggttccttccggatcggcgactacgcctggaacaccgtcactctcgatcttcgggccggggaaaacatcctggcgttcgagaccatgaatccttaccagcccgatccctccaagttttcggcctggctcgacccgctcgaatttggcccggacgaggcgatgaaagacgttttctgggagcataccgagcgatggttcatcattcccgagacgggaacccgttttttaaggaacggggcgttcctcaccctccgctgtccgaccgcccgccgggtgacgatgcggttccggggccagctctatctgaccacgacggcggtcgaggagctgtaccggaaggaagtcgagtacctcgacgggaaagtcggggagctcttggccgccctggaccgtctcggcttgcgggatgaaacggccgtcctcgtcgccggggaccacggcgaagggctgggggagtaccggctcgaatccggggcgatccattacggccatatcaacttcctggaaaaagtctatctccatgtccccctgatcatctccgttcccggcggcccgggcaagggaacgcggcgggccgagccggtcactcttttggacatcgccccgacttttctggcgatgttcgagctggaggggatccggggccttcccggccggaacctcctggcgctgccggcgggggcgggcgcaccggtattcgccgcgacgtaccggccggagtccgatcgcaatcgtttcgcccttatcgaggcgccctggcatatgattttgtctcccgagcagaggatgcggaagatgtacgacatgtcgtccgatccgggggagcggaccgatatctgggaaacggcggccatgccgcgccgcgtcggcctcgatctcgagaaacggctcggcgacttcgcccgccgggccctcgccgggaagaaagacaggaccctcgacccgaaaaccgcggagatgctgaagtccctgggctatctcgggaattgaggcccggccggagcccctttccggcgggccctttcttgacttcgccgctggcctgggtataattccccttctctccgagtcgaagaggctaaagcgccgcgtccaagcctcgagaccaacgggcgccgccggaaacggccgcgccttccgtgcttgaaaaggaggatccatgaatccctttataaaatcatctttaaaaagtcttgccctggggacggtctgcgccctggctttcggactcctgacggcgcccgccttcctgcgcgcggacgaggaagcaacgacggcggccgaggaagatcaggcggccaaaatcaccgaggaaatccaggtcgtgggcaaggcccccaaggtccagcccgtttcgacggtgacgaccatcgccgcgtccctgattgagcagtacgcgccccgcgatctcagcgaggccgtgcagtacgccccgggcgtgaacatcacgaccggcagcaagcgcgaggcgacgctcaagctgcggggcatggactcgcgccggatcgtcctgctcatcgacggcattcccagctatgagccgtactacggatcgttcgatctcaagacggtttcggccgccgggctcgaatcgatccagatcaccaagggcccgtcctccgtcctgtacgggccgaacacgctggccggcatcgtcaacgtcatcacccggcgtcccggagacaatcccttcctggccgtccagggcagcctgggcgcccagaagacctacagcgccggcttcgacggcggcttccggtggaaccggttctcgctggtcggcgacgtctcttggcagaattcggacggcttcggttatccggacccggacaccggggaaagaaccgacttgatgaacacggattacgagcgcttcaatctcaacgccaaggcctactacgccccctcggacgattccgagatcatgatcaacggcggaatctaccaatcgaattacggcatgcccccgaccctgggtgtccagaaagcccggtactggtatttcaagaactgggaccggtacacgctgaacgccggaggcttcacctcgctcggcgagggcgccgttctccgcttccgggcgttttacgtgaactaccgcaacacgatggaccagttcaaggataaggaaatggccaagcggcagttcgagagcacgttcgacaactacgtttacggcgcgttcgccatgtccgaattcaagctcgcctcttggaacacgctgaaagccagcctgaattttcagagggacgtggcccggacccaggacgatatcggtctcccgttcgacgagtacgaccaggggacgttttccgcggccctggaagaccaggtctcgctcggcgacaagtggcaggtggtcggcggcctcagcttcgacctcatcgacaagtactccggcggaacgtattcccgggtcaatccgatgatcggcctgaaattcaccccggccgaaacgctggacctgcacctctcgcttgcgcggaagtcccgcttccccaacatgcggtcgatgtactcgccctccagcgggaacccggatcttctgagcgagacggggacgaacgtggagctcggattcacctgggatccgggcgtccgcctgtcgggcgcggccttcatgtacgagttcaagaacatgatcgattcgatcaccttgtccgacgggaagaagcgctactggaatgtcggcaaggcccacatcaacggatttgagctgcaggcgtcgaagtcgctcggctggctcgaggggacgctgaactacacctatatcgacgccgccaacgacacggacgaccggccgctggacgcgatgccggccagcaacttgaacttcgaccttacggtgttcccggccggcggcctgcggatcagtctcttcggcctggctgcttcgaaatccgattggtacgaattctcggcgaagaagaattacgagatccccgcgtatttcaacctcgacgcggtcctggcgtacgacttcggccggttcgagatattcgtcaaggcaaccaaccttttcgacgattacatctacaccgaacccattttcccctggcgggcccggttcttcgaattcggggtccgggtggatgtcttctgacctccccggtcagtgatgggggaacgcccggggcgcggttgcgccccgggcgtttttaattcagaacctgttaattcggaacctggttatccatttccgtattcataaaacgtccggttctcaaagatcgatcgcgttctgatcatcaagaaatcgtctcgaggccgttgccgcgaggaattgggccgttcgtctccgcggaaagaggaaaaaaccggaacggctttgcctcgatgttcatcgagagggttttgttctccttcctcttttgactcaccgtgtccgcacgtgttttttcagccgtggtccggcgttgaggatttccaggactgcgaaatacggaaatggttaaacaggcaccgatttaccgctgaaagaggaaaaaacggctgaaccggccgtgaaatatagtttttcccgccattcggctttctcccgctgtttgtgaagcggccgttccttgatgttcaagcgcgtgggctgtttccctttccttgtccactcccggcgcccgcgtgcgtttctccgccgcggccggccggcgcggatgtgcggggcagggaaatgaggaaatggttgaacaggcaccgatttcgaaacgggtcccgatcggccgccgaaatagagtttatcggtattgtgtcttcccgtttctcggataaaatagaagggagaaaggagaaaacggaaaatgtgcgatacgttcgtggcccggggagaagcggcggcgggaggggtgacgatcttcggaaaaaacagcgaccgcgagccgaacgaggcccaggcgctggaattccatccccgccggcgatgggaggaaggagcggagctccggctgacgtatctcgtgatcccccaggtccgggagacgcgggccgtcctgatctcacgtccgttctggatgtggggggcggaaatcggcgtcaatgaagacggcttggccatcggcaacgaggccgtctggacgaagatgccgctttccctcaagcccggtctcctcggcatggacatgctccgcctggctttggagcgggcctcgacggccgggcaggctctcgaactcatcgccggccttctccacgattacggccagggggggatctgcggctttcgcgaccggaagatgacctatcacaacagcttcatcatcgccgatcctggtgaagcctgggtgctggagacggccggcccgctgtgggcggcgcgcaaggtcgaaagggcggcgtccatcagcaacggcctgacgctcggcgaggagatcgaccggatgcatcccgatctcatcgccacggcccgggccaagggctggttgaagaaggggggggcgttccatttcgcccgttgctattccgactggttctataccaaattctccgcctgccgccggcgccgggcgaggtccttggccttggtcgagggacgacgcggatcgatggacgcggccgcggccatggccgttttacgcgatcatgacggagatgattaccggccggacggccatttccttgggaaccgcgtctgcgcccacgcggccaacggattgacccgcaaggcgacccagacgacggccgccctggccgcttgcctggcgagggaaccgaagcggcgggcggtgtgggcgacgggaacggccgctccttgcacgtcgcttttcaaaccggtttggctcggcgatgggatgctgccggatttgggccccgggttgtccggaacgttcgacgcgggaacgctctggtggcgccacgaacgcttccaccggacggtgctccgcgatttcagccgccggctggccgttttccgcggagagcgggatgcctgggagaaggagatcctcgaggaagccggacgccttccggccgcggcgggggagcgggcggccttcaccgagcgggcgttcgctgaagccgagcggaagacggccgaatggctggagcgaatcgagaaccttccggtgaagattaagcccggtccgatctaccgctccttctggagcaagcggaacaaggaagcgcggttcgaatacaaataggaagacccaatcttctttgtcccttttaggggcatgggccgatccctggaacggtgagaggcggcgcctcctcgggctgcttcggtcggatgcggccgggattgtcaataggcgcatagatttacgagataaatcggcgtgtagatttacgagggcctctcgaggaacaacgggacgattcattccaggtgagctcccttcatggtttggttgaagtctttcagtcgatagctgtgcccgtcgatattgaagatatgagccttgtggaagagtcgatcgagaaccgccgtcgccgccatctcgtcgccggcgaagatctggacccagtccttgaccgaccggttggaggtgatgatcgtcgagcctttcatgtaccgggccgaaacgaactggaagaacaggtgcgtttccgcgcggtcgaggctctgatagccgagctcgtcgaccacgaccaagctgcttttcacatacgcccggccgcgctgcttcgccaccgggatatccgcccgtcgcttcagctgctgaagcagctcttcgaccgtgtaatagatgacgctgaagccgtgctcgaccgcccgaactccaagccccaccgccagatgtgacttgcccaccccgggcggcccgaacaatagaacgttctccgcccgccggatgtaatcgcagctccccaggaagtccacccgtgacttttcgaccgccggctggaagaggaaatcgaacgactcgagccgcatcccccgcggcagccccgagaccttcaacgaggcggcaatacgccgttcttcccgggcctcgacctccatcgccaggagcttgtcgaaaaactccatcgggccgtgcttttcccgagacgcctcctcgagcagctcggccacgcaggagcgggtgtggacgagcttcagcatctccatgttccgctcgattccggtcagactcatcggctcatctcctgatagatctggacctggcggcgggcgacctcgagaccccacatccggatccgctcactgagatggagtttggggtcctcgagtgccgggatcgacagcctgaccatccccttggcctgaggcagagctgcaaagcgcccgatctccgctccctcatgatcgatgaggatctcctggccagtatgccggcagaagaccgaccggtcccggtaaccgcccggcacctggtagtagttgccgtcgaaaaagaccgtgccgtcccgcctgactctggtccgcgactccttgaccgggagcgctggaaaatggagcggcagcggtttaaggtacggcttttcataggtgaagctccgggccaccgaaaagcccgtcgcccccgagcgccacgtcgtctcggcatcctccaggatcgcccgggcccggctcgtcagatcgtccaggtcgcggtagacgcgatggcggagatccaggcgggagaacacgtccaggatcctcttctcgatttttcccttgtcctccggagccccgggcctggctggaagcacgatgacacccagaggctcaaggtacttccggtatcgctcgttgagggtggaggcggcgccgcgccagacccggaccgccgagcgcaggcagtcgggccggatggcctcgggaagtcctccgtaatcccggaacgcttcctgatgcccagccaggaaactctccaggtccttgcgaaacgaaaaccagactgccattttccggctgaagcccaggacgaaacagagcgcctggacggacgcccaagcctccggagctcccagttggacgtgaagatcctctttccagtcgacgaacagaagcttcccgggcggcgtttccaaccggcaccgcgcccccttcttgtgaaaatctggaaaccgcttccggatataccgccgcaacgcgtcataggaacggccatagccgtgatgttcccgcaacatctgctcgaggagccgaagcgtcggcctccgccggctgtcttcatagtcctcgatccagacgctgatccactcccggaaagtgtccaggctcgagggcttgctcgtcctcccgtccggctcgcccgaatcctgccggttgatccggtaccgaatggctccttctgtcaccccaagcttgcgggcgatctccgagttggaatatcccacttcgttgagcttcatgatgaagtccgagtcggcgggcgtgagcctcgtctgtgacatccctctctcctctccatctcgcggtcgaaagagaaggatgccatatctcccattttccaggaattatcccgggccggcttcgccggtgccttagctcgtaaatctatacgccgatccgctcgtagattatcgcgccgctggacacgggataaacgcggggaccggcggagatcccgccgcctggaaatagaaaaatcgtgaatcaggccatgattgaacagaatcgaatcgagaggatgccgcccggcgattgagaaaaatcctcaacgtggatatagttgagaccggccgcccgtttggccgccggggtggcggaactggcagacgcaagtgacttaaaatccgacccggacgattagggcttttatttattttgccttgaaagtatttagaaaccaataagtttctctttttatgtgttctgttgtttaatgcctgaatattgacagtgtacagtgatgtttgcaatttggaataggagggaggccatcgtaaactctcttgatcgccaaatctcgagaggaggatttttactaagatagcccccaaaatgcaaacatccgttgacacggccaagttagtttgactaaatggatttgttgatagaaaatcaagtcatccaactaccaatagcttttcaaaatccagataaagcaaccctcaaagatgccgccgaattatgttttatagtaatattgaaatagcccaacgtcagcgtacaataagggggtatcgataatgaaaaaaagattaatacttctcaccctttcaacactaatttctggatttttatacattccttttataaaagcttccaatgatcgtattacaagcataatttggcttttatttccaataggatcaacattgggcgttctgctttttggatggcttggattaagatttgctgataaatcaacactagaaatgccaattttaaataagtgggaatctgggcaaaagataaaaataaatgatttcagaattctgcttaaaccaatgctttttagcattatttttgccataattacttgcgcattcaatcaatatttttcggttcccaagaacccgggaacattaattgaacgcatattaacaactccctgggctgcaatagtaactgagaccgtctctcatctatttgtaatgacaggtatacttctacttattaaaaacaggtgtctttctatagtcttaagtagtctcatatttttaatgctttttcacttaaatctcattgaggggaaccaaatactgactatttatcttggaataatgaatttttcagctgcaacgttgactggctggatttatagtaaatacagttttgagtcagccgtggtttcacatgcaacgatgcatattatattattagggttgaattaaaacggcaaagaacatcgcccaatgtcaattgagaaaaatctccaacttggatatagttgagaccggccgcccgtttggccgccggggtggcggaactggcagacgcaagggacttaaaatcccttggggcgaaagcctcgtacgggttcgattcccgtccccggcacttgaaatccccctaaataaccgtttgaactgcggatgggcggaggcggcgtttcatttctcggagccaaaaacgcctgcaaaacggcaaattccattgccgccagcgaaaaaataagaggaaattaccgataaaatattctcttttcgcgagcaagcgaacgctccgcgtgcgcaagcggccgaagcttcggcgggcgcgcggaaacgagccgagcgggcggttatggagtaaaattaacccatgacgaagacaataatcaaactcaaacgaatttacgaaaaaccggagaaagccgacggcttccgagtgctggtggaccgtctttggccgcggggcatttcaaaggagcgggcgcggctggacttgtggctgaaggaggtcgcgccgtcaacggaattgcggcaatggtttggccacgacccgaaaaaatggacggagtttaaaaagagataccgccgggagctgtcgaaaaatccggcgtttgaggaattgagaagcgcggccgaaaagcacaagtccgtcacgcttctttttggagccaaagacgaggagcgcaacgaggcggcggttctcaaagaggatattgaataacccccgtcggcgcgaaaggcgaggccgcggccaagaagaatcagggggcgagggcgcgataaacggccgaggcgatcttgatatcctggacggccactccggtgaggtcggcgacggtgatttggctgtccgatgtccgccccgaggcccggccgctgatgatattcccgagctcgacgacccggctttcgtcgatttttcccgccgccagagccttgtggatctcgccccggagccggcattggaccaggctgtcggccaccacgacgtcggcccgggcgaggatttcggagtcgagctcctgtttgtccggcgtgtccgagccgacggcggtgatgtgcgtccccggccggaggtcggccgcagaaagaagcggcgtcttcgacggcgtcgcggtgacgatcaggttgcaggtccgcaagatcgcggccgcttcccgggtcgtctccaccgaaaaaccgcgcgatttcatctccctccgatagccctcgagctcgtcgggaagcggtccccaaaccagcgcgtcccggcagtcggtgacgcgtttgagccattcgagctgcagccggccttgaaccccggcgccggcgacgccgatgcgctcgaccgtccgcggagcgcagtacttggccgcgaccgctccggccgccgcggtccggatgtcggtcagatatccctcgtcgagcaagacggcggccgggacgccggttttctgctcgaagacgagcaggcagccgttgcccgacggcaggcccaaggcgggattgccgtagaagcccgaggcgatcttgatcacgtagaagtcctcgccggcgatggcgccgtacttgatatggacttcgcccttgtccaggatcagctcgccgacgggcggaacaaccgcccggccctcggaataggcggcgaacccttcctcgatggccgggagaagatcgatccgcggaaggacgttcttgatctcggccagaagagcgattttcacggagcctccagggagagcagccggcgccgccatgcgccttctatcgtttgatcgcgcccgtttccgcgatcaattcgtggatgcgccccagggccggcgtcaggtactcgtggggcaggccgtagctgatgcggacgaaatgatccaggccgaagtggtcgcccggcacgatgagaacctttttctcctcgcgcagccgctcgacgaatcgcgtcgagggaatatccaaattatatttcacgaaagcgatggccgccgcccgcggaggcacggccgacaggatcccctcgtgttcgcccatccaccgctccaggacgggatagccccggcggatgaagccccggccccgattgatgaggcggggccggacggcgggggagagggcgtaggcggccaggtgattggaaagcatcgtcgcgcttagggtcaagtactcgtgccgggcccaaagctcgtcgatgatttcggccgggccgacggcccagccgacccgaaggcccggcaggccgtaggccttgctcaggctgcccacggccaggaccttgtcgtataagccgtagaaggtgggcgtttgttcttcggccgtccgctcggctccggcgtagacctcgtcggccaggatccaggcgcccgcgccccgggccgtttcgacgacggcttccatctcttttttatcgaggatatagccggtcggattgttgggattgcagacggcgatcaatttcgtcttccgggtcacggcctttttcaagccgtcgaggtcgggtgcccagccgtttttttcgtccaaggaaaaggttttgagggagaatcccaggttcttggccagcccccagatttgcatgtagttgggcagcatgacgacgatctcgtcgccgggtgaaagcaggctccagaggatgtcgtaattagcctcgatggctcccacggtcacgaggacgttttccggcccggcgccgggatagagagcggcgatgttccgccgcagctcgggaatgccgttggcgtgggcgtagtccatttcgagcgacatcagacgggccattccctccgggtcgtcctggaagagctccttcagggtcaacgggtggacgccgctctcggagaggttatagtcgaccgctttctcgaatttggacatcatccgttccatcacgaaaggctgaaaccggggcatgttcgacctccttagacgcggtgaggataagccgtgacgcggcccgccgtcaagacattaaacaggtgccgtgtctccctatttgttttcctccggaccgttgagcagacggtccgcggccagaacggtgaagatgtacgtcgccgctccgccgatgacgttttcggcctgctgccagagaaacggaaaatcgtccttgagctccgggaaatccggccggatgagggccgtcccggaaacgttcatccccgggatgtacgaccagtcggcccggttcattccgtagccgatcgtcagggacttggccccgacgcccgagacgaacgagacgttcgagccgggatggcagcctaaaataaaatgaaggacgcggaagattccctcgcggtcgaagagcttgggaaacgcctgattcaaaaaatatcgctggacggcgaattcctgcaaatcccagcccacgccccagatccgcggccgccagaggacgccgaagggattggcggcgagctcgcgggcggtgtccgccgagtatttctccaaagcccgcgccgtccgttcacggagcggcccctccccgagcaggggaaaggcccgggcgacggcccagccggtctcggcgatgttcgcctcgatcacgggacccagggcttccagccgccgtcggaaccgttcctcctttgtggtcaacaggagctcgaccgaggccaggatttcctggacttccgggcggccggggatgtaggcggcccgggccgagaccggcgtccggccttgttcccggtcccaggccaggagagccgtttccaagcactcccgggcgaggccggcatcgatctcccgaaggccgcgggaggcggccgccagggcggcggcgacttgatactccaacgacgtgtccggatccgtgaaggcccaccggtcgtccggccgccccgagcgcccttccctggcttcggtccggccgagggagggatcgtaaatccggttgtccgtcatcgaggcggtgtccccgatcaggctgtattggatgatcgagccctcgatgattccgccaaagctgtgtccggccgcccggtagcccgagagcaggttctcagccccgtgcctgatttgctgaaggatgtcgggaatcccgtccggccggtggagaaggacgaggcgctcgtccggacggaccgtcgtctggtcggtcgccaggccgaacgtctcccggatcagaacgagcatccaggtcacgaacgcttgagagccggcggccaagtcgaagtccccggcgtcgtgccagccgccccggtcgagatgggggatgcggccgcgcgccgggaaagcgtacggcaggacgggtccctgctcgtagctgtcgaaatgaaccgtcgacggcggcgcctggacggcatcgtccaagtgacaggccccgtgccatatgcgatcgacgtcccggacctccacgtggcacatctggacgggaaggtaggtctcgagcgtcggctgccagacgtcccggcgatagacgtcccggccgatccggaacggcggcccggaccgggatccgtatttcaggacgtacatcccgggatcccgaaccccggtgaagtcgaacgtcgcgtaatcgtagcggaggaatctcccgttccaggggacgaccggcccgcggaggacttcggccggcccgcctcccgcctcgatccggcacaggacggcttcccccggcgggccggcgttccggtcgagctcgatcaccgcccgtttctcctggtcgggatggtagccggcctgggaaacggcgatgaccggatcccgaatccagccggggatccggtggggcgtgatgatccactcggccgcgttccgcgtgcaaccggaacggaggagggcgcggaggacgaaccagccgttatcggccgtgttgcggccgtcatagagctcgatgtccgcgcccgtcgattcgatggtcatcatccggaggggatcctcgggggcgagcgacagtttcggaccggaggccagggcggccggccggaccgtcccgaatccgcccgggatcatgggaccgtttccctgccggggaaaaacggccgcggtccggccgagatgataggttttcccgatataagccgacgggaaaagctccaggttgaagctgacccggccctcgagggcggccggcagcggtttgtccagatcgacggcgacgcggaacccgggacccgccggctcgacccgcacggcataggccgggccggacccggcgaaagcggccggcacccggatcgaacaccgctcccggtcgatctcccgcttgcccgtttcgggccgccggctccattgtcccggcgtttcttcgaggcggacgtctcccacggccgccacccgttcgccgtgctggatgatttccactccgccctgcttgccttccggataaatgtcgtggaagaccaggacggagactcccggggaatccaggtattcctcgggagtgagaatccagggagatcctcccgcgtccgcgtccgccggggaaatggaaggggagaccgcccagagaaccaaggccgcaagcccgatcgccgtcgctttcattttgcctccttcccgccgccgggtggcgccgtcccgggtgaaaaacggggcacggctctctctcggcccgcgccctcccggaaattcagaaattagggtgaaccggagccgcgtcccggtaaaacgccgccagaacccgctccgccggcttgccgtgggggctgtagcccgtgtctttcggtccgccgttttccgggtccggcatccactgccaccagtagacgccctgaatccagccgcggccgagcaaggcctgcaggccggcctggtaggcgttggcctggacctcgagatccaccgggccctccttctgccagttccaaggatcctgggccccgccctggatgctccggtagccgatctcggtcacgacgatgtttttcccccatcgcctggaaatttcgtgaagcgattgaagatagcggttccatccggcccgaaaatcccgcacggagggatgcgggttgtcggtcaaggtcgggtacgcgtccaggccgatgagatccacggcgtcccaccagcggacggcctcgggatcgctttcggcctggtcgtccgcgtacgtcaaaaggccgcggtaggcggcccggacggcggcgatcgtcgcccgccaatccgcttcccggccgacggtccggtccagctcgcagccggcgctgaacatctccgcgccgagagcttcggccatcgccgcgtagtggacgatgaattcccggtacgaggcgaaccaggcggcccagtccgcctcggtgaatccttggccgatctcgccccgccacccggcgggctcttcccgcaggtcgatgtgcggcttgagaaaaaccttgaggccgagctccttggcgaagccgatgattgcggccagggaagcgtcggcgggggtttcctctcccgtccggtcgatgaccgtcgaccggcgcgtggcctggtatccggtgaccaggatctggacccattcggcgttcgccgccgccagctcccgcagggcttggcgggcacctccgccgtcgtaggcatccttcgcgtaaccggtgaaggcgatccccttctggaaaaggccggccgttttgtcctgcggccgggccggggccggcaccgccgccagccccagaagaaccagggccgaaacgatccgccgccggagacgcgtcatccgccttctcccttcggtccgccggccgggatccgctcaccggggcggttttttgatcgaatcatccggctgaaggccgagctttttatagagatcccgccgtccttccttgtccccgtccaggattttccgggcgtaggcggcgacctcggccgcggcggcccggggaacgacgatgaccccgtccccgtcggcgacaatgatgtcgcccggccggaccaggacgccgccgcagacgatcggccggttcaccgactcgatctcgtttcgccccggccggatcccgcgtcccggccgttggaaataaagggggacgcgctcggccgtgatctcgtcggtgtcgcgggccgcggcgctcgtgacgacgcccacgcagccgcggcttttccattccaagatgttgtaggatccgatcgagccgacatcggccgccggggcgtcctcgatcaccagggccgtccccccgcggatcaggtcggcgaagggctcgccggagcggcggtcgtaccagtccccggcccaggcgtcatagtccgcggcctcccgcttcccggccggcgggctctgggtggggacatagcgggcggtgacggcgatcccggcgaaccggtgggtgaagtgttccgtatcgcgccagagaggatggatcgagggatccatcagcccgatgttctgaaggccggcggcgtccattccgtcggccacgtcggcgacccgcaggccggaaaagagggccaggacgtccgcgtcctccttttccgtcgtgaccggcgtcggcaggaaatttttcccggcccggagatcctcgccggggatggcggccgacccgaatccctccccgcctccggcgatcaagaaaagcgccgccaggatcaacggcgtccgcaagccggccgtcgttttcatcatgggtttctcctctcccttcctttgaatcagcgggaatccgccagatcggccgcggccgtctccatcaggagaaaaaaggcctggccttcggtcgctgttccggcggagttgaactcgggggagccgcagacgccctggaccaagccgaacgcgtcgacttttccgcgggccgcttcccgcatccggtcggccggcttttgaagagccggatcgagccagccgccggcgatcccccggtagatggaataggcgagcatctgggccaggttcgtttcgacgaacgtgtccgggcggtcgaggacatcgtggaacagcccgtcgtcccgctgccgcctgaggcagccgtcgatcacctcccggacgtgtccggccagggctttcttttctccggtcatggtttccggaagcgcccggatgacccgggtcatcccggccgcggcccagccgttgcccacaccccagaaatcctttctctcgaattccccccggtcgtcgtcccagatctgggaaaagaggccggcctcgggattccagagaacccggcggatcccctccacctggcggacggcttcgtccggccgtccggcgacggcgagaaacggaggggccatgtacagcgaatcgatccagacctgcttcttgtcggagacgtggtagagcgtcccgtccgcccggcggggcgcccgttcgagcaggtaggagagcattttttcggccgcttggaaaagccgcggatcccccgtcttccgggcggcgaagagcatcgcttctccgttggccgccggatcggtgactcccccgaaacaactgaggacggccaggcggccgtccggggtttgccggacggcggcttccttggccatcaggatcacttcttccgtctcgcccatttcaaggagggcttgggcggccgtgccctgttcccaggcgtcgcgctgcatggccagcatggcccgcttcacgtcttccgtccgggggctcatcttttcggatcgggcgcgcgcgggacgtccggcgcggagcgcgccgaaaaccggcggcgcggccgccagcgcggccggccaagcctgagcgaggaatttgcgtctcttcatgattcctccgcgcggtccggcccgagtataggccatttcccggggccgttcaaattgacaaaagaaatcatccttgatcttcgataggccgggaggccttcttcatccggacgtcttctccggagggccgccgtccttgacttttcgtcgggaggagacgattctatcgaattgaggagacccccgctttatcaaggagaagcgttgtcctgcgggcggcgatgtttcaaacggggtgtccaacgggcacgccgcagcggaagaatctccatgtgtttcgccggctgaggggcaaagcgttccggaatcttgtccggcgggagggcggcgttatcgcggcggatttccctttgcgggacatcgtcccgatggaggaaccatgaagtcgaaaagaataagacggccggcggctctcattctttctttattgatatctttcatttgtctccgggccggttcgccggccgccgggaagagggaaatgaacgcgtcccggccgatcatcggcgtgaagatctacgagaaccggggcggcttcgaccgtctcttcgcggaatggaaggagctggggatcaacaccgcgtttgtcggggaagcccttctggccgatccggtcttccggaccggcgcccgggccaacggcatcaccctgtacgtcattttcccggtttttcagaatcccgaggagcttcaggaacggccggacctggccgcggtcacggaccggggggagtcggcccgcgaggaatgggtccaattcgtctgtccgacccggaaggaatacaaggaccgccggatcgaacatctccgccggatcgtccgggaacatgacccggacgtcgtcagcctcgatttcatccgcttttttgttttctgggagatggtcctgcccggccggacgttggaatccctgccccggacctgcttctgcccgtcgtgcctggaaagctttcgaacgacgacggggatcgtctggccggacacgctcgcggggactccggccgtcgcccgctggattctcgatcatcacccggcggaatggacggactggaagtgccgggtgatcgccgattgggcgcgggacctggccgcggccgcccgccaagtcaagccggggatcaagatcaacgttcacctcgttccctggagggcggaagacttcggcggagcggcccgggccgtggccgggcaggatccgatccggctggcggcggcggctgattttttgtcgccgatgtgctatcaccacatggtcgggcaaacgccggcctgggtccattccgtcgtcgaggagttgtcttcccggaccggcgcggccgtccttcccagcatccaggtcggccatgcttatacggagcgggaggtgtcggccggggaattcaaggccgccctgaacgaggccttgaaaccgccgtcccggggcgtcgttttctggaactgggacgccctggccgcttctccggaaaagcaaaaattcgtccggctgcttgccggaaaggaaggagagaagccggggccgcattgaaataaacccgggaggcggagtatattctcatgtcccgcatgaaacgaagcagcatccggatgatatgcgccggtctcctgttgactttcggagtcggggccggccgggccgccgacgcccctgccgggcggtccccggccgccgcccgcgagggcgttgtcgtcgggtacttcgccgcttggaaacgggacgtcgtcgatcatgcgatgatctcctacgtccatttgacccatatcgcccattccttcgcctggccggacaaggagggaaatctcgtcttgcccgagggatacctctatccggagctgaaccaggaagcccatgcccatggggttaaggtcctgatgagcctgggcggctggggcaactgcgacggcttcgctcccatggccgccgatcccgccaagcgggggaagttcgtccgccaggcggcggaggcctgccggaattggaattatgacggcctcgacgtcgactgggaattcgtcgacaccgaggaggagcgcgcaagcttcacctccctgatccgggaattggacgcggccctgaaggcgatggatccgccccgtcaattgtccatggccgccccggccggggcgtattacggccgctggatcgatttcgaaattctccatccgtgctttgacttcatcggcttcatgacctatgattttcacggcgggtggtcggatcattccggccacaacgccccgctttacgcctgcggcgattcctgcggatccgtggatgagacgttttgttacgcccgaagccgcggaatcccggtgtccaagatccttctcggaatccccttttacggacgctcgtttgattgcccggccctgggcttgccctttcaaacgagcggggaagtgagcttcaccgaggtccaaaaccgcctggcgaacggctggacgtcctcccgggacgtttgcgcccgggttcctttgcttcagagccccggcggaggagcgatcgtctcctacgaggacgtcctctcggttcggagcaagtgccggtatgccctgaacaacggggtggccggcttcatcatctgggagctcagccacgaccgctggcgcggacaatccgtcctgctcgaggcggtcggagactttttcctccatcgaaccaagctcccccggcggggggaggacaaggagagccggcatgccgaacgtttctaaaagaatccccctcttgattctggccgcgggagcggttttggccgcggccgccgcgaccggattcgccgacgaaaaaaacaaggatttctttcccatgtccgtctggtacgccgggggcaaagcccgggccccgatgctggagaccgtcgcccccgattcggccgcggcctggcgcaaggacctgcggcagatcaaggacctcggcttcaacacggtccggacgtggatcgagtggacggcctgtgaaaaggacgagggccggtacgatttcagcgccttgaagaccgtcgtcgacctggccggggaaatggggctccgggtcgtcgtccaagtctatatcgactccgccccggactgggtcgggcgccggttccccgaagcccggttcgtttcctccaacggggtggccgtccagtcccaggcggccccgggcttctgcttcgaccatcccggcgtccgggagaagatcctgcggttcttcaccgaggcggccaaggccgtcaaggggaaacccgccttctacggctgggacctctggagcgagccgcacatcatcaattgggccgaggtgtattacgtcggaaatctcgaacacgtccagttctgctactgcgcggcgacccaagcccggttccgcgaatggctcaaggcccgctacgggacgatcgacggcttgaacaaggcctggtaccggacgttccgcgactgggcggaggtcgagccgccgcgcttcggaacgatcctcacgtacacggattacatcgactggaaggaattcatctcggacaagctggccgccgacctcaagcttaaagccgaggccgtcaaagccgtgatccccgagagcgtggtgacgagccactcggccacgcccggcctgttcagccggccggattggtccgggacgcccgacgaccggaagatgtccgacagcgtcgattattacgggacgtcgatctatcccaagcacgcctggaccctgcggccctggccgccgttctaccgggccgcggggctcgatttcgtccgctcgatggccctccgaaacggcggattctacgtcggcgagctgcaggccggctacggcgtgttcgggatgaagatgagcgtcccggtcgtcggggcggacttgcgcgactggatgtggagcacgatcgcctacggcgcccgggccgtcaacatctacgcctactaccccatgagctccggctacgagggcggcggctacggactggtcgagctcgatggaaaggtcaccgagcgggccgtcgaggccggccgcatcgccggcgttgtcacggcccacaaggatctctttttgaagagcctgccggccccggccgagatcgcggtcgtctacaatccgttgtcgcacatggtcggcggccagcagtcgttcaccggcgaaggtcaagccgtcggatacaacacgctcagcgagtcccttcaaggcgtccaccgggctttttatgagcggcatgtcccggtcgacttcctccacgtccgcgatctcgcgcctgaacggtggaagcgctacaagctcctgatcgtcccttatccggtcatgatgtcgcgggagcatgtcgggcggctcatcgaatacgtccgggacggcgggacgctcgtcgccgaggcccgctgcggctgggtcgacgagcgcggcttttccagccccgtcatccccggcggcggcttggacgaggtgttcggctgccgggaaaccgagctcctgccgctggccaaaacctccgcggtgacgatcgccgcggccgacgaggccctgccgctcctcaagcccagggacgcgctggacgccgtctttttcgaggaagccctggacgtcttcggaccccggagccgggtcctggcgacgttcgccgacggcaagccggcgatggtcgcctcctcgttcggccgggggaaagccgttctcgtcggatccttcccgggatccgcctaccatcatttcaagaacccggccaacgggaaattcttcgccggcctggcggactgggctggagtgcggaagccggtcgaggtttcgattccggatccggacgccctggtcgagggacggattctcgagggggcggattttcggatcctgatcgctttcaaccggggcgagcggaagacgaaggcttcctttgctcttcccgggttcccgaaggatcccgccgtgcgcgacctcgaatccggcaaggccgaggcgttccgacgggacggcgaaaccgtcgtcgtcgaaaaagagatggcgcccggcggcgtttggacggttgttttcgaaaacaagaaatgagaaaggctaaaaagcgggagatgacggccggtgaaggcccgctcttcgccgccggcgtcgatgtcggcgggaccaaggtctccacggccttgtttgattccggcggccggatgttcgcccgggccaagcagcccctcgatcggggaagcggcgaggcggcggccggccaggtcgcccgcgtcctccgggagcttggggaggaggccgtccgggcgggcggccgggtgaaggccgcggcggtctgtgtcccggggatcgtgtatcaagccgacggcctcgtctgggcgcccaacgtccccggctggatccatttccctctccaagggaggctggaaggcgcggtcccctttccggttctgatcgaaagcgaccgggcggcgtatgtctccggcgaagcttggcgcggggcggcccggggcgcccgggacgccgtcttcctggccgtcgggaccggcatcggggcgggcatcatctccggcgggcggctgatccgcggggccgaggatatctccggcgccgtggggtggttcgccctccggccggagttccgggaggaatacgcggaaatggggtgcttcgaggccgaagcttcggggaccggcgtgggccgccgggcccgccgcctcctggagtcgggcgtgtcctcggagatgatccgcctggccggcggccggatcgccgacgtaacggccgagaccgtggccgccgccgcccggctcaacgaccctccggcccgggcgatcatggccgaaacggcctccaccctggccatggggatcgccaacatcgtcagccttctcaatcccaaagtcatcgttctcggcggcggcctgttccaggccgcggatctcctcctggagcccatccggaaggagatcaagaaatgggcccagccgctcgcggccaaggacctcgaggtcgcggtttcgacgctcggcgaggacgccgggctgtacggctgcggcaagctggcttgggatctctcgaaaggagaataatcatgtcgtccacgcggtatctggaaaaaatcggggaaatcctcgccgagatcaaaacccgggagacgggccgcatcggagaggcggccgcggcgatggccgcttccatccgccggggcgggcgcgtctacatgttcggcagcgggcattcggtgatcccggtgctcgacatctttccccgctacggcggcttcgtcggtttcttccctctctatgacccccggctgatgtggacgaacgtcatcgggccgggcggagcccgcgagctcctttggatcgagcggcaggaaggctatgccaagatcttcctccagagctacccgctcgagctccgggacgtcatgcttgtcttttcccacggcgggctcaacgccgcccccatcgacgtcgccctcgaggccaaggccaagggactcaaggtcgtctcggtctcctcccacgccaacctcaagatcgcccggcggagccattcctcgggcaaagccctggccgaggtctccgacatcgccatcgacaactgcgtcccgccggaagacgccctggtcgacgtcggccagacggagcgggtcgcagccggatcgacggtcgcggccgtcgtcgtggccatgtcgctggtggccgaaacggccgcccggctcgccgagacgggcggagtccccccgacgttcgtctcccccaacgtccccggcgttccgcccggacacatggcccgggtctaccaggcgttcacggagttctactacgcccggtccatgaagaaggagggcgtatgacctccgccccgcagcagcggccggtgagcgtcgtccgtcttcaagcctcggccttcgccgggatcttcgtcttcgggatcgtcatggccgtcctgggggccatccttccctcgctgttcgaacggctccggatcgacaaggccgaggccggcgggcttttccttcttatgaacttcgccatgctcgtcgtctcgttctttttcggcccggtcgtcgaccgcttcggattcaaatatttcctggcggcgtcggccctgctcgtcgccctgtctttcggcctgctggccgtcgccccgacctacggcctgatcgtcctggccgtcgtcgtcctggggcttgggggagggggattgaacggcggaaccaacgccttgatcaacgaccttcatcccggcggacaaggctccgccctgaacctgctcgggatctttttcggcttcggggccctgacgatcccgtttttgatcggaaccctcttggcggggatcggccttgtccggatcctgtttctggccgcggccgcgggacttgtccccctcttgatgtttctgaccttgcgctttcccgaggccaagcagccgcagggattccccatccggaaggccaagctcatcgccggcgatcctctgctctggatctgcgctttcattctattctttcaatcgggaaacgaattcacggccggtggatggatctcgacttatcttcaggagggacacggcctgaccggggccgcggcctcgttcgtcctggccggctattggggggccatcatggccggccgtttcgcggccagccggatcgtcggcaggaccggcaaccatccgctcgttctcgggagcgccctcctcagcctggccgcggccgggctcctggtcgccgcgccttccggcgtttgggcggcggccggcgccctgctcctgggtctcggcttcgccgcgatttatccgaccaccctggccacggccggggagcggttcgcctcgatctccggcacggccttcagcattcttttcacggtcgccctctccggcggaatgctcggcccctggctggccgggttgatcgcgaaatcctcttcgctgcggcggggtctgcttcttccggtcgtcaactgcgcggcgatcatcgttctgcaagtttttttgagccgcgtttcaaaaaaagagcggccgccgtccgtttgagaaagccggacggcgaaggggaaaaacgatgagtcttttcgagcggaaaaaaagaatcacggccgcggcggccctggccgccgccttgattttttccgtcccggcgtcggcgagggaggccggaaacgccgtctcgcttagaaaaaaactcgtcgacgggcacgccgagctcttgatggaaaaagggatcctggatttctccggccgggagatcgagggacggctggaggagctgcttcgagccggggatctttcctccgtcctggccgcgctcaatgatatgccctccaacctcggcggctttcccccctgcgccttcgaccggcccgtcggctaccgtctttcctccttcgggcgcacgatcgccgacggggacatcgacgccgacgccgaggggagcgcctgcccggccggcgggatcggggccggggcgttcgaatggacgatgagcggaaatttccgctactggttcctcaagccgggctggtatgtcgacgagacggtccaggcggaccggttccacgtgttcatgaaatccggggggaagacgatcgcccgcacgcttgcgaccggcgctccggcggacggaacgctcggggcctgggcttggggctatccggcgggggcgggaagctacttcgccctcttccccaagtcggggttttcctacgagacgaatcccgaatttccggccaagctggcggtgacccagttttcgccggtcattccccataattaccgggaaacgagctacccggtcgccgtttacaaatggatcgcccaaaacccgacccggcggccggtcgaggtttcggtgatgctgacctgggaaaacatgatcggctgggaaccgcggctcaagagccccgggaaggcggcggagttcggctggcggcgcgacatccccggccgggtcaaccgcgtcgtccgcgacggccggatgacgggcgtcgtcttcggccgcaaggatgccgatccccggaccggaaacgccctcaccgggacgatgtgcgtcgccgccgaatcccttccgggccgggccgaagtgtccgtcctggcggatttcgatcccctctccgacggggccggcgtttggacgtccttcgccggaaccgggattcttcccggcggggagacgtcgcggaccacgtccggcggcgaggccttgggcgccgccctggccgtccgtctgactcttcggcccggagagaaggtcgagttcccgatcgtcctcgcttgggacttcccatacgccgagttcgagcccggggcgcgccacctcaggaaatacacggcctttttcggatcggatggaaatcaagcggcggcgatcgcccgggaagccctggacaaatggcgggaatgggaacgggccgtcgacgactggcagcggccgatcatcggcgaccggagcctgccggactggttcaagcaggccctgatcaacgagctctacatccttcccgaaacgagcctgtgggacgcggcgaccaatctccacacgtatctcgagagcgccgactatctcatgtacggaacgttcgacgtcgactcctactgctggcacgttcctaagctctggcccgggctcgagcgggaaaacctgcgctttttcagccgggccgtggagatggaggacgcctccttcaaggcgtaccagtacgcgagcgcttttcccggcgaggtgccgcccgacaagctctcctattactggagcatcaacaaggccgcgggcatggttccccatgatctcgggtcgccgcggaaacggccctgggtcattctcaacgccttcgactggcagaacggcaacgtttggaaggacctcaatcccaaatttcccctccgggccctgcgggcgctccgggacggcgggccgggggatgaggatcttctaaaaagatcgttccgggcgtcggtctccgccctcgacaccctggagaagaagttcggcgatccccaaagccatctccctcgaaacgaaggcatccccgatcagacgtacgacacgtggcggatgaaaggggagacggcctatgtcgggatgctctggctggcctcgctccaagcggccgccgccttgggggaagactgccggcgggcggggatggaatcgctggacggcctgccggtcggggagatcgtcgcccggtaccgctcctggttcgaggcgggccggaccgccctgcagacgctctggaacgaatcgagcggctgcttcaacatcgacgccgagaccgacgacatcatgaccgatcagctgttcggcgtctggtacgcggccatggtcgggctggaaaacgacgaggccggacggatcgttcccccgtctcaagtccggcgggctctaaggaccgtctttgaaaagaacgttctcgggttcggaaacggccggctcggcgcggtcaacggacggacggccgccgggacccagcttttcagccagcagggcgacgaggtttgggcggggaccgcttatgccttcgcctcgaacctgattctccacgggttgcgggacgagggcctccaaaccgcttggggcgtctatcacgtcgtctacagcccctacggccagggatactttttcaagacgcccgaggcgtatttgaatccggccgagcttgtctggaacgaccggtcccggacttacggcgaccgcctgttccgggccatgaaatacatgaggcccggggccgtctgggccgtttatgaggccctgctgaaaacgaggtaagagccgccgtgaaaaaacaaaacgccgccgccccgccccgccgctggccgtggtttgcgggcgcgatcgccgccgcagccgcggcgatcctggccttccatctgctgacgggccgcggatccttcccgcggatcgcccgggaatggtcgtccctcggcgtcgacaagcccaatgtcgtgatcgtgaccctcgataccacccgggccgatcgcctcggcgcctacggctgccgggccgcccgcacgcccgttctggacgccctggccggccggggcgcgctgttcgagcaatgcgccaccgtcgcccccctgacccttcccgcccactccaccatcttcaccggcctcccgccgacctttcacggcgttcgggtgaacggtaacaccgccctgagcgacgagcagacgacactggccgaggtgatggcttcccgcgggtacgcctgcggagcgttcatcgccgcctttgtcctcgacggccgatgggggctcaaacagggattcgatcattatgacgaccggttcgacctcaagaagtacaagcagctcgacctgggagcggtccaaaggccgggcaacgaggtcatggacgccgccttggcctggctcgaggggcgcaaggacacgccctttttcgcctggatccacctctacgatccccacacgccttatgcccctcccgaaccctattacagccggttcgcgcccggcggtccggccggcctctacgacggcgagatcgccttcatggacgagcagatcgggcgcctgacgtcctggctggagcgcaccggcctggaccggcggacgattcttctctttgtcggcgaccacggcgagggcctgggcagccacggcgaaagcagccacgggtatttcatttacgactacgcccagcgcgtcccgttgatcgtcgtgacgcccttggccaaaggccgcggcgtccgggtgacgtcccaggtcagcaccgtcgacgtcttcgccacgatcctggagctggccgggatgtccgttccggcgggccgccaaggccggtccttggtcccgctgatgttcggccggaaagaggcgaaggaagagtccgcctacggcgaatccatggcgccgaacatccaattcggctgggcgccgcttaaggctctgcggaccgtccggtacaagttcatcgatgctccgcgcctggagctttacgaccttgagaaggacccggccgaatcggtgaatatcgccggccggaatccggccctcgtccgcgatttcaaggcccggctggaccggttcgtcgaggaatcgggccgcggcgcgccgaagcttcaggccgccgacctggacaaggagacgatggcccggctgtccgccctcggctatatcggggctccggtcgcctcgaaaaaatccggaggcggagccccggccgaccccaaggacaaactcctcgtttacgaatccgtccagcgggccggagagatgatcatgggcgagcggtacgacgaggcggccgtgcttctcgaggcgacgcttcggagcgatccggatatcgcccaggcccttcttctcctggccacctgccggtcggagacgggcaagatggaagaggccaaggaggctcttctccacatcctcggctccgaacccgaaaacatccaagccctgatctcgctggccaacatcctcatgagcgagggccggatggaggaagtcgcggccgtctgcaaacaaaccctggcggtcgacgagaaaagcgttcaggcccacatgctcctgggggaagtctacatggcggaggagaagcacgccgaggccctgccgttcctggaaaaagccttcgagatccagcccaagctgactcaaaacggcctcaacctcgcggcctgcctgatcgggctcgatcaattcgaacgggcggagcccttgctcaagtcggtgatcgcggagaatccgcggtttcccttcgcgaatttcaacctggggcttctttacgagggactgggccgctgggaggacgcccgaagggcgtacaccgaggagatcgcctcctacccccaagagtaccgggcccgcttcaaccgggggaagatcttcttccggctgggggaaagacaggcctatttggacgagatgcgggaggtcgtggctattgccccgcgccaggccgaggggtaccttttcctggcccgggggcttttaagcgagccggagtcgatcgacgaggccgccggccttgtggaaaaggggctctccctggccgcgacggacgagctcaaggccttcggatatttcctgcaagccgatatcttcaaccggaaaggacagcccgaaaagatgcgggcggcccttgaaaaagccaatgcgttcaagtcaaaggaggagtcagcccatgaataagcgagcgttttgtttcggagcggttctggcggccgccgttctcgcctggggaaccgtctcggccttcggccagtaccgggagtattacttttttggaagagtcgtcgacacggacacgaagccggtggccggggtcgaaatccttctccgggacgtcgcgacgagccggggatacaccatcaagacgaacgaccggggggaattcaaattcgccggcctgccccacggcatctacaccgtgaccttcaagaaggaaggattcgcggtcaaggaagacgagtggcgcttcccgaatccccaggacacgatgcagaaggttgagattccggatgtgacgctggtctcccaggagctcgtcgacaaggccgccaggctcaagatcgacgaggcccggatccaggaagcagtcgagaagatccgcaacaaggattacgacggggcgatcaccttgcttcgggatttcctggagaagaatccggacgaggtcaacgccctctatttcctcgggctgagctacgcccggaaaaagatgttcgccgaggcggtcgagacgctcggccgggtcgctgaaaagacccccgactttccgccggttttcttcgagctcggcctctgttataagcaactggacgagccggaaaaagcgatcgccgcgtatcaaagaaaccaggagctcgatccgaccaacgccgacagcgcctataattccggcctcattcttttccgcttggggcgcgtccccgaggcccagaaagccttcgaggatgctctcgccctcaaacccgacgatcctgaaatcctggaaatggtcagccggtgctatatcaacggcggcgatttcgtcaaggccgtggagtatctcgaaaaggcgaaagccaagaccacggattcggataaaatcaaattcatcgatgatctcatccacactctcaaggaaaaaatcaagggcggatgctgacgtccgccctggatttttacctcttgacattatattttttttaagtaatcttgaatttgtaagttcaataaacttacaaatgcgttggaacgggaaatccaatcaaaaaagttaattcgcaacacaccaagagtcacaatcgtcttctgattctgaagactgtctataaaaacgaccggatcagccgggccgcgatcgcccgggaaaccggattaacccgggcgacggtttccgacgccgtcgccgatctcgaaaacgacggaatgatcgccgaagtcggcgtcggtccgtctaaaagcggcaaacccccgattctcttgaagttcgtcgacgaggcccgctgcctgatcggcctcgacctggcggagaacgaattccggggggcgatcgtcaatctccggggggaaatcaaacaccgcttgaactggccgatcaacggcggtgacgtttccggcacgctggcttcgatcgacgccctgatcgaccgtctccgccggctttcgaccagccctcttctcggtatcgggatcggcgccccgggtttgatcgattcccaacacggcgtcgttcggtacgcggccaagctcgattggcgcgaaatccgcttgggggagatgctcgctcggaaacacggcctgcccgttcatatcgccaacgattgccaggcggcggccttggccgaattcacgttcggcaacggcaacggttacgagccgaacctgatcgtcatcaaggccagccagggcatcggggcggggatcgtcctcaaccggcagctcttctgcggcgaccggttcggcgcgggggagcttggccatttggtcatcaatgaagggggcgacccctgccgctgcggccaccgaggctgcctggaaacggtcgtcggaagcgagtcgattctccgggccgcccgggggatcgcggccggcgatcccggctcccttcttcaccggttcgccggcgcgccggagcggatcgatatcgacgccgtcgcccgggccttggaggcgggggacgggacgcttcgatccatggtcgcggaggctggccgcatcctcggcatcgccctggccaacctcgtggggattttaaatgtccatcgcctcatcctggccggcagcctgactcgactcgggccggccttgctcgatccggttcggcgggagatcggacggcggtcgctctcggccttggccgacgaaaccgtcgtcgcggtctccgggcttggggaagacatcgtcatcttaggcgccgccgccctgctcctcaacaatgagctgaagctgccatgaaacaagccaagaatgagcaggcccgcgtccggaggggggtgagaatataacgaacgccgtacaaagatcacctggggagggtctcttccgagggaaccggaagagacaggaaggaaggcaaacccacaaagaggagaatgagatgcagaggaatcgaaaacacatgtgggcggccttgctggccgtcgtcctgttgatcgttgggatcagcctgccggcgcgcggtcaatcgattctcaccggaaaaatctcgggaacgattaccgacgacgccggtgaagcgttgcccggcgtcaacgtggaggtgaccagcccggccctcatctcggggaagcgggcgaccgtctccaccgcccggggatcgtttgttttcttggatttgccgcccggcgaatacaagatcacggcgtccctggaaaatttcaaaaccatcgttcaggaaggcatcatggtctcggcggggagcagtctggtcgtcaacctggctctcccgacgggcaacatcaacgagacggttgaagtggtgggcgccgcgcccatcgtcgactcgaaatcgtcgacgatcgactccaagatccaagcggagatgcttaccaagctgccgacgagccgggatgcgttctatgacctgtccctgacgacgcccggcatgttcgaccacggcagctcgggcggctggatgccgagcccgacggcctacggcggcgcctccaacgagaacgtctttctcgtcaacggcgtcaacgccaccaatccgcgcggcgcctccttcggaacgctggtccgggtcaactacaacgccgtcgaggaggtccgggtcgtggccctgggatccaaggccgaatacggatcctactcgggcgcggcgatcgacgtcctgaccaagtccggaagcaactcgttccacggagcggcggcagtctatttcgaacccgtcaagtggcggacgagcaaccagccggcgacgaacgagaagtacggcacggactggatctacgtcgcccccgacgtcaccctttacggcggaccgccgaagagcgattacgagctgaacctgacgttcggcggcccgatcatcaaggacaagatctggttcttcggcggaatcgattatctctacaacgccgggaagcgcccccgttgggatcttttggccgaaagctggggccgctacgccgacatgaagatctcggccgagcccttcaccgctcaccgggcctggatctcctaccattacgagagcaatgactacaccggcggaagctggggcagccagccggaatgggatacatccgcgtcctacggcgtggccagcgtcgaccattccgtgtccgcccagtggcaatggctcccgtccagcacgaccatcctgacggccaagtacctgggattctggacgaacgacacgccccacgtgcccgacgacgccccggaccatccctgctacatcaactggtggaagtgggcccagtacggcatcaacggggctttcccctacatcgagggctggcattcgaaccgccagacgatccaggccgacgtgtcgcactacgccgaggactttctgggcgagcacgacatcaagttcggcgcccagttcacccggggccggagcaactcgttgggcggttatttccagaactacgtcaacttcctgtatccctaccgctggacgcagaatgtgaactacatgcagagctggtacggcgacaccggcctggttttctacaacctccgcgactccatcaatcccttcctgacggtcgggacggcggattcgatgggcttcttcttcgacgaccaatggtcgccggccaaacgcctgaccgtcaatatcggcctccgctatgaccggctgacggcgaagtacggggaaggcgaagtttaccagcccctggccaaacccgaggatatcggcgatccgacggtcctccgcacccggaagggcaccgagaacatcttcgatttcaagacgttctcgccccggatcgggctgacctacagcctgaccgaggacgggaaaaccgtcgtccgggcgagctacggccgctactacctgcccttgacggtcgaatacctgaggcgctacgggcccgactgcccgctggtgacccggcagatggaattctacagcgttccctgggacatcgccgacgccgacggcgacggcttgatcgacacggtcgagacgcggaacgcggcccgggaaatctacggcatgacgccctatgatgtcatcgactacgcgccgcaggacttcttctcctggcagctcaacgtcaaggagggcctcaaggaccaatacaccgaccagatcaccctcaacatcgagcgggagatcctcaaggacttctcggtcagcgcctcctggatctacaagtacgcgggcaacatcttcgccaacgtgccgatcaacgcccataccggcgaggaatgggcatacgaccggatccccttcacgacctcctcgggccaagtcgtcaatctctacagcatcaagtggctcgattataacgaggacggggtcatcgacggaggcgacatccactggctcggacagtccgggaactcgaccttccaggtccggaacatggaccagttcgacggccagaaagcccgccggatgtacatgggctaccagctcgttttcaacaagcggctgtccaaccgctggcagatgatggcgtccttcctctactcgcactcggaaggaatggccaaccggattttcggcaacagtatgaacgccgagggcccgatgttcaccgacaacacctggatgggttcgctcaactacaccatcaacaacatgaccggccccctgcccttcgtgccgaagttcgaattcaagatctccggatcgtacacgatccccaccgtggaggtcgacttgggcgcccgcttccggctccacacgggccgccccatctggaagcttgatgagatcccggtccattccgagtggtccaatcccgaaggcggaatcatcggagggggcgtgggctcgatcgtttccagcgtcgaacccgattaccttccgacccaagccattctcgacctgagagcggaaaagtcgttcgtgctgcccaagttcgggacgatctcggtcgttctcgacgcgttcaacgtcttcaacgcggacacgccgaccacgatcgacaaccagtattcgttcgggcgcgtcggatcgatcgtcacgccgcgcactttccgcttcagcctcatgtaccagttctaggagccgttcgactcggcgccgcacggccgccagtccgcccggagggccccccggccctccgggctttttttcagcccgggcggggcgttgtccgccgccggagaatcggatatcatctgactcgaggtgaagcatgtcctgcatcggcgccgtactcctggcgatcgggatggccgcgctcccggccgccggccaggtcgcgaaatcggccgttctcccggagaagtaccggatctggctcgatgaagaagccgtcttcctcatcacccccacggagcgggacgtctttctcaagctcgactccgaccggagccgcgaaatcttcatcgaggccttctggaagcagcgcgaccccgtgccggaaacgccgcgcaacgagttccgggaggagcattaccgccgcctccagtacgccaaccggatgtacggccgcggctcccgccttccgggctggaagacggaccggggaaaaatctatatcgttctcggcccgccgaggaacatcgagtcgttcgacgacatcaacaacgtccatccgacggagatctggttctaccaggatacgggattcccgacgctgccggtggccttcaacattatttttttcaagcgcaacggcttcggtgattatgtcctgtattccccggcggccgacggcccccgcagcctgatcgcgacggccatgggcgatgcccgggatgagcaggcttaccgggatctccgcgagctggcccccaacctggcttcccaggtcctctccttgatccccggcgaacgccgtccgtcccggacgccgtcgctgtcgtcggagacgcttctggcggatatcttcgactcgccccgccgaaaaatcaaggatgcctatgccgaggccctcctccgctacaaggacgccgtcgaggtcgaatacacggccaattacatcgatgtcggggcgcttctctacgtctcccgaagcggcgacggcacgtccctgatccattacgcggtctcgcccgcccgcttgacgctcgcgtcctccggcggccggaacgaggcgtttttctccttcaacggccggctgaccgacgtggacggccggaccgtctaccaattcgaaaaatcgtttcccctctcgttcaacgacgccgatgtcggcgagatccgggccacgtcgatcgtcttccaggacgtttttccgtgcgtcccggggcgtttccgattcgatctcctgctcaagaacaccgtttccaaggaattcggctcatttgaggcggcgatcgagatcccggaccccggggccgggccggcggtgggcagcctgttcctgggctattcagccgaaaccgccgccttcggcccggccgaggcggtgcctttccgaatcgggggacggcagctcctcggcgacgtccgaaaccgttttgtcgccgcggacacgatgcggatcgtcttccaggcgttcggccttccggaggcttggacggccgggggacggattcgagccgacgttctcaaagacagcgtcccggtcttgtcccaaacccggacgccggctgaagccggagccggggaaacgttctttctcgaacaatccctccgggagctcaagcccggctactatgaccttgaagtcacgctccttgacggggcggggcgggaactcgcccgccggggcgcgccgtttgaagtcggccttcccgggcggctggcgagaccacgggtcctgtccggcgtaaccggcgcggattacgcggaggagtgggactacgccttgggtcttcagtatttgaacttgggaaaatccagcgaggcgggacgggcgatggcccgggcctatgagaaacatcccgaaaacgagcggttcacctccggctattctcaagcgctctatctcctgggggagtcccggaaggccaaggatgtgctccttcccctggccgaagacgagaacgccgctcccgaggtgctggccggactcggccgcgcctgccagtcgctgggggaattccgggaagcgatcgcccattaccgccgttacctggcccgggccgggacaaacatcgagatcctcaattatatcgggacctgtcattaccagttgggggagaaggacgccgccctggatgtttggaatcagtcgctgaagatcaatccccggcaggagcggctgaaggccctggtggattccctggcggggaaatagcctctcggagaagccggtcgatccggacgagccggtaccctttggccttgaggccgtcgatgagacggtccagccgggcatagaatttgtccgtccgcctcggatcggtcccgatgtgaaccaggaggatgaatccgttgaatccgtccgggtcccgcccttcggcctcccagatccggtcccagatctcccgcgaggacaagtattcgggcatgtccggagtcgtgtaatcggcgttggaggacgtcccgggcgtgaaattgaaaaggacgagcccgagggagcgggcccagcccgaaatgtcccggttgtaccattcgtagggcgggatgaaaaagggcgcgtctttccggcgcagtccgaacgtttccatgatctcgtaattggcccgcaggtcggcggcgaattcctcccgggtcacgagcgtccgggcccggtcctcccaggagcagtagaggagatgcttgtcggaatgcggccccagataatgtccgtcggcgatgaagccgcggatgagggccgtgttcgaagcggaccggtagaaatcgccggtgaagaaaaacccggcggagacgcgcttctcccggagaacgccgcggatggcttcgcctccgtcggcgaagtcgccgccggtgaagatcaaggccatctcccggcggtccgtccggccgcggatgattcctccctcctcgcagcggaagacgaggcagggatccggggccgtgttccgcggcggcctccggccgcaccctccggccgggattcctcccgccgccagggcgaggacggccagggcgaggacgcgccggccggacatcgtccgcggccggagcgggggtccgttcatttccgcgcgtcgaagatcagggcggccgcgcccaggatggcgatgtgctcggtcgtcgagacgtcgatcttgaggttgcggatcgtgatcgagtagggaaaattgctcaaggaatcccgaagggtttgctcgaagtaggcgaacgccttggacacggatcccccgaggacgatgatctccggatcgacggcaaagaggatgaccttgaccgcttcggccaaatgcgtcccgaattcccgaaagacggcccgggcggtcaagtcgccgcagagggcccggtcgaaaagctcccggcccgatgtcccgtaagcggtcttgaaaaaacggccgctggcgtaatcctcgagagttccatcccggtaggggaccattccgaactcgcccgccccgcagttggatccggcgtagagccggccgttggcgatgaggccggcccccaggccggtgccgacgatcaagccgacggcgtggtcgtagggcttggccaggccgaagtatttctcgcccacggcgaagcagttggcgtcgttgttgatgtaggccggaatcccgtagcgcttctcgatcaaggccttgagggggacttccttccaggccggaatgttttggacgtcgtagaggacgcccgccttcagatcgatgacgctgggaacgccgacgccgatggcctcgatggaccggtcgatgacttggtcggcgagggcgaaaaaagcctccaggacttcctcccggggacggtcggccggaacggccgaggccgcgacccggatcagccgttggcccttgacgattccggcccggacgttggtgccgccgagatcgatgccgacgacggccgggccgctcatgccgcctccttcctctttttccgccgctggaatgtctcgttgacgatgaggggccgggcccagattccgatcgagaagatgtagccgagggtcaggtaaaggacgaacatgccctggcgcaggccgaaggcgtccccgaggcggccgacgatcaggggcatgacggccccgccgatgatgccggtgcagaggatgccggaaaaggagccgtggtggccggagaccgagttgagggccagcgaaaagatgatcggccacatgaccgaggcggcgaagcccatgagcgggaacatgatcagggccagcggcccggggccgaacagggccagggtcaggaagacaagggccgcgccggtgaagcccagcaggaccttgcggctgtcgaagagcttcagaaggatgaggccgaggacgccgccgagggtcatcagcagccagaagagggccacgcggtgcgcgccgaccgtctgctggtcgtagccgtgataggtcttgaggaacttggagatccagaaggatacgccctgttcggtgccgacgtatgagaaaatgcccaggaagaagaggagaacggtccggttctggagcagggccttgtgaacggcccaggccccggttcgctcgtcctccttgcgcacgacgatcgggaagcgggccgccgccaggatcaggatcatgaccaggaggatgacggcgaagatccagtagaccgagacccacgacaagccgggccggacaagcttggtcatcagcccgatgagcggcttgccttccgccccggaccggccgatgttctggacgaaataggaatagaggaacgggctcaggaacgaagccccgccgaagatgagctgggccaggacggagttgaaggcgtagtgctcctcgccgccggaaacgcggagcaggggattgatgaccacctggagggcggcgaaaccggtcccgatgaggaagagcgacgccaaaaacacgggatagctcggccagagcgagatgagcagggccccggacagggccaggccgaaggccgcgatcatgaccggcttctcccggtagcgctcgacaagcaggccggcggggatggacataacgccgtaggcgacgaaaaaggcgaaggccaggagcccgacgaacgtcaggctgaggccgaagctctggccgacgtcgggattgatggccccgatgacgttggtgacgagcgaaatgacgaagaagacgaggaaaacgagaacgacgaggaaggggttgcgcttcatgatcttacctttccgcccggacggcgttccagccgccgatcttgaggacggccggcgcgccgtccagcccggcggtattgatccggaccttgaccgtccgggtctcgcccggaaggagtgtcagataattgtcatcccagaagacaggcgtgacggcctcgccggttttttcgttcagaatcatgagctcgatcatgaaggccgggacggccgccgtgtttttcagcgtcgccgcgatttccaggcatccgccgtcggtcttccgttcctcccggcagtcgatcgctgccgggggaagggcggccaggcccgtcaaatcggcgaattccttgatcggcgtcacgtaccattccgtcttcgcgtcgtcgaggacgtcatcgcggagcggcaaggcgtagaagttgtcggtgatcaagccgcccgcctcgtcgtggaggcggaggtcgaggaaccaggccccggccgcgccggccggcggagcgacgacgcccaggcttttcttgtcgtcggcgtccagggcgaccgggaattcacgggcggaccggcgcgctccgtccagcccgaagacttgaacggaagcccggaccggcccggaaggccggcccgcgtcgttggtgacgaatacttcccgggtcgagaggtcgtagaggatgtggagcggctcgcaggccttgcgggcgccgaaaaaggccccgttgggcaggagatcgtatccaaagagctgccaccagagcttgggccaggccgaattgtacatccactggatgatgcccgtggccacggggcggcggatgacgaaggcctcgtacatcgcccgcatggcctcgtagttcatgaattgggccttgcggaggtaatcggccaggccggtcggcggtcccagccgcttgtccatcgcctcgttgtaccgggagaggtcgttgaactcgccgcggcagcaatgataaaaccacaggtcgttgatcggccagaggcggtcggccgggaacattttccggaggctttcgagaggcggaacctggggtccgggccccgtctcggtgttgaaaccgaaggcgccgccgtccgttttgttgatgaaccaatacacgggggggacatagtcgtaagggccgttcatcttgacgccggaatcgccgctgacggaggaggttttgctcccggtggaattcaggaccggccgggtcggatcgtcctcggccaggatggcccggtaggatttctcgagctccggcttggggatgaggtcgctggccagggcccagacgaagatgctggggtggttgcggagccagcggacctggtcccgccaggagcgggccgccaggtcgaagtcctcggcggtcaggaggccgccgtacacctcgtcggtcggcttgccgaaatagttctcccattcccattggcagctccagccggccatgacgaggattcccgtctcgtcgcaaaagtcgtagaactccggcccggtgccccagaaaccctccacccggagggcgttcaggttcatatgccgggcgtaggcgacctgggcccggaccttgtccggaggattgtcgagcaggatgtcgtcggtccagccgccgccgcggatcaggatcctccggccgttgaggacgtagccgcggcggccttccgggctgacgtcatcggcgatctcgcggatgccgaaccgcgtcgacgcctcgtcggagacctgtccgccgagggccgcttccaggttcaaggtgtagagctcgggcgtccccagatcgtgcgtccaccagacgcggggatcgcggatcacgagctggggacagtcccccggcgtcaccgcgaccgtttttttctcatgggcggccaaggcgacggggcgggaaaagcggatgtccccgatccgtccgttgagcgttccctcgcggggttcgccggccttgttttcgatttcggccgacacggtcagccgggcttctttcagcgttttaagatcgagacgcgtttggacgaacggagaatgaacaaccaggtcgccggtcaggcggaggcggaccgggcgccaaatccccatgttggaatcgggcgctttcgggttccagtcgacgaatcccatggtcaaagcgcccggctcgaccggaaggatcatgacggccagggcgtttcgggctccgggacggatcccgtcggtgacgtcgagccggaactggcggaacgcgccgtagatttgagatgtgtcggcgatctttttcccgttcagccagatgtcggcccggtaattgatcccgtcgaattcgaggacggcgcggccgcggccggggacggccgggacgtcgaattccgtccgaaaccaccaggggacggcgaacggctcggccggaatcttggcgaagttgtcggccaagaagatatccttgtagacgccgtttttcacgagggcggacagaacggtcgtcgggatcatggccgggcgcgcgtcgggaaaagcggcgcccggaagggagagatcttccccgccggcggccaggccggccgaggaccggacggcccagttctccttcagctcgatgatcggaacggattcggcggcggccaggatcggcccgaggatcaaggcggacaggacgaagaaggtcggagggattttattcatcatgcttctctccttccggggggatcatcagaatgacgttgttttattatatcgccggcttcctccgcggacaaggcacgggcggcgtccggctcactttttcggcttcgcggccgaaggcttttccgcttcctcgaagaattgattctggagggccggggagacggcgtcgtccttgaccgcccggatcatttcggccagaagaccggcctcgagatcgaggacggcctcccccagctctttccggccggcgctgccgtacccttgatagtggttgggataccgggcgtaccaccagatgcccgtataagcgtgtttcaggccggccagccggtcctggttctctccgctttgcgttccggcctggtcgaggcggacgaggtcgggacggatggccagcatctgggaggtttccatctcgccggcatggccgtcgagcgttgtccggcgcatttggtcgatccgggcctgccgggcggcgtccggctcgggttggaacaggtagacgacataatcctttttccgggcgagctgaatctggcagaagtactgcatcaactgctcgctgccgccgtggccgttgaccaggatgatcttcttgaggccgttgcgggccagttcctcacacgtttcctggagcaggtcgaggatcagatgggagctgtaggcgatcgtcccgggctggtggcgggcttcgaaaatctgcccgaaataataaggcggaaagacgattgcgtattccttggcggccgcccgaagcgacgtctcccggcactcatagagatcggtgccgaggggaaggtgggggccgtgcttttccaggatgcccacgggaacgacgcaggtcgaacgggacgcctcgaccgcccggacgaagtccggagaggtcagctcctcataacagacaggcaggggcttcgggccggcatcctgaacggcggccgcggcggccggaccggcggcgagaacggccgcggcgagggcgatccggacgagggatggaatcgagagattcatgcgaacctcctttcggcgttcgatgatttctccttttatatatcccccgtccgggcaagtcaacgccgcacaacggacggtcagggcgacgggaactcttccgcctcggtcgttcctcgctcgctcgacgggccggatcccgtccctcaaaacgaaggcatggtcgttcgtttaagggcgatgtcgtcgccgccggccggtccggcacccgtttcccggctttgccgcccggcgatcttccggcggccgcggaaacgcgaatcccgagtcttgtgtctcgctcgttttgcctctacaatcggacgcaaggagcccgattatgaagaacatccggatccgcctcgccgcggcggttttggccgcgttcgcagcgcttttcctctccccgtcggccgttttcgcccgaaatccggccgtgacgcgggccgcgtccgcggccgatgacgccttggccggccgaatggacgcctttctctcctcgatctacaagcccggcgagcccggggcggccgtcctggtcaaaaaaaacggccggattctcctgcggaaaggctacggcctggccgacatggagctcggcgtccccatcgctcccgacatggtcttccgcctcggatcgatcaccaagcagttcacggccgttggaatcctcaagctggccgagcagggcaagctgtccctcgacgacgatgtcaccgcgtttctccccggctatccgacgggcggaaaggccgtcaccctcgagcgtctgctgacccacacctcgggcctcgtcagctataccgatctgccggaatggctgccgctccggcggaaggacatgtcgctcgaggagcttgtggatctgttcaaggacaagccggccgagttcagtccgggcgagcgctggcaatactgcaactccggatacgttctcctcggggcggtcatcgagaaggtctcggggatgacctacgcggagttcgtccggaaggaaatcttcgagcccctggagatgaggcattccgattacgacagcccgacccggatcatcccccgccggatcgggggataccagaagggaaacgagggatacgaaaacgcgccctacctcagcccgacccagccgtatgccgccggggcgcttctctcctcggtcgacgacatgaccgtctgggtcgagtcgcttctcgccggccgcctgatcaagagagaaacgctggagaaggctttcactcccggcattctcaataacggccggacgaccgggtacggctacggctggttcatctcgacgtatcacggccgccggatcatcgagcacggcgggggaatcaacggcttcatcacggccatgttgttcgcccccgaggacggcgtttcggtcatccttttaaccaacgcgatcggcgacgggcgggatccggaagccgacgccttccgcctggcggctctcgccttgggagatccttacgtcgatcccgcgccggtcgttttggaggaaaaagacctcgagccgctcgtcggcgtctatgtcaacgaaaggggcgttgaccgtttcatcacccgggagggaggccgcctcttcgcccagcgggccggcggagccaaatacgagctgttccccctctcggcggacgagtatttcttcaaggattcgttgagccggatgcgggtccggcggaaagccggagcggtcgagggcttggagttcaccgagcggatcgggccggtcgacgattatgcgcggacggaccggccgcttcccgccccccgggtggaggcctctctcgatccggccctctacgaccggctgaccggcgtctatgagctcagcccggatttcacgatcacgatcaccaaggaagacggccggttgatggggatggcgaccggccagcccaaggtcgagctttatcccgagtcggaaaccgatttctttctcaaggtcgccgacgcccggatcgtcttcaccctggatgcctcggggcaggccgtcggcttgacgctctatcaaaacggcctggccctccccgcgaaaaaaatcaagtcgtccttcgagacgccgttctactgaaccgcgggggatgtccaggcggcccgggcgctcttcgccgcccggtcgtggatcgcaggccggggcccctgttcggccggcgggccggggcgttcatcccgggcgttgggatcgaggccgctttcattctcctctcggcccggaaagcggatatcgtcttcggcccggtcttcgttccccggccgtcgcggccgcggctcgaaagagacgcccgccgccgggaatcgggccgcgggctttctttcggttctttacgggatgggaggccgcgcggcgcggccgaagccgggatacgaggtccgcggggagcggactcccacgttatttttgaaaggtccggacgaaagcacgcagcagcttggccagccctttcatcctcagggaaatcgtcttccggtaaaggaaatcgagccctccccggaggccggcgtaaaccgaccggtcgtgagggtaccaccacatgttcttctgaacaaacggcagggcgtcgtcgacgacgacccgcgtccgggtcatttcctccaggccgagggcgccgtgcgtccggccgaggccggattccttgaatccgccccacggcgtttcggccaggccgtggctcatcaggtgatcgttgatggtcaccgtgcccgcttccagccgggaagcgatcgcccgccccttgttccggtcgcgcgtccagaccgaggcggtcaagccgaggttcgagcggttggccttctcgatcgcttcctcgatgctctccacccgggcgacggccacgatcgggccgaacgtttcgtcctgcatcgtgatcatcgattcgtcgacgttttccaggaccatcggggggaagaacaacccgtccgcgcttcccttcaggcgcttggagaaatacgttttccgggctcccttgcccagggcgtcctccagatgggcccggatggccgcgagctgctttttcgtggccaccgccccgacgtcgacgccgccgcccgcgtcgatcccgtacgtgagggattcggtgatcccgcccaggatcgcgacgaactcctcatagacgtccttttccacgtaaatgcgctcgaccccgccgcaggattggccggcgttggagtatcccgcccaggccgccccggccgccgcccggcggaggttggcgtcccggcagacgatcatcgggtcgttgcccccgagctcgagcgacagcggaagcaggcgcggcgccgccgcggccatcagcttcttgccgacggcgacggacccggtgaaaaacagcttgtcgatcccggcatcgatgaacgccagcccggcgacgggcccggccatgttcacgatatgaaaaagcccgtcgggaaaccggccggcgccgatgatatcccggatgagccgggcgacctccggggtgcggctggcggctttcaacaggacggcgtttccggccatgaaggccatggcgatctcatggaaggggatggcgaacggataattccaggggctgatgatcccgatgaccccgtaagggacatgctcgagacgggatttcttgttgaggaagaggatattccccgcccggatctttttcggcttcaggaatccggccgcttttttggcgtaataggtcgcggacatggccgccggaaggacctcggcgctcaaggcgtcgatccgggtttttccgttgtcccgggagatgatctcggcgatgcggtcggcctcggcgacgatcgcgtcccggacggccagaacgtggccggcccgcgcccggaagctcagggcggcccagtctcgctgggccgcccgcgctttctccaaaagacccgggaggatgttcggccggtcctccggacaagctcgggaaatatttccgtcgtccggaggggcgggcgccggcccggacggaggatcgttgctcaccgctgcccctttattctcagatgccgccgtccgattctttttattccttgatgccggccagatcgaggatgaaggcgtactggacggccttctcccgcaggcttcggaaccggcccgaggcgccgccgtggccggcgtcgagattggtcttgaggaggaggatatggtcgtcggtcttgatttcccggagccgggcgacccacttggccggctcccaatactggacctgcgaatcgtggagcccggttgtgaccagcatcgccgggtaggccttgggccggacgttgtcgtacggggaatacgtcatcatgtactcgtagaaaaccggatcggcgggattgccccattcgtcgtattcggaggtcgtcaaggggatggagtcgtcgagcatcgtcgtcaccacgtcgacgaagggaacgccggccaggatgcctttaaagagatcgggccggagattgacgaccgcgcccatgagcagccccccggcgctcccgccctgggcgaagagacgatccggggcggtataaccgtgacggacgagaaactcgccgcaggagatgaagtcggtgaaggtattcatcttcttgaggagctttccgtcctcgtaccaggatcggcccatctcggacccgccccggatatgggccagggcgacgaggaagccccggtcgaggagcgagatccgcggcgcgttgaaacccgggtcggtcgaatagccgtaggacccgtagccgtagagaagcaagggagccgggcccttgtcccgggcgcctttccggtaaacgaccgagatcggcaccagcgtcccgtcgtaggccggggccgaaaggcgctccgtcgcgtagtcgtcgggattgaaaccggggacgtcctggctcttgaggatggaggattcccgggtcttcatgttgaattcgataacggccggcggcgtggtcaaggagttgtaatgataccggagaagcgcggtccccggctcgggcgtcggagcggcgaagaccatgtaagccttgtccggaaagggaatgtcatagccttctttttcccccttcgggatcacccggagatgggacagcccgcctttctgctcgcgcaggaccaggaaatcgtcgaacaaatgaaatccggtgagatatacgtcgtcccggtgggggatgacctcgcgccattggccgcgggccgtccggccggggtcggcttccatcaggcggaaattgcgggcttggtcgttggtcaaaatggtgaaaacgccgccgaggtggtcgacgttgtattccaggccgcgggttctcggctggaagacggcgaagccgtcgaggggccgggccgcctcgagaaatcggtattcggtggtcagcgtgctggaggcgacgaggaagatgtattttttcgagcggctcttgtcgagcccgagcgcgaacgtcggatcttcctcgtggtagatctcgacgtcggccgaggccggcgcgccgacggcatgccggaagattttataagaccggagggaatcgtcgatgaccgggtagaaaacggttttattgtcgtcggcccagacggcgtatccggcggtcatcgggatttcctcgggataggttttcccggtcttgaggttcttgaagcggagcttgtattgacgccgggagagcgtgtccacgccgtacgccaggatcttgttgtcggggctgacggccgtcccgccgatctggaaatagctcgttccggcggccattttattgccgtccaggaggatctcctcccggccctgaagcgtcttggccttgcggcagagaagcgggtaatcccggcccgcctcgaaacgggtgtagtaccagtagccgttttcgaaatacgggacggacatgtccgtcggctggatccgcccgttcatctcggcgaccagcttctcctggagagactcggtcggcttcaggaccgcctcggcgtaggcgttctcggccttgaggtactccacgaccttgggattggccctctcgttcagccagtagtactcgtccacccgggtctggccgtggatcgcgagctccttgcggattttctccgcggccggcggacgcgggatctcctgggcttgaagaaatcccgcggccaggaacgccgccaggatgattccggcggccgtccgccgcgagggaaaacgcgtcgatttcatgagtctctcctttgagatgaaaatcaaaacttgaaccggagccccagccgggctgaatatccggtgaagtcaagccgggcctcggccgcgccgcggaggcgctgccgggagctcaaccccaggcttttggccgtcggcaaagcctcgtagatcaacagctcgggaatccacgggccgtcggtcgtcatctgcagctcgtaggaatagaggatcccgcttcggggctcttctgagattccggacttgggatggaaccagcccggcgtcccctcggccgtgcccgtgaagccgtcgatgacggcccggcggccggccgcctcggcgaccagggcgaggcgttccgacaggcggatttcgatttccaggccggcctgaaagccgagggccgaggcgtcggccctctggctgaaataaagggtttcccctttctcgttgactccgctccagacgtcggagaagtggccgaaatacagcccggccccgccgtagacgagaatccggccgagccgggacctgaggacatcggcataaacattggcccggacggggacgaccgtcaggcggtcggtcatggaaaacgaataaagatccggcgtccaatgctttgtcgcgaaattcatcgacccggtgctttccacccggacgtattccgctcccaagccgaggccgaggcggccgaattcgacgaggagctcggcggccgcgttgtaaccgttgtgaacgggcgggatgtccccctggagaacgaccaggttcttggccgcggccgcctcggcccggaaataagcgccgaggtattcccggaccgtgttcgggaatcccgtccggcagcgggccgtcccgccggagatcttgaggctgaggggacgccgggacggctccggaacggcgggcccttcctcgggtcgaagggacgccgtttcgaccttctcggcctcgtcccgatggatgaagccgatcaggtcgtattcgccccgcccgcccggaagaaagacgcggtaccaatcgttctcgatgtcgtcggccgggaaaacggctcccttcggcacggttttcaagagcgagctttgcgggctgggaagaagccggacatggccctcgtcgacgatgatccggattttcaccgcttgggccgcccaccagccggggccggccaggaaaacgatcattcccaaaatcgcgccgacaaatggacgcctcatgttgattgctccggaatgtttcgcggtccgcattttatcataaaacccggtccgggcggctttttccgatctccggggtgaagcctcctcccgtttgaattataatggaataaaatccggatccaaaaggtattctgaatgaagatccgcgaatgccgggcctccggtgcaaggagagatcatgaagccgtcgctgaaaaaagcggttcccgccgttctgctcctgtccttcctgtcgaccgtccccggaagcgccgttcggctaaagccgggtcaggacaagccgaaggtttcgaccgcggatttatggaagctggtcgaggccgccgaccgtgacggcctcccccggacggccatcgagcacctgaaggagatcgtccggctgtccctcgaggagaagagggagggcgaggctctccgggccctgacccgccgcctggtcctggagtcggtcgtcgagggcaacaagcccggggcccgggtggcccggatccgggaggagatcgaccaggccccggaggggatgaaaacgatgctccggaccatcctggcccaatggtaccggcattatttctcccggaaccggtggcggttcgcccaacgctcggcgaccgccggcggaatcgacgagaaggatttcacgacctgggatctccgccggatcgtccgggagatcgacgccctctaccaggacatcctgaaggatgaggcgtctttgaaaagaacgcccgtttcggtctatcgcgattttctcgagccgggcgatccgccggagtccttgcggccgacgatgttcgacttcgtcgctttcgaggctctcggcttctacgtgtcgggcgagcgggccgcggccgcccccgaggacgccttcgtcctcgaagccgattcccccgtcctcggcccggcggacgaattcatcctttaccggccggagacgaccgacgaggattcgccggcgctccgggcgcttcgcctctatcaaagccttttggaattccaccgcggcgaccgggaccgggacgtgttcctggacgccgatcttcatcgcttggaagccatgcggaacctggccgccggcgaatccgcctcggcccggtacctggagcggctgaaggaaatcgcggagaagaatccggcctcggccttttccagcctggccgattatctccgggcccgggaattgaaaaaccagggcgacctggtccaggcgtacgccctggccgaccgcggacgaaaagcccacccggcctccctgggcggacgcaactgcgacgccctgatttccgacatcgcctcccgcgatttcgatgtccggaacgaacgggtcgtctcccccgggacatcatcggtcctggacgtccgctaccgcaacctgaccgcccttcatttccgggccgtccgggatgacttcgaggcgcggttggcggccgaaaacgcgggggatcttttttggccgggtgacgagcccgtccgcgagcttctcgagcgggagccggcggccgcctggtcggccgatctcccggcgacggccgacttccaggcgcgcgccgagcgggtcgcggctccggccctgcccccgggattttatcgccttttagtcagcgccgatccggctttttcccggggaaagaacaagatccaagccggctcgttctgggtgagcgaatgggggattgtgacggccggggcgggacgggccttggagggattcgtcgtccgcggggtgacgggcgatcccgtttccggcgcgtccgtctccctttatgattgggattacggaacggacaggctggtcaaacgaggcgagggccggaccgacgacgccggcgccttcgccctcgccgcgcccgaatcttattccaaccgtcttttggtcgcccggggggagaaggggatcgaagtcgttgaaacccaggttttaacggggtccggccggccggcctcttacgaaagggaacggacggtcttcttcaccgaccgctcgctctaccgtcctggacagacgatccacttcaagggtttgtgcctgaaggcggacgagaaccgagccgattaccggatcctgccccggcggaacgtccgggtggttctccgggacgccaatgcccaggaagcctccgtcctgactctcacgaccaacgatttcgggtcgttcagcggggccttcaccgccccggccgaccgcctgacggggacgatgacgatttcgaccgagaatccccggggatcctgccccatccgggtcgaggaatacaagcgtccgaagtttcaagtgaaaatcgacgttccggacagggagttccgtctgaatgacgagatctccgtgccggccgaggcgatgtcctacgcgggggcgccggtcgacggagccttggtgaaataccgcgtgatccgggaggtccgctatcccgtctggtggtggtggaacacgccggcccgcggggaatcccgggaaatcgcccacgggacgtcccgaacggacgctgaaggaaagttcatggtcgttttcaaggccgttcccgatccgaagtcctccccctcctcccagcccgttttcacgtttaccgtcacggccgacgtgaccgacggggcgggggaaacgcggagcgcggcgggaaccatccgggccgggtacacggccctcgaggccggtttggccggctcggactggcaggaaaagggcgagccggtcgtcttgaccgcgacggcggcgacgctgaacggcaagccggccgcggccgagggcgtcgtcgaagtctacgccctcaggggaccgggccgtcccgtcccgcgggatctgttcgctgaaagcggggaccggggccgggttcggccctccgggagcgccgcctccggggattccgagacgatggattggcgccggtggccggaaggacgcctggccggacggaaggaattcgccgtctccgcggtcgagggttctccctgccggctgtcctgggatcttccgccgggagcctaccgggcgatcctcaaaaccgcggatcgttacggaacggcggtcgaaagccgcttcgctttcctcgtcctcgatccggccgccgatcgattcgccgtccccgtcccgtttcatgccgccgcccgctcgggctcggtcgagccgggcgggacgttcgagctgttttgggggacggggtacgagcgcggtccggtcttgatcgaggtccaccgggacggccggcgcctgcaacgttattggacgcgggggaccgcgacccaagccgtcgtccgcgttccggtcacggaggccttccggggcggtttcgtcgtctcggcggcgatcgtcaaggacaaccgcttgtaccgggaagaccgccgggtttccgtgccctggacgaacaagcggctcgaccttcggtggaaaacgttccgttcgaagctccggcccggccaggacgagacgtggtcgcttcaggtccgggggccgaaagcggacgtccaggcggcggagatggtcgcctccctttacgacgcctcgctcgatcagttctatccgcacggcttcggcgggatttccgcgtttttccggaatgacgcgacgtatctccggtcggggttcaccaaccgggcggagccgctggggacgtttttcgaccggctcaatccctcccgttcttatggggaggccgtttacatccatttcccccggatgatcacggaatcgctgttcgatttcgattacggcgaccgggtcctgatggcgaccgaagccgtcccggcgcccatggccgcctctcgggaagccaagaacgaagtctcggggggcgtaatcggaggcgtcctgggaggttccgccggcgaaaaggaagccgggaaggactccggcccgccgccgccggcgatcgacctttcctcgatccaggcccgggtcaatctcaacgaaaccgcgttcttctatccccacctcctgaccgatgccgaaggaacagtcaccctcgagttcaagatgcccgaggccttgaccgaatggcgctttctcggcttcgcccacacgaccggcctgcgaagcggatcgatcgaggcggcggccgtcacccagaaggagctgatggttcagccgaatccgccccgcttcctccgggagggcgatgtcctggaattcacggttaaggtcaccaacatgaccgagaaggaagcggccggcgcggtcgagctccgcttcttcgacccgcgcaacgacgcgccgctcgacggggcgctggccaacgcgaatccgaagctttcgatggcgattccggccaagcagtcgcggacgttttcctggccgatcacggttccggacggcgcggagaccgtcggcttccgggcggtcgcggccgcggccgggttttccgacggcgaggaggggatggtccccgttctcagccgcagcctgatggtccgggaatcgatcccgctgtggatcagcggccgcggggaaaagcgcttccggttcgacaagctcgcgcaatcggccggctcgacgactctccggtccctcggcttgacggtgcagatgtcttcaaatccggcctggtacgcggtccaggcgctgccttacttgatggaatatccctacgagtgctccgagcaggtcttcaaccgtttgtatgccaacgccctggcccggaagatcgccggctccgatccccgcatccgccgggtcttcgagctgtggaagggaaccccggccctccagtccaacctggagaaaaaccaggagctgaaaagcgtccttctcgaggagtctccctgggtggtcgaggccaagaacgaatcgcaggccaagcggaacatcggactcctgtttgacgagaacacgacggccccggccttgaagcgggccgttcaaaagctggtcgacatgcagctccccgacgggtcgtggccctggttcccgggtggcccgggcaacgactacatcaccctctacatcgtgaccggcttcggccggctcgagcatctgggcgtcccgggaatcgcccgggaggcggttctccgggcggtcggccggctggattcctggatccgggaggtccatgaacggatcctggcggacaagacggaaaagctcaacaacctcagcccgtcgatcgctctttatctttatgcccggagctttttcctggatggatgcccgattccggacgcttcgaggaaagccctcgactatttcctggggcagggagcggctttctggctccagctcgacagccgccagagccaagcccatctcgccctgggcctcaaccggttcggggacgcggagaccgctcgaaaaatcacccggtcgctcaaggagcggagcaaggtggacgaggagctcggccggtactgggccgagggagaggcgtcctggtggtggcgccgggcgcccatcgaaacccaggcgatgatgatcgaggccttcgacgaggtggccggtgacgcggccgccgtcgaggaatgccggatctggctgctcaaacagaagcaaacccaggattggaagacgaccaaggccacggccgacgccgtgtacggactgatccttcggggggcggacctgctggcctcggatgaaatcgttgaggtgatcctgggcggccgcaaggtcgagccggagaaggtggaggcggggacgggcttctatgaaaagcgcttttccgcggccgagatccggccggaaatgggggaaatcgaggtccgcaagacggacccgggcatcgcctggggcggcgtccactggcagtacctggaggatatttccaagatcaccccccacgagcggaacccgctccggttgaaaaaaagcctttttaaaaaaacgttcaccaggaaagggccggaaatcgagccggtccgcggccccctggcggtcggcgacacgctggtcgtccgcctcgagctgcggaccgaccgggacatggagtacgttcacctgagagatcaccgcggctccgggctcgagccggtcaacgtcctctcgacgtaccggttccgggacggcctggcctactacgaggcgacgaaggacgcggcggctcatttcttcatcgatgatctcccgaaaggcgcctatgtcttcgaatatgagctgcgggtccagctctgcggccgctatcagaacgggatggcccacatcgaatgcatgtatgcgcccgagttcaacagccactctgaaagccgggttttggaggtgcgctgacttgcggccggggattcgtgatgtgatatcatagggcgccgcgggctcctccggggagccgccgcgattccgcgcctgaaagggcaaaggagaaactggatggacatcgtcatgaccacggaatccgacgttgccgttttctcgatcatcggccatctggacgccgtttcctcgccggagctggagggccggctcggaacgtggttcgaggagccgggaacgcgcctggtcctggatctcaacggtctcgaatacatcagcagcgccggcctgagggtcatcctctcggcggcgaaaaagatgaaggcccggaacgggaagctcggcttgtcccggcttcagccccgggtgagggaagtcttccaggtgtccggcttttcctccatcatcccggtcttcgagaccctgcccgcggcgcttgacgccgtccggtgagggcggcccggaaaccgaccgccatggaacgcctccggcggcccgcccgcatggagtttcttcatgagcttcttgaattcatcgacgccggcgccaaacggctcggatttgacgaatcggcccgcggccggatccgcctggcttccgaggaagccctggtgaacgtcatcctccacgcttatgccggcgcggacggagaggtcgaggccggcttgtcgggaggggaggatcgttcgctccggatcgagatccgcgaccgaggggccgccttcgatcccttggccgaagccgagccggatcttgaagcgggcctcgccgaccgcaagatcggcgggttgggcatctttttcatccgggaagcggccgaccgggcggcttatcgccgcgagggggaggagaacatcctgaccctttattttatccggacgtaaagggagaggccttcgccgtttcgggttccttttttttcgaaaccagggtcaccagcacggccagggtcatggcgatgatgaacgtcgaggcccgggcggtgaccgttttctccagcccggccagcatccaaacgacggtggagacgagacccgaggcgagagcggtcacgacgccggccgcgttgaagcggtcccagtagaacgacagaagcacggccggggcgaacgagcagccgattcccgcccaggcgtagctgacgatggaataaatgagatctttcgtcgtcaaggccaggaccagccccaagacgccgacggcgacggtcgaaaggcgtgaaatcaagagcagggtgcgctcgcgggcccggccttttttcaggatgcccttatagacgtcctcgctgatggacgtggcggccacgagaagcatgctctcggccgtggagatcatggccgcgaccgccccggccaggagcagggccgccagccagcccgggaacaggttgttcaggatgaagggaagaatcatctcggaatcggccaccgccttggggccgaagaggacatgggccccgaggccgatgatgaccacgccgctgtaggcgatgatcgtccagaggacggcgatgttccggcctaagcggacgtttttttcgtccttcatgcccatgaaccgggcgttgagctggggctggccgccgaggtacccgaaaaaccaggcgaggttgttgaagatcatcaggccggcggcgaatcccgccagccccccggtcagcgagccgaatccgggtccggccgcggcgaaggcttgagccggggagacgggggaggcaaggatcttgacgaggaggatgacgggggtgacgacgagggtggtcagcatcaggatggactggaacgtgtccacggccacgacgctgacgaatcccccgaacgtcgcgtatcccaggatgacgacggccgagatgatcatcccccagaacgggctgaagccgaaggtctgttggatcgtcttgcccgcgccggcgaactgggccccgacgtagaaaacgaaaaagaagacgatgatgccggtcgacagaacccggatcaagttggcctttgaggcgaacttggccgcgaagtactcgggcatggtcatggccttgtaagcttcggcctcggcccggaatttgcgggccaggacgatccaggccgtggagatgccgagcaggcagccgacgcccgtccagatgccggacaggccggtggcataaatgaatcccgtcaagccgagcagcagccaggccgactctcccgtggcccgctcggagagggccagcatccagccgggcagcttcttgccgccgaggacgaagtcggactgggatttcgttttccgggcctcccagaggccgaggcacaaggtcaaggcgaagtaaaggacaaagacgatgatcatgaccggcgatcctttcggtaacgtttccggcgaaggttcgcggccaaaaatattacagaatggagatgtttttcaagtcccgccgccgtccgcctcacggcccggcttacatgtatttgccgctgatgtaattcgagagctgttcgatcagggcgtctttctccgagatgatcgccttcacgacgtcgccgatcgagaccaggccggtgaacttctcgccttcgcagaccggcaggtggcggacgtgcttggcggtcatgagaaccatgcattcttccacggtgttgtccgggccgacatggaacatcttgccggccggggtcatgatttccgaaacaagagtctccttggaggatttcccgaacaggatgattttccgggcgtaatcccgctcggtgatgatgccttccatccggcccttgtcgtccatgaccatcagggccccgatccgcttctcggccatgagcttcaaagcctcgaacaccttggcatggggcgagatggaccagactttggaacccttggcggcgaggatgtccttgacgtttttcatgattctctccgtaacggctgtttgatctcaatgtatagggaaatccggacgatttcaagggccgattttccggcccggttcaggccggcgggcgacttgacaaatgaagaaatcaaattaaattactagatatatcgcgttaacgtcttgatgtgtcgaagggagaaagggaaatgcagcatcggccgcattacgggaattggggacggggcgagcggatctttcacaagggggatttcaagtacctgatcctcgatttattaaaggagaaaccccgccacggatacgaaatcatccgcgagcttgaaaaccagttcaacggcttctatacgcccagcccgggagccgtatacccgactctgcagtatctggaggagatggggcatgtcacgtcccagcccctggacgggaaaaagatctacaccatcacggaatccggtctcgccttcctggccgaaaaagccaaggagacgtccgagatcaaggcccagatgaagaactggtggggatgctacggggcggagtttcgggatgaaatgcgggatgtcatgcggacgctcggcgatctcggcaaaacgatcggccagaaagcccggcaagccggagtcgagaagatgccccaggtcaagcaagccctggccgaggcggtcaaggagatcgagaagatattcaggtcctgatccgccggcgggcgcgtcgggcttggtcctccgtcgtgactcctctcttgagcgggacgctccgggaccgccttgacagaccgccggggcggtttgacatccgttccggggggaggctatgctgtttgcctccttcggcgcgaggcatccgccggaaatgaaaggcaggaggaagagatgaacaagcgaacggcggcggcgtttctcattgcggcgatggtctttttatcggcgggagcggccgcggcggaaggggaggccgaccgcgacggccggatgcaatggtggcgggaggcccggttcggccttttcattcattgggggctttacgccgtgccggccggggagtggcggggcaaaacggattatggcgagtggatccgcgataccgcccggattccccttcaggtctatgatcagttcgtcggccggttcaatccgagggaattcgacgccgaggcctgggtccgggcggccaaggacgcggggatgaaatatatcgtcatcacctcgaaacatcatgacggattcgccctcttcgattcgaaacagaccgatttcgacattttggccacgccgttcggccgggacgtcctccgggagctggcctcggcctgccggagccaggggctgaagctctgcttttattattcgatcatggactggcatcacccggattacctgccccggcggccgtgggaggaaagaatccggccggtcccggggggcgactttgatcgatacgtcgcctacatgaaggcccagctccgggagctgttgacccagtacggggacatcggcgtcttgtggttcgacggcgaatgggagaacacgtggaacatcgaccgcgggcgggatctctaccggtacgtccggtcgcttcagccgtcgatcatcgtcaacaaccgggtcgggtcggaccgttccgggatggaggggttctcggcggcccgggacgccccgggtgatttttccactccggagcagcaggttcccggccgggggctccccggcgtcgattgggagacctgcctgaccatgaacgacaactgggggtacaaccgggccgatcagaactggaaatcggtccggaccttgatccggacgctggtcgacgtcgtctccaagggcggcaatctcctcttgaatgtcggcccgaccgccgagggagtgtttcccggcccgagcatggagcgcctggcggccatcggccgctggatgagggtcaacggcgagtccctctacgggaccacggccggcccgttcagcgacctgcgctggggccggtcgacccagaagaaggatggggaaaacaccctgatctttctccatgttttcgattggccggagaacggctggctcaatcttcctccgatcgccgaggaactccggacggcgtatgtcctttccgccccggccaagcccctgccggtcgagttccgggaattcgggccgcggatccgcgtcccggcccaggctccggacgccgatgacacggttatcgttctcgtcaccggggcggagaccaaatcctacgccccgccccggatcacggcggccgccaagtcttttctcgacgtcctcgaggtgaccatcacgggcgatccggccttcaccgggatccggtacacgctcgacgggtcggaaccgaccctcgagtccccgttggcggccggccccgtgcgcttgaccgagacaacggtcgtctcggcccgcggcttcatcaagggcgttccggtcaccgggacggctcaagaaacgttcaggaagaccgccctccgcccgcccgacgacccgggcggcggcctcaagcagggcttgagcttcgcttattacgagggcgagtggacggcccttcctcaattcgcggggatgaatccgatccgccgcggggaggctctccacatcgacctctcccaaaaacggcggcacgaaaactacggattcgagttcaagggattgatccgggctccggaggacgggctttacgcttttgccttggaatccgacgacggcagccggctctggatcggcgaaaccctcgttgtcgacaacgacggcgtccacccttcggccgagcgcggcggggccatcgccttgaaagccggattccatcggatcaccatccggtatttcaaccggacggggggagaggagctcaaggtgttttggaaggccccgtccggaccgaaacagctgatcccggaccggatgctattccggagggaagcccgcttctgaggatttccccgatcgcccgctcgacggggacgggctctcagcgctcctctttgggaatcaccacccacatgatcacgtaaacgagaaggccggggaacgcggcgctgaggatcgaaccgacgacgtagacgacgcggaggagcgagacatcgaggccgaagtaatcggccaatcctccgatcactcccccgatcatccggttggtcgtcgaccggcgcaagacttttctggattcgttcatttttcgactcctccgtgatcaagaaccctcgcccggagagaccgtccgccggccaagcgtccgcgcctccctcaggccgccggcgccttctttttcccgaaccgcaacttcatcgtcaggatcttgtcggtcgagaagatccgggcggcgtagatcaccaggacgatgaaaacgagaagcatgtagcccagcccggccgcgatcatcccgtaatggccgaggtagatattctgcgaaacgaggaacgggtgggagaagggaatggccaggatgaggatcttgaccgggagcgagagcgtgtcgatgtcggcgaacagggagatgaaataggggatcatgaccatgaacatcaggggcatgatcatgttctgggcgctccggaagtcctcggccaggacgcccaggatcatggccatggccagggcgaccaggatggccaggaagagggagaggccgagaatgagatagccggtcgtgtcgaacgtcaggccgagcttctgcatcagggcggttccgcttgcccgcgccccggccgcggcgacttcctcgcccatcccgccgatgaagcccttgaaggcgaacatgtagactcccgccgagatcaggccgacgagtccggccgcgaacatcttggcggtgatgatggaggtccgtttgatgggcaccgtcaggagcgtctccagggtcttgttctgcttctccatggccacggccgagatgaccatctgggacgaatagatgacgatcatcatcaggacgatagggatgagcatcgactgctgggaaagcattccggcgatcaagccggccgatccctcggccgtccggtcccggacgacgacgaagtcccggctcttgatcgggcgcttgaggctgaccgggtcggccccagggagcttcgcggccaggaagtcgttggagagggtttcgttcaaggccgagatgacgctttggacgacgacctggccccgggctccgatcagggaaaagctccgcatgaaggaataggtctcgatctcgctgggcttaagctcggccagcgaatcgccgaatccggccgggacgaccagaagcagcttcgactcgccggccttcgccgaggccagggcttcgtccttgcccttgcctgtctggtcgacgatcttgaaccgggccgattccaggcctttcagcagagcccgggaaccctccgagccgtcctggtcgaggaccgagatcgtctggattccgacggccttctggacttccttcttgctgatctgcccgatggcgttgaagaggaggacggtgaaggccagggagatgacgagctgcttggtcaccagctccttgacttccttctgcagcaggtttttaaagcgtttcatcggagggaactcctgaagacctcttccaggttcttcgcggcatgcttggccttgagctcgtcgggcgtcccggtgtcgaggatccggcccttgtcgatgagtccgacccggtcggagaggaactcgatctcgagcatgttatgggaggagagaaggaccgaggtgccttccttgacgtagcggcggatgatctcccggacgtccagggcgttgaggacgtccaggcccgaggtcggctcgtcgaggatggccaggaccggccgggtcatcagggcccgggccaggagaagctttcgggtcatgcccttgctgtaagtgccgaccttcgtcttcagccggttcccgagctcggtgatggccgcggcccgctcgacgaactccttttcctccccggcgtcccggccgtagaaaccggccatgaagcggagataatccattcccttcatatccttgtaggccccggcttcttcgggcagatagctgattttctcccggacgaaatcgggctccttgcggagatcgcggtcgaggaaggtgatctcgccggcggtggacgtcaagagggtggcggcgatgcggagggtcgtggtcttgccggccccgttcgggccgatgagggcgaagacctcgcccgcccggacctcgaaatcgatgccggccagagccgcgtgggcgccgtaggattttttcaatccccggacggtcaggacgttggacatggcgactccctgaaataaaaaataaccttgatattctattccatacgaaagagaaagaaaaaagtttctttccagcgccgccggcccggcgcctcttttcccctcgccgggcaggatcgaaattaaaagatcaggagcatcggagggcgcggggacggcccgcccgagtttcgaaaaattcggcgtgcagggcccggacggccggcagggcgtccgctttccgcaccagaaagtaagcggccgcgcccgaggctcccgaggaaatcatctcgacgttgacgccgttgccggcgaccgcggcgaagacgcgggcggccaggccccgctccgacgagagtccttctcccaccgccgcgaccagggccaagttcgtttccaagtccacccgggtgaccactccgcggcggacggaccgcaggatccggcgggcccgccgggcgtcctcctcggcgacaaggatgttgatcgccgtctgggcggtgatgaccgaaaggatgttgacgttccgttcggccaggctccggccgatgtccccgatgacgcccggccggaatcccacgcccggtccggagacgcgaaggacggcgatccggtcattgagcgtgacgcttttcaggacggtttcggccgttcctccctcggccgcgatctccgttcccggacggtccggccggtcaagatgccggatccaaatcgtcccgttctcccgggcgatcggctcgagggcccggggatggaggaccttggcgccgaagtaggaaagctcggccgcctcggtgaaggacaggcgggcgacgggcttggccccggaaacccgccggggatccgcggtcatgaagccgtccacgtctttccagatttccaggagggagacgcggagggcggcggcgacgaccgccgcgctgtaatccgagccgttgcggccgaaggagacgaggcgccccccggcggccaggccgtaaaacccggtgatgaccgggacgaagcggcccgcctcgatcccgagggcgttttttcgaacagcccggcggaaggccgcaaggtcggccgtcgccccctcggggacgtcgtcggccgccaggccgatctgctcgctttccagagcccgggcgtcggccccttcctctcggaggattccggccagaagcaaagccgcccagcgctcgccgaagctcaagacatgagcccgggcatagggcgagatttcgccgatcaaggccgcgccccggaggagccgttcgagccgggccaggcgatggccgatttgggccgcgatctcggcccggatctcccgcgcggagagaaggcctgaggctaggcggtcgttctggagccgaagggccgcgatcgtccgggcgatgccggcttcgtttttgacggctcgggccaggccgcgttccaactcgtcggtaatccccgaaacggccgagacgacgaccgccggcggaacgggctcccgccggatgacggccgccgcccgccggaagccgtcggcgtcgcgaagacacccgccgccgaatttcatcactttttgaaatttcatccgatcctcgctattcgtggagaagtccttgccgggcggccagctcggcggtcagaagacaggcgccggcggccccgcggacggtgttgtgaaccaggccgaaaaggtcgaggatgcggccccgggagcgaagccgcccggccgtcacggccattccccgggccctcgccggagttcccgcccagacgtccaaagccggctggggccggttgtcttcggtccggacgatgaccggccgctccggcgccgagggcaggcccatctcctggggaaggccgcggaaggaggccagggcttcggccgcggcgtcctcgccgacggctccctcgaattcgacggagacgcttagaaggtgtccctcgcgaaccgggacgcggcagcagctcgcccgcaccgggacgggccaaggaatgaaaccgtccgcctcgagggtcccgaagatgcgaccgggctcgcgggccagcttctcctcctcgccccggatgaacgggacgcagttgccggcgatgtccatcgccgccaggccgcgccggccggcgcccgagatcgcttggaacgtggtgacggcgacggaacggattccgaacgggcggagcggggccaggagcaaggccaggccggccgtggagcaattgctgtcggcggcgatgaatccgccgcggttggttttccggcgggcggcccggacaagatggtccgggttgatttccgggacgacgacggggacgtccggatcgccgcgtcgggcggaagcgttggtgaacacggcaaggccccggctctggagggcgtcttccgcggctccggccgccgaggcggggagggcgctgaagacgacccgggctcccgaggcgatgaccgcttcgaccgaagccggttgaaccgttgtttttccggcctgggacggaagatccccgccggccgtccattcaacggccgcggcgtacgggcgtccggtcgagcgctccgagccggcgagaagggcgatttcgaaatcgggatggccctcgagcatccggacgaaatgctgccccaccaagccggtcgcgcctaacacggcgacgggatatttgttcatgatgttctcctttcgttattctcgaaatggccgggaggctcaccggctgatccgggcgggatcgacgcgcgttcggacgatcggcggaaggtcgccccaaaccgcgagcgtcttcccgacgaccgccagcagaccctccacgccctcgattcctcccaaggcggccaaggtctcccggagacgcgtttcgtcctcgtcggtgacggcgtttcccaaagccgtggcgaccgcgtcggccaggccgacgtccgccgaaaggacgacggccgcgtcggcccggccgaagctcagcgaatgcccgaccgtccccgacgacgcgcagattccgaaaatccacggccggggctcgacccggaaggcgatgtcgcggacgggagacgggccggtgaagatccccaccgtgaccggacgctcgagcaggagggcgatgtctccgccgttgtcgacgagggcgtgggtcgctccggcttcggccatcgcccgcagggcggactcggccagcgctccggccaccgcggccatcgggccgaccccggcccgggacgcggcccgggccatccggcggacgatgggcggagcctccggcggaacggaacgcggggcgagcgccgtccggaatccgggatcccgccggatatagtcctcgagccgtcctcgttgttttcgaatgtccgcctcggcgagggggaggaaaggctcggccgcgacgatcgtcgcggccgtttccttgatccggagccttttgcggaacagggcttcagccatggtgttcccccggggcgctcgttttcggccggcggatttcgagcggccggacgacggattccgcagggagagggacgacgggggcggtcaggaggaatgtcccggcctcgatccgccgctgaagctcgtcggcgatccggcgggagaggacgaggctggaaagggggagcgccggaacgatccggcctccgaggcgcacccgtccggaccgcaactcggcataggtgacggaccggagggccggacggtcccgggaggggaggccgaagtcgcggatcgtcacggcgatctccgcgtccgagacggccgcgcggcgcgccgaatcggcgtcgaggatgggaatcgggacgcccaggccgatgcacagggtgcagccgtagccggggaacagggccgcccggaggaagtccggcgacatgcgcttcaaatcgccctggacggccatcgtcccgaagccgttttgcggatcgtgctgggttcccgggccggtgacgaatccttccgccccgccgaggagaattctcgtccccaggccgatcgtccggtagtccgggtcgttggacagcggggagagagagcccgcgccggcatacgtcacgttgccgagacgcggccggagcgtccccatgtaggtgtgaagcgtccgcgacgaggagttggccgcggcgttgtaccgctgatagccgtttcggggattggagagcagggccgtgttcaggtcgttcagcgtcaggacggtcaggaggcgcttgcgcgggtagcaatcggtgcccggcgagacggcttgaaggatgacgggccggccgcggaggaagtcctcgatgacgtgggcgccgccgtagcggacgccccgcgaagcggagagctgggtcgccccgaggtaggcgtccaccgcggccgcgccggcgtaggcctccaccccgttgagtcggacgcgtgtcattttgatcggcggctcggaatggccgaagttgagccagacgcccgaggagcacatcggcccgaacgtccccgtggtcacgacgtcgacgttctcggccgctttttccggaccgagctcgcggacgaggcggctcatgtgatccgcccgaacgaccttcacggtcttccgggcgattttttcgttgatctccgcaatggttttcggcatgacgacctccctccgggaatcaatggatagacaccgggaacgaactcagggggcgggggattcccgaaagccggcctcggggagaggcccgcttccgggcgtcacatgatcatgccgacggaaaagggccggaggaaagacggacgggcggggcggagccgcgcgggggcggccgggcgcttgacgtgatctcgatgattcatcgttgttccgctcgttcgtaaccgcggttttataacacggcgggaaccggatgtcaatgaactgaacagggtgacacaatgcttattaaccctatttcgatcggcccctgcttcaaatcccgatctggttgatcaggcctctccttgttcccgaccgtcaggaacgaggatttcgccatggattccttgccgacggaccattcccccggggagcggatccgcccttcggtccaggccgtcccggaatccgatatccccaaggaaggctcgggggccttggaccttcctcttttgttcttgagtccgccggggaaggtgggttaaattaaggcaaaccagggaaaggagcgcgtccccatgagcaagcgtcggaccaaacggatcgtccttgtcgtcctttttctgatcttggccgcggccgtcttcctcgtcattaaaaaccagtattttcaaatgatgtccatcggcaccggatcgaaggcgaagatcctgtgctcctcggtctttctttccggccgcgacgcgaccgcggtcgaggccgaggatttgggctttcatccgctttacaagatcttcaagacgaaggtcgactatgaacagaaacgggtgagctgttctctgctggggacgggcttgttcaaggcggaagcggtcttccgcgaggggatcggggccgtgcttctggccggcggagcgttggaggaagttgtccgggcttggcccaaaccggagatcgacgcggccgttgaagagaccgatcccgagtccgtcgactggccgatgggcgaccggctgatcctcgtcccgccggggacgacgatcgacgcggcccggatccgggccgcgggcgaccggcttttttcagaagccgatccgaatcatcctctccggacgcgggccttgatcgtcctccacgacggccgcttggtttatgaacgctacgggccggggatcaccaagaatacccgtctcctgagctggtcgacggtcaagagcgtcacctgcgtcctggccggcatcctcgtcggccgggggcggctcgatctcgacctccctgtcccggtcgaggcttgggccggagccggggactcgcgccggaccatcactctcgaccagctgctccggatgagctccgggctggaatggttcgaagcttacgccgaccgccccgtctcggacgtcaacgacatgctctttcgaaagcccgacatggccgcgttcgccgcctccaagcgccgggcggtccccgccggcgcggcctggaactactcctccgggacggccaacatcgtccagggaatcctgcggaagacgctcggttcggacgaggagtactggaatttcccccgccgggccctgttcgaccggatcggaatgcggagcgcggtgatggagcgggacgcgtccgggacgttcgtcggatcgtcgtatctctacgccacggccagggatttcgcccggttcggcctgctctgcctcaacgacggcgtctggctgggcgagcggatccttccggaagggtggatggcttatgcgacggcgcccgctccggccgcgccccaggggcgatacggggcgttcttctggctgaaccggggcgatccgggaaaaccggagacgcgcccgtatcctctgttgccggaagacgcgtatttcgctctcggctaccagggccagacgatcgccgttttgccgtcgcaaaagctcgtggtcgtccgcctcgggatgacctacgacgacgactggggcggaatgaacgtctttttgcccgaaatcgccgcggccgtcaagtgagcgggggccggccccggattatttctggacgctctccggagccggaggcagaggcaccagcccggccatctcgccgatgacgttgatcagctgggtatcggccgggacgacgatcttggcattgtgggccagcgctttttcggcgacttccatccgtttgaggacctgggcgttgccgatgaaataggcctgggccgcctcgttgacgagcttgatggcctgggcctcgccctcggccgcgagaatccgggcctgcttgacgccgtcggctctcttgatttcggcccggcgggcgccgtcggccatggtttcggtcgcggtggcgaagtcgacggccgcgatcttctcgttctcggccttgacgaccttgttcatcgtttcttggacgtccttgggcgggtcgatttccttgagctcggtccgaacgatctcgatcccccagctgccggtttcctcgcggagggttttctggagctcggagttgatcttgccccgttcgctgttggccgacttgagggtcaaggtgccgatgatgttgcggagggtggtccgggccaggttgacgatctgccactggtaattgttgacgttgtactggctgtttttgacgctctgctcgtcgtttttcaccttgaagtacacttgggcgtcgacccgggcgttgagattgtcgttggtgatgatctcctggggctgggcgtccaccatcacctcggtcacgttgacctggtagagacggtcgatcaccggaatgatccagttgaatcccggattggcgaaccgcttatatcttcccaggcgctcgaccagcccccggtgggtcgggcggacgatgcggatgccgatgagaaagaaaaagacgatgatcgccgcggcgagaatgatgatttccgtttgtttcatgggatcctccttcccggtgaatgccttttttcattatagcccgggtttcccggagagacaagaaacggccggccgcccggccgggacccaatccggcgcggggtcggcgcccttcccgatgcccgatcaatcggtacctgtttcaaatcggtacctgtttaaccatttcctgattttttggttcttttccatccgaaagtcggcaagtcgggcccgtgaaaaggagcggcctgccggcgctttggcccatcgcctaatttgctccctcggcggcgggcgggagggccggaagacgaaaggccgggaagatcaggcgaggcgggatcaggaggaaatccggaaatggataaccaggttcggattgaggttcggatcggccgggcggggaaatgtggaaatggttaaacaggtaccgatttgtttgtgatatcatcgggccgtgaagtccggaaaaacggccgcctatttcctgctcgccgccgcggctttcctatttccatcctcctgcgtgaaccggcggcgggaggcgccgccgccgtcgtcctcctcgctctcgtcatcctcctcattctcgtccgccgcggcccgtaactacgccctgatcgagccgggtgaatccatcgattccatcatccgcaaagccgccgccgtcgttccctcgccccgccaatgggcttggcaggcccgcgagttcatgggcttcatccatttcgggatcaacaccttcacgggccgggaatggggcgacgggacggaggatccggccttgttcaatcccgcggacttcgatgcccgccaatgggtccgggtcttcaagcaggccggaatgaaaacgctgatcctcacggccaagcaccacgacggattctgcctctggcctacggctgaaaccgcccacggcgtgaagagcagtccctggcgcggggggcggggcgacgtcgtgggcgaagtcgccgcggcctgccgggaggccggcctcggcttcggattctacttgtccccctgggaccgccatgagccctcctacggcgattcgccccgctacaacgcttttttcctggcccagctgcgggagcttctgaccggctacggccccatcgccgaggtctggttcgacggcgcgccaggagacggcccggagcggaagaatcaaatctatgactggcccgcgtattaccggacgatccgcgagctccagccggaggccgtcatcgcgatgatggcccccgacgcccgctgggtcgggaccgaatccggctacgggcgggaaacggagtggagcgccatcccggtcgacgtccggaatccggaatcgctcgccgccgcctccggtctctttcccctggacgacgttttcgtcccccgcgacctgacggcggccgatctcgggagccgggaaaagctggccggggcccgggtcttggcctggtatccggccgaaaccgacgtctccatccggcccggctggttctatcacgcctcccaggacggggacgtcaaatcacccgagaagctcctcgatatctacgaaagctcggtcggccgaaacggcgtcctcctcctcaacgtcccgcccgaccgccgcggcctcatccacgagaacgacgaagaggccctccgggagctgcgccgctccctcgacgcggcgtacgggaccaacctcgccgccggggccgccgtccgggcgtccgcgtccgccaccgggcacggcccggagacgatgttggacgacgatttgaacaccttctggacgccgcccggagagggcggacgggcggaaatcacgatcgatcttccgggtccttcggagttcgaccgtttcgttcttcgggagcatatccggtccggccagcggatcgaatcgtacgtcctggaagccggggaggggaacgcctggcggcccgtggcccggggaacgaccgtcggagccatgaggatcctgcgcttcccggcggtttccgcccgccgcctccgtctcgtcatcgaacagtcccgggccgctccggctctcgcctcgctcggcctccaccgcgtccggacggagagcgagccgcgatgaacaacgtcgaaatcaaggcccgggtccgggatctcgacgcgttcgccgcccggctcaaggcgctccggccgtcgaagccgcgcgtcctcgtccaggaggacgtctttttcaagatcccgaagggccgcctcaagctccggatcctcggcccccggaccggggaattgatttactacgagcgtccggacgcggccgggccgaagctctcgagcttcgagatcgcccggacctccgatccggccgggctccgggccgtcctggcggcggccttcggcgtccgcggcgtggtccggaaaatccggctggccgcccgggccggccaaacgcgcatccacttggatgccgtctccggattgggcttgttcgccgagctggaggtcgtcctccgccggggccaggcggccgccgacggagcggccgtcgcccgcgccttgatgaaaaaattgaaaatccggccggccgacctagtctccggcgcgtacctggatcttttggaaaaagcgtccgggccggccgtcagtccttctgccaagacggcttgtgatcgtaaacccagcggtaatactccgtccgcttgaggccggaagccgcttcttcatccaggatgacgatcgcccggggatgcatctgaagaatcgaggccggaaccatggccgagaccgggccttccacggcctgggcgatcgcggccgctttcttccgaccgaacgccaggaggagacaggtccgggcgtccatgatggtgcccaagcccatggtgatgacgtggtggggaacgttgtcctccccgccgaaggcggcggcgttgtccttgcgcgtccggtcggtcaaggttttgatccgcgtccgggaggacaacgacgaggacggctcgttgaagccgaggtggccgtcggagccgatgcccaacagctggaggtcgatgccgccggccgcccggaggcgttcctcgtattcccggcaggtccggggaatgtcttcggacattccgtcggggaggaaaacccgggccggatcgatgttgattttggaaaacaggctcgtccgcatgcaggcgtgaaaggacgccgggtgggagggctccaggccgaggtattcatcgaggttgaacgtcgtcacccggctgaagtcgaggccttccgtccggtgaagctccgacagccggtcgtacgtttcgagcggcgtttggccggtcgccagtccgaggacggcgtccggcttcgcccggaccaaggcggagattttccgggcggctaaacgggaggcggcgtggctgtcgggtttgatgatgacttccatgaagattctctctttccgattataaccggtttaccgggagaagcgaagccgcggtccggcggtccgtccgcactctttatcgatccgcggaccgagcttcggcccggacttcgcggaggagattccaggccgcgtgatcgaggagcaacgtgtcggtggagacgcacagcagggtgaatccttcggcggccgccgcccgggccgcggcggcgtcggggctgaagattccggaggggaggcctcggccggcgcaggcctcgcggatccgggcaatcgccccgcggacgaggggggcgtccgttcggcccgggacgcccaggctggccgagaggtcgaacggcccgacgaagacggcgtcgagcccctcgaccgagaggatgtcggagatgttttcggccgcctcgatatgctcggcttgggcgacaaggacgattttatcgttggcttcgttcagggcttgggcgacccgcgctccgtagccctgggcccggccgaggccgatgctccggcttccctggggagcgtagcgggcggccttgacggccgcccgggcctcggccgcttggttgaggtgggggaaaatcaatccgtcggcccccgtgtcgagcgccttggcgatccaggccgggtcgttgaccgcgacgcggacgaggcaggcggagcggccggagacggcctggaccatccgctggacgtcgggaaaacccagcagcccgtgttccatgtcgagaaagagccagtcgaaaccggccgaagcgcaggtctcggcgatttccggagagggaagcgagaggaggattccggtcaagagatccccttttttcaaacggtttttaaaggccggagcgggcggaatggtcatggcgcgcctccttgacggacattatagccctttttgactccccccggcgcctgtgctataagcggttcagaaaggctctcacgatcttatggccgatatcgccaggggcgtccgctcgttcgccgtcggcaccggactcagccgcatcctcggccttgtccgcgaacaggtcttcgcctttctcttcggcgtcggggcggcttcggacgccttcaacgccgcgttccgaatccccaatcttttccgcgacctgttcgccgaaaacgcgatgtccaacgcgttcgtcccggtcctgaccgccgcccgggccaagggccgggaggaggagaaccgctttgcctccaacatcctcaacactcttctcctgacggtcggcctgatcgtcgtcctggggatgattttctcgccggcgctggcccgcgtcgtcggtctcggcttcggcgcgatccctggaaagacggccctcacggcccgcttgacgttcctcatgtttccgtttctcctgttcatcgttctggccgcttgggcgatgagctatctcaacacggagaacgagtttttcatcccggccgtcgctccggcgttcttcaacctcttttcgatcatcgtcccggtcgttcttttcggctggttcgtgaatcgcggagaggatccgatcctgggcatggccttcggcgtcacggccggcggattcgtccaattcctcgtccaggtcccctcgctttcccgccggggttacgcctaccggctccatctcaatttccgggacgcggccttccgcaaggcgatggcgcttttcgtcccggtggccatcggcctctcggcctcccggatcaacgtcctcgtcaacaccatgctgatctcggtcatcccggggggcatcagctggttgaattacgcttaccgcgtttttcacctgccgctggggatgctgggcgtgtcggtcgggcaggtgtccctgccgctcttttcccggctggtcaacgagaggcggttcgacgatctccgccggacgctggacgattccctccgcctcgttttgttcctgacggtgccgacgtcggtcttgatcgccgtcctggcccgccccatcatcgccgtgatctaccagcacggcctcttcaccgcggccgacacgcgggccacggccgttatgctggttctgtacctgatcggcgcgccgttcgtctccgccctccgcaacctcacttcggttttttacgcctgccgggacgcccggctcccgatgatcgccagcttcatctcggtcgggaccaatatcgctttcaacctggcgctcatgggcgtcttgggacaccgggcgtttcccctttcggcctccatcgcggcggttgtcaacttcgcgattctcctcgcccttctcccgagaaagatcggctctttgccggccggtccgctggccgggttcgcggtccggctcgtcctggcctcggccgcgggcggcggggcggcctgggccggggcggcggccgccgcccggatcgccggaacgtcgttctggagcgggctcggggccgtcgctgtctgcgggatggccggattggggatcttttacgcggtttgccggattctcggactgggcgaggcccgcgatttcgcccggcggctcctccgccgcggccggagcgaggacgccgctccgccggccggaaccgatccggtctaatcgggttatcaacgacggttcgcccggccttccgggcgcgatctcccggtttccgaaataagccgtccgccgcggccggcgggggcggttccttgggtcgatccctctcagtcgagaagcccgagaatttccgacggccgggagacaaggacttgagccccgttcttccggagctcgtcggccgtccggaatccccagagcacgccgacggcgaacatcttcgccgcggcggccgtgcgcatgtcggtgttcgtgtctccgacgtacaggatctccccgggcggaatatggaaacgccgggcgatatccagggctccggccggatcgggcttgaccggaatctcctcgcgggcgccgcagacgaagcggaagggaacgcccgggaaattcctttccacgacttcccgggtcgaatcgtggggcttgttggagagaacggccagcgggattttccgttcggccaacgccgcgagaagctccgggatgccgggatacggccgggttttgacggcgttgcggaggcggtattcggcccgcatgccgtcgtagagcttccggaaggcctcgggatcctcggcccgggaggaaggcagggcccggcggatgagcgtcgccaggccgtcgccgaccaggattttgcattcctccacggttttcgccgggaaacccagccgggcgagggcggcgttcatcgaatcggttaaatcctcgatcgtgtcgaggagcgtcccgtccagatcgaaaatgacggcttgaaatctcatgattctccgggaggcgacgacctgttcccgcggccggccttattcacgaatccatcggacggctcggcttcgtcgcgaagggggaacacgcctcatggcgatcttataaaaaagagaagaaattatataatttcaagatcttaatgatcaagacaaaccgaaggaatgagaaagacggtccggagaaatcgaacgcctcccatcccgtccgacgcgcctccctttttttcgggccgaaacggcgaaaggggccttgtccctatccaagaacattgactattgactcctgtatattaaatgtcctatactctgatccgaagggaagcgatgagaccatccggaagcgcagagttcctggaagcgagacgacaccgggccttggattatttgagacaagggcttcagcctgtggagattgctcgtaaaatcggtgtcgaccgccgtagcgtccgacgctggaaggcgagtatcttgaaggacgggcctgaagccattcgttccaagccactccccggccgccctccgcggctcgattggcagaaaaagcggaagctggaggcgatcctgcttcgaggggccggccgatcgggctttgtgacagacctgtggacctgcccccgagtcgttcaggtcatcgaaaaagccttcggcgtccgttatcatgtcgaccatatcggacgaattttgcacgctctgggctggagcccccagaagccgcaacgccgtgccgttgagcgggatgaggcagccatccagacctgggtcaagatcgattggcctcgggtaaaaaaaactccgctcgcctaggggcttctctcgttttcatcgacgagagcggctttctgatgatgcctttggtgcggaggacatgggcgcctcgcggtcagacgccattgttccgacatcgaacaaacagttatcggaaggtttcggtcatcgcggccctggccgtctctcccgcccgggaccgcgtccagctgtttttccggcttcatcctcaggaaaacatcaacgccggcaaggtcctttcgttcttgaaggatttgagccggcattttgaatgtcccctttcgctactttgggatcggttcatgccgcatcgggctcggtgtgttcagcgctatattgctctcaaaaaggactggcgcttggagtttctgccggcctatgcgccggagttgaatcccaccgagaacgtctggtgttacctgaaaaccaattcgatggcgaacgaggcgatcttcgaacacgagctcttgacgaactcggttcggcgacacggcctagcccttcaaaggaaacaatctctgctccgctcattcctgaagcacacgcccctttttttgcgtttaaaataggacattacttatgcaggtgtcaatagtttgatcggcgtcggagtctttcaaaggcgtccccgagcatcccgcctcgttttctttgcactcggatccagatccttgtccctgggcgaccgggggcggcggggacggtcctcccatcccgagccttatcccggcctggggaacgagataaaaaaagcatccaggagaaaagagggtaaccgtttcagcgggaggggatgggacgccgcctcccgtcaagccgctgtcaaccccatccaaaagagcctcgtctcgcctccggcctccttgggtaaagagaagaggggaaaatgatttacggcgcgattcgatcctttgacagaggcgaattccgtctgctacgatgaaaacgtcaaggaaaaggggggaggggggaggaggcgccgatgctggccatcaagaaaatcctttgcccggtggatttcagcgagccgtcgcttttgggcctgtcgtattccgcggagctggcccggttgttcgaggcggacatcgaggtcatctatgtcctgccgattttacctccccagccgatcgacccccagttctccttccaggtccccgagtacgaaattcttcttcaccgggacgccgaaacccgcctggccgctctcgtcaaggaaaagattcccgaggggatcaaggccgttccggtcgtcggacacggcagcgccggcaaggagatcgtgaagcgggccgaggagacgaaagccgaccttatcgtgatctccagccacggccacggcggttggcatcacttggtcatgggctcggtcgccgaacgggtgatccgccactcgccctgcccggttttcgtcgttcgggaagcgaggaagtaagaaagggaaaggactgaaaggagcgccgcgggggagacccggtctcggacggaggcggcggggatgcggagcgcgtttccgcgggacaagaggtgatccgcacctcggcttttgggtcccgggggcgcccggccggggcgaaagccgggcgtttccgcccgaaaccgtccgttttcggttgacccgcccccccctttttgctatcttctctactccacggcgctatcgtctaggggttaggacggatggttctcagccatcaaaccggggttcgaatccccgtagcgctactttttctctttcctcgcccgcttttaaattccgcctcctcatccgcgccctccgagcgtttttatgccgtagcgtttttgcggggctccgcccagggcgtccaggggactcgatccccatccgcccatgacgtagaccgagggatagcgccgctccggattctggaaatagcccggcggcaggatgacggccgcccggatcgattgcgctttcccgtagaaccgggtcagccgcgggctgggaacgttcgcctccttgatgaattcgctttccttgaattccggcgccgggccggcgggaacgtgaatcagcaggtcgagcggccggctcatcctccctttctcgatgaaaacgacgttcttgacgctccgggcgttgcccggggcctgaagcgtccgggccatgcggttggccttgagggacgcttggacgccgtaccagccgtccagggcggagaggtcgccgtgccagcagacggcgtcccggccttcgaggatgatggcttcgccgggtttccatccgcggacatcccaggcgaaagtcggctgagggtcgaggaggtcgggattatcgatgggggctgaagggtcccggtgaaacccgatgatattccgcccggacacgggcgacgggctcacctccgcggtgaacgaaacgcggagacgaagctcttggagcccggaggtctccggagtctcttgttccgctgcggccgacggaaaagctccggcccaaagacaggcgaataaaaaaatcagaaagccgatgatcaggaacgttcttttcacaatattttctccttgaccgaggctgaaagatcgcgggaaggagttctcatcatccggccgcgaagccggcgtcaaaaacgaggagatccgcgcgacgtccgccgcgcggatccgcctcgctcgaaatcctccggatgatcttgacgcccatgaatgacaactccttcttccactacgcaggaaaaaggattcaggttgccgtctcttatgagaagggggcgggcggaccgaaaaaacgcctggccgcgcgggcctttttgagggagaaggcgcaaggaaaagctcccgccccccccggcggatgatccggagggacggccaggacacgggaggaatcgacggccgtctacccggccgctggtttctccccgggagtcgggcgtataatatccccggacgcggttcagcccatgagcggaacggaaaacggctctccccggccgaaaaaaaagcatgtcttcggtaaggcggccgccgcgggcgcggccttgctgatcgttttcgccgggatggtttggctgaccctgccggacgtggcggatctgaagacggagaaccccaagtcgaccgccctcatcgagcgccggaaggccgacgcccgggcccaagggaaaaccctcgtcgtccggatccattggatcgccttcgaccggattcccccgctcctgaaaaaaagcgtcctcgtcagcgaggacgcgtcgttttacgaccatcagggcgttgatttcgccgagctcaaagcctctttcaagaaggacctcaaggaaggccgcttcgtccgcggcgggagcacgatcacccagcagctggctaagaatctctacttgtccccggccaagtccccggtccgaaagctccgggaattcctgatcgcccaacgcttggagaggacgctgcccaagaaccggatctttcacctctatttgaacgtcatcgagtgggggccggggattttcggagcggcggccgcggcccggcactggtttggaaaggacgtcgccgccttgactctcgaggaaatggtccggttgacggccgtcatcccgcggccgctgcggtccgatccgcggaaaaacgaccgctggatgcggttcaagggccggtggatcgccgataccttgagaaccgtcggggcgatcgggggggatgaccatcaagctctcgtccgggcgttcgaggaatctcgatcccccctcccttgagaaccaagccgctcgccaggggcttccgccgccgcaggatccgtttccgtcggggccggctcccgccggctgtcgaagcttcgaaacggtcaccgggaggccgaacaaaggaagaatccaggggcgcgtccccgggattcgcttcgccttgacagcggctccaatcggactagaatgaggacttatcccgcctaattcacgagccgggcgccgggaggaattcacgggaagagcggatgtcgcctcggccgattcagaggacgttttcgcgaatgaggcggggtgattcaaggaggccccatgggcggattttttggagtcgcgagccgggccgagaacatttccgacctgttttacgggaccgattaccattcccacctcggaacgaagcggggcgggctcgccgtcgtccggcccgagggcttggtcaagtcgatccacaacatcgaaaacacccagttccgggcgaagttcgatcccgatctcggcggcttgacggcgaacctcggcatcggcgtcatcagcgattccgacaatcagccgatcgtgattcattcccatctgggacgattcgccgtcgtcaccgtggccgcgatcaaaaacatggacgcgctcgtccgccgggttttccgcgagcggcgcattcacttcgccgaatccatgggcgggggggtcaatccgacggaactggcggccgcgctgatcaaccaggaggattcgttcgaagccggaatccgcaacctccaggactcgatcgagggctcgtgctcggttcttgtcctgacggaaaagggcatctacgccggccgggataaatacgggcggacgccggtcattctcggcgccaagcccggggcttgggccgtgaccctggaaacgtgcgctttcccgaacctcggtttcgagacggtccgcgagctcggacccggagagatcgtttttataacgcccgaaggggcggaaacccggcagaagcccggcggcctcctccagatctgcgcttttctctgggtgtattacggctttccggcgtccacatatgaagggatcaacgtcgaggcggcccgcaaccgctgcggggaagcccttgcccgccgccacccggccgccgtcgatttcgccgcggggatccccgactcgggcgtcggccacggcatcggctacgcggccgcggccggcattcctttcaagcgccccttcgtcaagtacacgccgacgtgggcccggagcttcatgcctcagaaccaggacgtccgcgacctggtcgcccggatgaagctgatcccgatcaaggaactcatccaggggaagaggttcctcttctgcgaggactccatcgtccggggaacccagctgaaggacaccgtccagcgcctttacgacacgggggccatggaaatccacatgcggccggcctgccccccgctcatccacggctgcaaattcctcaatttttccgtctcccgttcggagatggacctggccgcccggcgggcgatccgggaaatcgagggagagaagccggtggacctttcgctttacgccgacgagcggtcgccccaatacgaggccatggtggagcgcatccgccgccgtctcaacctcacctccctgcggtttcaacgcctggaggacttgatttgggcgatcgggctgcccaaagaccggctgtgcacctattgctgggacggcgtcgaggtcaaaagcccgtccctgccgttcgcctgatccggggaaaacgccggctgcgcttcggcttcttccacgggtccgcagtcaggggacgggaagataaataatcccttgaaaatccgcggaagaagaccggggaggggaaaagaggatggctgggaagctaggattcgaacctagataccatgatccagagtcatgggtcctgccgttggacgacttcccaaccggaaggggttgaatatagcggattttcctcctcttttcaagcccttccgggcggcgggggggttgtgataatatgccctccgcatcatgatccggaaacagtggttccgcctctttttcgtcctcggcctgaccggcgtcctgctttatgtcttcttgcggggcgtggactggagcgaggccttccgatacctcaaggaacacgtccgctgggggatgtttctcttggttattcccctcagccagatccacatcctcacccgggcctggcggtggaagattctgatggtccacgaaaaaaaggacgttcggctgtacaacctggccgcggccaacgccgtcggcttcaccgtcagctatcttttccccggacggatcggagagctggtcaagcccctttacctcgcccgccaggagaaatgccgctccgggttcgccatcgggacatgcgtcgtcgagcggatcttcgatgtcttcaccatgtgcgccctcctgggcctttttcttcttgcccggcccctgtatatcacgattttcaggattcagaccgaatccatcaagaatctaaccgtgctcggcctcatcggggccggggcggcgacggtgctcctggccgtttccttgggattcatcttcttccgtgacaaggccctcgccgtgacaggggcggttctccgggcccggatcattccggagcgcttccggtcgaaggtcctcgagctcctgcacgagttcatcgacgggttgaaattcttccagtccctcaagaccttgctggcctatatcggcctgtccttcgtcgtttggctggggatcgttttcttctactgggtcttttttctggccttcgacatccggatccgtttcttttttctcttcccttatgttttcctgaccggagtcggggccgcgatcccgaccccggggatggtggggggatatcacgccttcagcaagcagggcatgatcgagctcttcgggatgaacgcaaatgaagccggaggcctgaccgttgtctttcacgcggtccaatacatcgtcagctgcctggttggattgattttcctctggatcgacgggctgaccctgattcagatcaagcggctcggaaaggcgaagaccccatgaaatgtccgttttgcggccacgaggaaagcaaggtcatcgattcgcgggagagcaaaaaggggatttccatccggcgaaggcgcgagtgcatcgcctgcggccgccggttcacgacctacgagaagatcgaggaaatcccctacatgatcgtcaagaaggacggctcgcggcagctcttcgaccggcagaagctgttgcgcggcctcctcaaggcttgtgaaaaacggcccatccccgtgtccaagttcgaggaaatcgtcgaggaggtcgagtccaagctccaagagcgcccggagaaggagatgaaggcctccgaaatcggcgagatggtcatggccaggcttaaggacctggacaaggtggcttacgtccggtttgcctcggtttatcgcgaattccgggacgttctggagttcaagcaggagctggagagccttctgcgggaaaaataggaagcccgccccgccgatttgacaaacgcccgccgcggacgtatctatgaacgtcgcatgatcaagcgccttcatccggtcatccggatccggacgagcgggggcggcgtctatccggcggattggcaggggggctggatgccgcgtctcgatctgatcgagacggaaaagacgctgatcgtggccgtcgaggtctcgggcttgcggaccgaggacctccagatctccctgcagacgaaccggctggagatcaagggacggaagaaggaagcagccgttcccgcggggacgcggtatttccgcttggagcgcgaatacgggccgttccggcggacgctggcccttccccggtcggtcgtccccgatcgggcccgggcgactctcgaaaacggtgttttgacgatcgcccttcccaagcggatcgaaacgccgcggcggcgacgccttgtccgcatcaagagaaacgtggagtgaatggaatggctgaaaaagatccccaatcggatccggtcgacggcctcgccgacggccaggattccaaaccgtccataccggtcaagctgccgatccttctgctgcgggacatcgtcgttttcccttacatgatcgtcccgctgttcgtcggccgggaaaaatccaaggcggctatcgacgaggctctcgcttcccaccggatgatccttctcctgacccagagggatgtggataccgaagatcccaagcaggacgaagtttaccaaatggggacggtcgccctgatcatgcggatgctgaagctccccgacggccggatccgcatcctggcccagggattgacccgggccgcggtccggacctacgacgaggagaacggccatttcatcgccgaaatcgagccgatcccggagccggaggaccaggaaaaatcgctggaaggggaagccctcgtccgcaacgtccggtcggggctggaaaaagccgcctcgctcggcaaaagcattccgccggaggttttgatcatcgcctcgaatgtggaggaacccggccggctggctgacctgaccggggccaacctcgagctcaaggtccccgaggcccagtcgatcctcgagatcgtcgatccgatcgcccgcctcaaaaaggtccacgatgacttgaccaaggagatcgagatcctcgacgtccagtcgcggatctcgaccgaggccaagggcgaaatggacaagcatcagcgccagtatttcctccgccagcagatgaaggccatccagaaggagctgggcgagggcaacgagctgcaggaagaaatccggagctttcaggaaaagctgaaaaagctcaaggtgacggaagaagtccggggggaaatcgagaagaatatcagccggctgtcccagatgcatcccgagtcggccgagacgacggtcgtccggaattacctggattggatgttcgcccttccttggagcaagagcaccatcgataatcttgacttgaagaaggccaaagccatcctcgacgaggatcactacggtctggataaggtcaaggaacgaatcatcgagtatttagccgtccggaagctgtcccggcgaatcaaggggccgatcctgtgctttgtcggaccgccgggcgtcggcaagacgtccctcggcaagtccatcgcccgggccctcggccgggaattccttcgcatttccctgggcggagtgcgggatgaagccgagatccgcggccaccggcggacatacgtcggagccctgcccggccgaatcatccagggcctccggagggccggatcgaacaatcccgtgttcatgatggacgaggtcgacaagatcggggccgattaccggggcgatccctcctcggcgctcctcgaggtcttggatccggagcaaaacaacacgttccgcgatcactacctggccgtgccgttcgacctgtcccgggtgatgttcatcacgacggccaaccttctggatcccatccagcccgccttccgcgaccggatggagatcatccagctccccggctacaccgaggaggaaaagatggagatcgccgcccggcacctggtccccaagcagatcaaggagaacgccctctcggataaatacatccaggtgacgcccggggcgatccggacgatcatctcccgctacacccgggaggcgggcgtgcgcaacctggagcgggaaatcgcctcgatctgccgcaaggtcgcccggaaggtcgccgagaataaaaagacgctcaacaagatcacgtcccaaagcgtcgagtcctacctgggaccgccgaagatcttcaaggatgagcttcgcaagagcgaccgggtgggcgtggccacgggcgtcgcctggacggagacgggcggggaagtcctgttcgtcgaggccctgaagatgaaaggcaagggcggcctgatgctgacgggcctgctgggcgacgtcatgaaggaatcggcccaggcggccctcagctatgcccgcgtccacaccaaggagctgaaaatcgacaaccggattttcgggacgaacgatttccacgtccatatcccggagggggcgattcccaaggacggcccgtcggccggcatcaccatcgccgccgccctcatttccttgtgcacaaaccgcgccgtccgctgggacacggccatgtcgggcgagatcaccctccagggcaacgtcctgcccgtcgggggagtcaaagagaaagtcttggccgcccagcgggccggcgtgaagcggatgatccttccgtcgcccaaccggaaggatttgatcgacattcccaaggtggtcaagaaggagatggagttcatcttcgtcgaggacatccgccaggtcctggaggccgccctcgtccggaaaacgggccggcctacttgaagagaaacgacccgacgaaggcgaattcggccggcccggtctgaacgaccggggccgtctcggaaggccactcgacgaggagggagcccatctccgtccggacggtgaccgtccggtccgtgcgtcccgtgacgatcgcggccacggccgccgcggccgccccgctgccggaagacagcgtttccccgacgccgcgctcccagaagacgacctcgatctcgtcccgtccccggacccggatgaactcgatgttcgtccgccgggggaaaaagggatgcgattcgatttcccggccgagctcatgccactcgaaccggcccgggaagcggtcgatgaagacatcgcagtgcggattcccgagagacacggccgtgaccgggtaggtttcggtgttgatcacgagaggataatcgaggatccggtcgtggaccgttccgtcgtcgaaggggatatcggccggggcgaaccgcggaatccccagctcgatcttcatgagaaacccgtccttggtccggcggacgagggcgcaggtccgttctccggcggccgtctggaagcggacgatggggacgtcgatcttctgttgggaatagagataagcggcggcgcaccggagaccgttgccggagatttccgcctcggatccgtcggcgttgaaaatccggaaccgggcctcgccccgggaccggttcgtgaccgagacgaggagaatcccgtcggccccgacgccggtgtgccgctcgcagaggcgatgagccaggtcccccggctcttcgaacagcgcgacttcgtcctggtcgacgatcaggaaatcgtttcccagggcgtggaacttggtgaatttcatggttaatcggtgatgcgcagggtgacgatgaattctgagaattgaccgctgtcgtcctccctccggacggccagcatgaggggatcgcccggtttgagaggcttgatcatggcgttccactggtcgagcgtttcgattttcttccggttggcctcgatgatgatgtcgcctggagcgaggccgcggcggtcggctggaccgccgggagcgacgtcggtgacgaggagtccgcgatcggtcttgagaccgtagcggcgggccaggggcggcgtcagggcttccaccgacagcccgatgttcttgggcgcggccccggccgccggccgggacttttcctcgggcgcgagctcgatgaccttcgtggtcacggtcatctcttttccatctcggatgaaccggatttcgaccgggctgcccggcggaatctccgagatcttgaaccgcagatcgttgctgttttcgatcggctggccgttgacgccgatgatgacgtcataccgcttgaggccggctttttcggccggcgtgccgtcctcgacgtcgttgatgaccgcccccttgcgatccttgaggttcaaggccttctgggtatcctgatcgatcgggcggatggcgatggaaacgcccagcctgccccggacgacccggcccttgtccttcagctggatgacgactttcttggccatggaggcggggatggcgaatccaatgccgatgttgccgcccgaaggagtgagaatattgctgttgatgccgacgaccaggcccttgaggttgacgagcgggccgccggagttgccccggttgatggccgcgtccgtttggatgaaatcctcataggtgcggctgtcgccgagccccagttggcggcccttggcgctgacgatgccggccgtgacggtatgttccattccgagggggttcccgacggccagaacccattccccgaccttcagggcggtcgaatcccccagctcggcgaagggaagatccttgccctcgaccttgatcaaggcgaggtcggtgagaacgtcggttccgatgatattcgcctcgtattcgtccccggcgacggtgaagactgagatcttcttggctttttcgacgatgtgattgttggtcaggatatatccgtcgggggagatgaagaatcccgttccctggacgatggcccgcgattcctggggcgtctggctccggggccgctgtcccggcgagccgaagaagcgatcccaaaagtcgtcgaagggcgtgacccgtcccgtcattcccggctcgacacgctcggcgtcgatgcggacgacggtggggccgatcttctccgaaacggcgacgaaatcgaggtccggccggatcgggggagtctcggcgaataaattcgttcccagcgaacgcgtgtcgccggacaggaagctccgggcttctgttttcttttcgggcaggaagacgaagacgtacccggcggccaggacgccgaggacgaacgccgccgccgctatccatgcgcttcttttcgtcatcagagatcctccatcggaattggattccgctgttgtaagaaattttaagatagcacaaacgttcccttgaatcaatttccggattctcccggaacttcaatattcataatcttttatcgaacaatcatcttcctttttgaacgatattcgccgtccggccgttgcattttcgcgcttccccggctatcatcctgaggatgaaaaaaggccggctgatcgtcttcgagggcatcgatggggcggggaagtccacccaagtccgaatgctcaagcgcaagcttcgggcccgcggccgcgacgtcgccgctttccgggagccttcccgaagccgcttcggccggacgctccgggcgaaagcgaaggaagccggatccctgacgccggccgaggagctcgatcttttcatcaaggaccgccgggagaatgtcgcccggaatatccgccccgccctgagggacggccgggtcgtcctcctggaccggtactatttttcgacgatggcctatcaaggagccaagggcctcgatccggaatggatccggaccgtcaacgaacgcttcgctcccaagcccgacctcgttttcatcctcgacgtgggcccgcccgaggggctggcccggatatcgaggcgcgggacgcgggacgccctgttcgagcgcgaatcctatctgcggaaggtccgccgcctcttccggacgttccagggcccgcggttcgtccacctcgacggaaaacgcgacaagcgtgatttgggacgggagatcctggaccggaccctggccgtccttggggaatagcgactcatggccgcggcgcggaaaggactcaaaatcatcttccggaggaacccccggaaagcgggcgcgggaagccgccggaaaagagcatggaaggtcgtcctctggacggcgtttgtcggcacggccctgcttttcggagcggttttcgggacgttcgtcgcggtccgccggacgcttcccgatctctccggccttgaatcctacgaaccggccctttccaccaaggttctggccgacgacggtcaagtcgttcgggaaatcggcgcggaaaaacggacgatcgtcacctacgagcagattccggccgtcctgcgcgacgcgatcctggcgaccgaagaccctcattttttcaagcaccgcggggtggacgttcgggggattctccgctcggtcaaggagaacgccctcaacgtcttccgccgccgcaagctgcacggcgggagcacgatcacccagcaggtcgcccgcaagctgtttctccatcctctccaaaccctccagcgcaagttcgccgaatggtacgtctccatccagatcgaaaagaaatactccaaggaccgcattttcgaaatgtactgcaaccagttcgagctcggtccgggagcggcgggggtcgaggcggcttcgcgtctttatttcggcaaatccgtcggcgatttgatcctcgaggaagcggccttgatcgccggcttgtaccgcggcccgacgctttattcgccctaccgaaatccggccctggccctcgaacggcgcaatcatgtcttgacccggatggcggaggaggggatgatcaccgccgcccgggccgaagacgggcggaaaacgccggtcgccgtccttccgccggggcgggaggattatgatttcggagcatatttcttcgaggaagtccgccgggcgatcgccgaaaaatacggggaagaggcgctttactcgggcggcctgaaggtttcgacgacgctcaacgccgcctggcagaaattcgccgacgaagccgtccagaacggtttgcgcgcctatgacaagaggcacggctggcgccgggacaaggcgaatctcctggccgatgaggcctttaaagcctccgggaagaagctcgaggagtaccggctgaggtcatgggtcacgccccgcctcgagcccggggacatcgaggaggccatcgtcctctccgtcggccggaaggaagtccggatcaaggtcaaggacgatttcgcccgtttgatcaatgagggggcggaatgggccgcccccggcaaggccctggattccatcctcaagcccggggatgtgatccaggtccgggtgaaatcccgggacgcggaaaaaaaagaaaccgtggcgaccctggagcaggagccgctcgcccaggcggccttggtggctattgatccccgaacgggccagatcaaggcgatggtcggcggctcatccttccgccggacgcagctcaaccgagcgacccagacgtcccgccaggccggatcggcgatgaagccgttcatctatacggccgccctggagcgcggtttcacggccgccagccgcctcgtcgacgagccgacggacttccccgatccctggtccgggacggtttggacgccccgcaattacgaccggaaatacaagggaatgatcaccttccggacgggcttggaagagtctcgcaacgtcatcacggccaagatcctggacaacatctccccccagaccggcgtggattacgccaagcgcttcggcttgaccggaacactgtatccttatctctccctggccttgggcacgttcgaggtcaatctcgtggaaatggtctcggcctacggcgtcttccccaacaagggaatccggatccggccgtttttcgtcagccgggtcgaggaccgggacggcaatctcctggaggagcatgtcgtcgaggccgaggaggtcgtctcgccccagacggcgtttctgatgacccacctgatggagggcgtcgttcagcgcggcacggctgcggccgcgagcgtctttctcaacgatacggccttaggcggtaaaaccggcacgacggacgactgcaccgacgcctggtacatcggctactccccgtcgctctgtgtcggggtttgggtgggcatggacgacaacacctccctcggccggaatgaaaccggggccgtcgccgcccttccgatctggatgacttttttcggccgcgtcctcgaggagataaaggcgaaggcgaaggatgcgtccgtcgagtattatcccgaagaattcgagaccccgccgaacattcacttcatggccatcgaccgcaagaccgggcttctagccaccccgcagtgcaaatggcggttcatggaagcgtttctcgaaggaaccgagcccacccggctgtgttcgatgctggatcacatctcgacgctcgattacggcgggacgtccgtggcccgggaagagcgctgacggcttcggccggcgccggccggctatttctttttgacgttccccgaggatcccgagctgctgttgcctgaagatgatttcgggggagaggacgagcgggacggggaggagctccggccgctggagcgggacgccgagccctcgctggagcggggggaggatctgcgtccggaaacagatcccgatttcgaggacggcgaatccgccttccgctcctcgccttggaaaacccggtagaacttgtcccgcaggaggtcggtcagggattcgcgttttccggagtcccctcgatcgaaccgatcgaaggacggatacgtcttgcggatccggcgttcctgcggttcggccggccgtgaggagtcgggggcggttccgggccgctcggcgatccggacggggcgggaatcctccggcgttttcagctctttctccgaacccgcgttccacggccggtcggccggccgaatcagccgggggctttccgggggaacgttgccggacaggccctgcccgccgtccttgcggatgaggacggcgccccgtttgtcgaggggctcaagccggagaggggcattcggatcgggcttgaagtccggcggcgtttcgctcaggcggaagcggccgaccgagcggatttcccccggcggcagggccgcttgccccgcgttggggtcccggagctggctcttccggacgacgaccagggcccgtgattcgggcggatagtcgccgtcccacccgcggccgtaataatcgttattgtagatgatgccgggatacccccagtagctcatgggagcccagccgcaataataatcgttccaccaccagttgacccaagccgctccccagccggggagagggatccaataccagccgtaaaacggatcccattgccaacggccgtaatggaaggtgcaccacccccacggctcgtacggcacccagcaccatccggagaacggcagccaggtccagcgtccccatgtatagggacgccagccagggctcaagccggtgggaatccagacgaagccgaacggttcaatgtcgatccactcgccggaagcatccagctccgattcgtattcggagatttccacggggagccgtccgagagattccgccgtcccgcggacgagggaggctcggtcgccgttccagcggtcgaaggcgtcggtggcgccggtcatgaaattcttcggccggccttcgaatcggccgtcggccaacgacaggccttgtcccgtcttgaccaggacggatccctcctcggccgcggtctcgaccagcccctcgaagacgaggatttccgtccgtccgtcgttcccgacgtcgacccggtagaggcctttttccaggaaataaagcgtcgccccgggcgtgagaagctcgacgtccttttcccggtccaaggaacctaaatcgagatagagattccccgcccagtggcgaaggcgaagcagggaggaatggtcccgggggagggtttggacgtcgattttcgtgtaatgatccaagcgggcgtacttgatgtcgccgaaggagatctccgcccggccctcgtcggttccgagccggtcgccctcgctgatcggggtgttgatcgtcgcttcttcggaggccaggtcggcggcccgctgaaggaaaatccggccgtcgacaaagctcaggcgagcgtaggagtaccgcccgccggccgcttcccggccggcggagtccggcggaacggcatcctgacccgaagcccaggtgaagaacaataagacggcggcggccgcgagcgctgtttttctcatcggatttctccttgcatcctcattatagcaagaaacgtaccaggcgttcccgcctgaaaaagcggattttcggagcccggatcgtcctgagaaagagacgtcgtgtcctcggatgaggactccccctgcccgggaacggctcaaagaggccagaacgcccgctggacgtcgacgacgggagtgatttccttctgggtggtgatggagatatcggctcgaatgtccggcgcggcccgcgtcccggccatccggcggaggacttcccggacggcccgggcctggccgtcgatatggtatcccccctcgagaacaagaagcagccggccgccgcaggtttcctgagccaggtccatcagctccgaggccaggccggcgaagccctccaggctgaccctcatcccgccgagcggatcgccggcgtaaatatcgaagccggccgaaacgaggatgaactccggcatgaacgcccgggcgatcgggccgaggatattccggtagaggaacagaaaatccccgtcggtcttgcccgccgagaggggcgcgttgacggtgtatccccttccgtctcccgccccgatttcgtcccacccccctcctccggggaaaaaaggggaccgatgggtcgaaaaaaagaggacgtcgtcgcgggcgtagaacgcgttctgggtcccgttgccgtggtgaacgtcccaatcggcgatgaggatccggcggaggccccgttcccggatgagatgttcggcggccacggcgacgttgttgaacaggcaaaatcccttggccgtcccccgctcggcgtgatggccgggcggtcggacgagagcgaaggcgttccgtcccggcccggcgaggacaaaatcggcggcttcgatggttccgccggcggccaggagggcggcctcgtaggacagcgacgaggccgcggtatcggcgtcgagcggcgtgtgggcccgctcccgcgtccgggagaggaaatcgatgtactcgggagcgtggacgcgggcgagctcggcggccgaggccgggcgggccgcgatccgggccggggaaaaatccagctctgttttaaggagggcctcgatcgcctcgagccgctccgggcactcgatgtgccccggtcccatgaaatggccgttgaaacggggatcgagaagaacgccggtggtcatgagctcatggggacgggaagagcttctcgatgatcttgggctccggccggggcgtcaggagggacacgacgatcaggctgccgatcgagacgatcaaggccgggtagatgagggggatgccccagggatctccgtccgggacccggtcggggggcaggatccgggtcatgatgaagaagaagaggcagacgaccgttcctccgatgatcgaggccagccccccggctttggtcgcccgtttccagaccagggcggcgatgagggcgggggtgacggccgccccgtagatcgtgtaggcgaacatgctggtctccaggatgctccgcagctgggtggccatcaggaaggccagaatgcccacgacgacgaccaggattttttggagagcgatgatccggcgggcctcggcgtcctttttcacaaagcgctggtagatgtcgcgcatgatggtcgttgattgggacaggaggtaattcatgcccgtcgagatgaccacggcgcaggccgcgcccaggagaagcacgccgacgggggcgggaaccaggctccgggcggccatcaagacgaccttcccgccctccttgggaacgctgaggtcgatctgtccctggagcttgctgaaggcgaagacggcgatgatcacgacgacggattcgacgaagatcgttcccagggtccaccagatgacggctttgcgggcgtcccgagccgatttggcgctgtagaacttctggtacatgctctgaacgccgagcaggagaaagagggtcgagaggaaatagccgacggccttgaggaccgggtgggctccgaactggctgttgaccgcggcgaaataccccggcggaagggcttggcgggcggtttcgatccctccggaggcggcgtagacgaagggaacggccgccaggcaggcgaggacgatgatgatcccgttgggcaggtcggtgtaggcgatggccaccatgcctccgaccgcggtgaagaggatgacgaaggcggccgcgatcagcgtccccaagggcgcggaaatctttccgtcggaggcgacgttcaagatgaatccgccggcgacgaattgataggagacgatcgagacgaacgaaaggatgagggcgatggccccgaacagccgggcggccgggccgtagcggacctcgaggatatcgccgatcgtgtactgtccgaaccgatggattttcgcggctaaaaaataaatcaggacgatgccgacccacgccccggccgcgagccagagggccgagattccagccttggccgcgaattcggccccgctgatgaacgtccccgagccgatccaggtgcagatcagggtgaaaaccatgacctgccatttcaagctccgtccggcgacctggtagtcctcctggctcttgattttccgggcccggtagaaattcatcccggtgaggacgagcagataggcgaggatgatgtagagataaagcgacatgccgcctccttgaaaagccgtctccgcccgcccgcgtcattcccccggcccggcgaaaaaaggccggcggccggcggagcgtatattatgcgcgactcttcgtccggaacccgaaaaacttgagctggaggtatttcgcgcccatcaccgcgagacgggcgaaatccccccaggagcggatctttcggagcgcccggggagcttttttaagcggagaggatttccgggagctgagcgaccagcgcaggacgagctcgcagatctgggaccagcggagcttgtcgatgaacaagggaacgtcgccctgggccagggggagggtgatgacccccttgcggtaccgtttcgtccacgtgaatcccggcggaagaacgcccctctcccgggcggttttttccaggggcgtgcccggatacacatggagaatggcgatcgaagtctcgatccggccccggtacttttcaatgaggcggatcgtctcttgggcttccgtccatgtctcggtcggatgactgaagatcatgaaaacgttggccacgatcccgagctccaagcaccagccggtgaggcggtggaagtcggccaggtcgatctgtttgccgacgatgtccttccggacccggtccgagccggcctcgagcccgtaggacaggtagtaaagcccggcccgcttcatcttctcgatcagctcccggctcatgatgtcgagacgaacgtcgcacatgaagcggacatcgagtccgcgggcgatcatcaagtcgcaaatggcgtcggcccggcgggggctggcgttgaacgtgtcgtcatagaagaaaacggcctcgatgccgtagcgctccttcaggagctcgatttcacggacgacgttttccggactgcgcatccggacgtggcgtccccagttgatcggtgtggcgcagaaggagcaggcgaagggacagccccggctggtcatgacgctgatcgcccggagggggccccggcccgggacatcgagggtgaagttgtatttctcgaagggaaccaagtggaaagcgggagagggcagcgtatcgaggtcggcgatcggcggacgcggcggattggccgaagcccggccgtcgcggcggagaaccaagccccggacatctcctaaaaccgcggctccgctccccggcgtccagcgccggcagacctcgagcatcgtctcctcgccctcgccccggcagaccaggtcgagctcggggatatgatccaagcaatcctcggcggccatcgaggcatggggcccgcccaggatggtgaggacttccggacgggcttttttggccaggcggacgagacggaagctctggaaccggttttcggtcgtgatcgtcaccccgacgatgtcgggccggtccgcccggatcttgcggacgatgtccgaccagctcagccccaagatgtcggccgggacgatttccaccgggatcccctcccgttccaggacggccccgatcgagaggaggccgagcggcgggatggacgaccctttcgaccagcgctcggcgaagtatccgccgggcggcacgtagagctggactttaggcatcggtctccgcctccggcttcttgtcgagcttcatggagaagacccgcgtgacgttgggctcctccatggtcgttccgtagatgtaatcggccacttccatggtcttgtagttgtgggtgatgatgatgaactgggtttcggacttgatggttttcatcaggtccagaaaccggacgaggttgggctcgtccagggccgcgtcgatctcatcgaggatgcagaagggcgtcggcttgaaccgaaacagggcgaacagaaaggccaggctcgtcagggatttctctccgcccgagaggagccccatattggcgagcttcttgccgggcggctgggcgatgacctcgacgccgctttcgagcggattggcctcgtcgatcaagcggacctcagccgtccctcccttgaacagggtgatgaagaggtcctggaagtttttattgatttccgtcagggcggccaggaaacggtcccggctttcgccgttgatctgggagatcgcttccttcgtctgggagatcgaggtccggaggtcgtcgcgctgggcgatgagaaagtcgtggcgctgcttttgctcggcgtactcctcctcggccatcaggttgacggtcttgtacttggccatgtcttcccgggcgttttcgagatccgcttcgaccttggcggcggtgggctccggaatccccggctcccgctccggaagcggttcggaacggatttcgtggaggttttttttcaactcggtccagcaggcctcctcgaggttgaccatgtcgcgctcgatctccgccttgcggacctcccaggccattcgttcgtccttgagccgttcatgctccatccgccggccggacaaagatccctcggcggtttcgagatccttccgggccgtcgacaggcgggtttcaccctcggccagggatttttccagttcctcttgccgggtttgaaagccggtgatttttccggcggaatcagccatggcggttttgatccgtccggcctcctcgagcgaggagcggacgcccgcctgcagctcatcgattttaatttgggaggcctctttccgccgggccagggccagacaaagatcctcgaggcttttgatcttggcttcgaggacgtggacttcgcccttggccgtggccaagccggtcgaatcggcgttctgcttgtcctggtgaacggcgagctcgcgttctctttcctctccctcggcttggagagcgtttttttcctccaggagccgctcgaccagggccgcgtgagtcttcatcttttccccgagggcggccttgtccatggccaggatctcgagctcgtgggcgaagagggcgatgtcttccttgagcttggttcgctcagcttcggccaggctgcaatccttgtcgatctggatgagatctttttccaatccggccagccggccggccgcttcttcgatccgccgctcgagctcccgccggtcgttttccctctcctccagctctccggcgacgggggcgatttccgcctcccggattgaaagcgtccggccgaggtcgcggatttcctgatgcaggccgaacagcccctcccggcggggaccgagagacaagaggcccgcggccgacaggacgtcgccgccccgagtgatgaaattcgccccgggccgctcgagccacagccggacggcggtccgaacgtcctcgacgatgacggcgtcaggcagggcgggcaggccgcccgggagacgtgatcccggccggaggcgggatttgagcgttcccagaacacccggctgatcccgccattccccgccgtccggatcgccggccgtccctcccaagaggagataccgccctttcaaagtccggccatcgagtccgcgaagaagatcctccggcgcgatgatcgcggcccgcgattcgtctttccagaagacgtcgactaaggccgcgtcggccgcttccgtttcgaccagctcggccaacaagccgagggcgccgtccacggaggacgtttcgtccgacgcgcgctccttcacggcgattttttcgagggcctgaagatggtggatgtcggcgtcacgcagggcgcgcagctcttgcagccggtgttctaggccagcgacggtctccgcggtttcggccagccggccgcggagggcggtccattccccgcggacagctccgctttcctcgagcgaggccgtccgccgggattcgaggccccgcagatcctcggatttggcctcgaccagggcccgggcttcctctttccgggttttaagcttttcctcctggcgggtaagcatctcgagctctttttcgaccttagccgcgtcgttgcgggccgccgtccattcggccagcttctgaaggtgatcggaccggagccggtcggactgctccaggagcggggagatccgagccgtcgtttccgccagggtccgttcgaaggagacgatcgcctcctttttcacgacgagggcggccgtcaacgcctgtatctcctcccgggaccgggcgccttcttcctcgagcccgagcaattccctgagccgttcgtcggcgtcggccgccgcttttcgccggctctcctcgatgaattcgctccgcttggcatcgcgctcccgttcggcctcgagccgggcgatctgggatcgaatcgtataaagattctcccggcctccggtgaacgcctgttccagctcccagacattcttgcgcttttggttgacggccccctcctcgtccgccagccgggcctgttgttcgcgctcgcggatggaggattcttcatagcgggccaggatgtccgcctggccggcggcaagctgggcgcttttcaaccggaagtggagaacgttcagctcccggacgcgctcgcgcagacgccggtaccgctcggccgctccggcctgccgggccagggaattcttggccttggagacttcggcgatgatgtcttccaggcggacgagattccgctcggagtcttcgagcttgttttccgcctggcgcttcttgtccttgaaaaaggccgttcccgcggcctcctcgatcagggcccgcttttcgaccggcttggaggtgacgaacgtgccgatggctccttgttcgatcacgaaatagcggttttccgaaatggtccgcttccagagctcgtcctggatgtccttgagacggacgattttcccgtcgagccggtattccgactccccggtgcggaacacgcggtggttgacggtgatctcatcctcggagttttggagaaccagggaaacgtcggccatccccatcggcggacgcagggccgtgccggcaaaaacggcgtcgtcgattttctcgccccggacggtccggacgcgctggccgcccagaacccactggatggcttcgacgatgttgcttttgcccgttccgttgggtccgatgatgatcgtgatgcccggattgaaaaggattttcgtccggtcggggaaggtcttgaatccttggagctcgagtctcttgatgtacatgaatgatctttcagggcagtattgtagccaaatcatccccgattgaaaagcaaaaaaccggcttgcaatggaggggggattatgtcaaagtgaaatcaccatggaagacgacaagaggaaatatttccggttcgagtgcctgattccggtggatcttgtggagacgggcgaccccgacgccaagccggaggaagcgttgatcggcaatgtctcccgggaagggatgcgcctcgtgttcgacctggggcgcgcctttcaggaaggagacaaggtccggtttcagatccagacgccggaagacaaccgggtctgccggatgaccggcgaggtcatctggtcccgctcgcagggggaaaaaatcgaggtcggcttgaggctccaggaaacggaaaaatgttcgaaatcggagctgttggacctcggctacgaggcttggcggaagcaccagaaagagatcgagacgaaatagagggctcataaggaatcggggcgggttcaggatcattttttccctttttcgccgtgctccgggagcggaatcttttcggcgtcgcgggatttatttttgggggcaagcggcgctcgcccggaaatccgcggcgagagcgcccggagcggcgtttcgggggcgcggaagcctcgatttcccgggccgaagccgccgggccggtcccggtcattgacagaaacgcctgtttcggctactttatcactcccgccgcttagtgccagcgtagctcagtcggtagagcggctgattcgtaatcagcaggtcggaggttcgatccctctcgctggctttcgattttttcctttcccgcgatcatttttccttgccttgtccctctccttggggcatagtaaacgaaaaggaggaggccatggctgattttgatttttcctcccggaagccggagatccatcccgatacgttcatcgccgaaggggcccgcctggtcggccgggtggtcctggcggccgggtcgagcgtctggtacaactgcgtcctgcgggccgacgtcggagacatcatcatcggcgaaaaaaccaacatccaggacaacagcacgattcatgtcgatttcgatctgccggccgtgatcggcgaccatgtcaccgtcggccatggggcgattctccacgcttgcaccatcggatcccattgcctcatcggcatgggggccgtgatcctggacaaggcggtcatccccccccgttccatcgtcggggcgggggccttgatccctccccgaaaaacatacccggaaggcagcttgatcctcggctcgcccgcgatcgtggcccgcaagctgaccgccgaagaaatcgaacgccttcctgagcatgcccgggaatatgtcttgctgtggaaggcgatcgccggccggggaatcggagggatttaaaccgggagtcaattgttccggccgccttgcaatttccgcaaccgcgtgttaaggttgcggaagggagggagttcatgcaagccatccttcctcacaaaatccggaaagcgagggaagccgcccacctcaaccaaggggcgttcgcccgagcggtgggactgtcgtccgaatacatctccctcctcgaggcgggcaagcggaccccgtcgatggccaccctcgaaaagatcgccggtttcctcaaccgcgatttgtcgtatttcttccaggaaaagccggctccgccggatcccttcgccttgctcttccgggccgaggccgtcgatgagaagacgcgggccgagctccagcggttccggcgctactgcgacgattacgtccggctggaaaacctcaccggccggcgcctagaaacggcccctttctactccggcctctcgccggaacgcatggccgatgaggagcggcggcgcctgggtttaggggacgagcccatccgggacgtgttcgccttgctcgagaccaacggctgccgcctctaccggatgcctttgcccgaggattccaaggtgagcggcatcttcctctacttggaacagaaggaagcggccttcgccttgatcaacagcggcggttcgcccggccggcaggtgttccacgccgctcatgaatattgccactacctgaaggaccggttcgacgggccggtcatcgacggccccgacgtcttcatcgatgaatacgcctctctctaccacccgcgggagccgttcgcccaagccttcgccgcccggttcctgatgccgccgggcaagatcaaggagatcatcgagaaggatttccgtgcctcgcgcctggcttacgaccacgtgctgtacctcaagaggtatttcggagtcggggcctcggccatgctccgaaccctccggaccatgagcctggtctccgcggcccaatacgacgaattcgtccggatcgatccggggtcccgggaaaaggacctcttcggccgggcgtccggcgaggaccccgttgcgggctggccggggacggctcccggaggggaaggagaagagcggatcgaggccggggcggcgtccgggaccgccggtccgccggcccggatcaagcggaaacccgtccccagcgacagataccggatgctccaaaaagaagcgatccggaaaatcgcccgggaccgcgagctgcggaaggccgttcagggaacgcttccgacgtaagccgggcgggcttcaaggaggtggcatgggcggaatcaaatggtcctcggctgtcttgttcctgtttgcggcgacgctcttgaccgccgcgttttcctgctcctcctcgacgggggggaaggggacgggcggcgccgaatgggtgatgatggacgaatcctacgttccgaaagacgacgtcgaggcgttcatcaaggcggacgcggtcaaccgcggcgctcttcccctgttcatccggaatcacaagtccgacaagcgggccttgagcggattcaaggggcggcaatacgccgggccgagcccccggaccctggaaatgctcaaccccgggctggacgactggatgctcgtggatattcggtacaaatcggaaagcgagcgcgagatcgtccggacggtcctgtatctttcgatccggggcgtgtggaaagtcggcgacagcgggacgctgatcgcctcgtcataattgggagccacaacgccaatttacctgtttagagggccggccgacgctcagcggatccggacttccagcatccggtcgatgcggaaggtccgcatgtcctcgcgttcatggcaataggcccggacgccctcgaaggctttgcccccgtattccatctcctcgacggcctccggccggatccggcggcggcttttcgtgtcatccggcttgaggtagaggatctcgaggtcgcggccgtcccggacggcctcctcgatgagccgtttcttttctatgtagggctggcgttcgtccgcccggtcgtattgaaagcgggttagaaaccgggaaacccgccagtcggtccggatgtgcgagcggaggatgggcgttttcaggaccagtccctcgaagctcgtgcagcggctgagggcgacataaacctggccgtgggcgaatgtcccccggccgacgtcgacgatgacgttccggaacgtcttgccttggctcttgtggatggtgatcgcccaggccagcttgaccgggtattgaatgaacgccccgacggcctcgctgacgacggcgtccttttccgagtcgtacgcgaagcggtagaggtcccattcgttgggggcgacttccacccgcttgccgtcctggagatcgacggcgatccggtcgtcccggcccttctcccggaggactccggcgacccggccgatcgagccattgacccagcggccggccgcgtcgttgttcagcagcatcacttgggctccggccttgatttcgaggtgttcgtcggtcgggagcgaggagcgctcgaattccccctcgacgatcgcctcataggcatagagccggccgggcaggagggcgagcttttcccggttgcgggcggcggccaggtcgttggtgctcgtcaaggtcacataaaaatcgtcctcgggcgggacgaactccgggtcgtaccgggagtggagcttctccaggtcttccggcccggcggaccggttgcggacggcgttgagcagggcgatgaagccggcgtcggtctggcgatagattttttcgagctcgacgaattccaggcggaaggaatcccgcagaagacagtgggcggagaagaagtacggcgtttcgtaatggagggtgaagagggttttttccactccggcgacgaccggcggcagctggtagagatcgccgatgaggatcaattgcaggccgccgaacggccggcggggcttcggaccgttcaggcggaggaatttttcgacgcaatcgagaagatcggcccggaccatcgagatttcgtcgatgacgacggcgtcgagctttcggagcagggccgcccgctcgggatcctttttcgcgttgattttgcgaaccttgaccagggtgatgtccggcttgaagccgcagaacgaatggatggtttggccgcggacgttcagggcggcgacgcccgtcggggcgaggacagcgatcttcttgagcgtcgtttcccggaagtgctcgagaagggtggattttccggtcccggctttcccggtgacgaaaacgggccgggccgtctcctccatccagtgaagggcttgccggaattggtcgttgatctcgatcgggccggaggcgtccatgagcctgaaagcctcactgtatccgaacccgcccttggattcaactcgcatttcgtctttagttccgtttcgccgcggcggagcggagggcgatcgcccggacggatcagaaggaacaggcgcgcttgtttttcaggttgtacttctggtgatattcctcggcccgggtgaacggaccggccggaacgatctcggtgacgaggcggccgggaaggcggccggaccggtcgatttccgccttgatttcctcagcctgtttccgctgttcctcggtgtgataaaagaccgccgagcgatactggcggcccacgtccggcccctggcggttgagctgggtcgggtcatggaaggagaaaaacgcctgaacaaggccggcgtaggaaattcgggccggatcaaaggtcacccggacggcctcggcgtggccggtcgtgtccgtgcaaacctgttcataagtgggatttttcgtgcggcctccggtatagccgacgaccgtttccaggacgcccggcaggcggccgaacttctcttccacgccccagaagcagccggcggcgaacgtggccgtttcgggcccgcccgccggggccgcggcggacggccggaaggccagggcggcggagttgacgcagtaatggcggccggtggggggagggccgtcgtcgaagacgtgaccgaggtggccgccgcaggcggcgcaccggatttccgtgcggatcattccggccgatcggtcctcgcggcgctccagggcgccgggcgacgccgattcgaagaagctcggccagccggttccgtgttcgtacttggtttcggagcggaagaggagggcgccgcaggcggcgcaatgatagccgccggactcccagaagtcgtcgtaaatcccgctgaacggcggctcggttccgcaggcgatcaacacctggtactgggccggcgtcagcgctttcttccattcctcggggctcttttgaacgattttcttcatcggcgcgctttcccgggaatccgccggaacggaaatatgaacccgcggcgaggacgagacgaaatggacgcccttccaggccgtccagccgagcagaagactgaggacggcgatcgcggcctttcccttggggctcatcctcgactcccggtttaaaagatgtaaatcctacaaaaataatatagaaagattttagaaatcgtcaagggccaggccggccgcggccggcgagggggatcaggagcgggtgaggacgctcctgatcttgctttcgatttccgaggccggggccaggcccacgatccgctcggcctcgcggccttcgcggaaaacaatcagcgtcggaatggccatgatcccgtgggtccgggccgtcgattcgttctcgtccgtgttgagcttgcgaaaatcgacctccccgtcgaactttccggcgatctcctcgaggacgggggccatcatccggcaggggccgcaccagggggcccagaaatcgacgacgacggggcggggggctttgagcacctcggcctcgaaacgggcttcgttcgtttcagggacgttcttcatcaagattctccttaggggaaaagtcgcgcaaaatgcgttcgatgcggggatcggtcacctcgtagcagattttcgccccgcggcgccggccggcgataagaccggcggttttcaagatcttcaagtgctgggacacgttgggttgactgatcttcaggcgggcttcggcctccgagacgcagcagtccccttccagcaggaggcggagaagacgaatccggacgggatgagccaaggcccgaaagatccgggcggaggcttcctccgatcccgctctcgccgtcttgggggtacgcagcgtctttaacataacgaatatattatataacgaaaatataatatgtcaagggagccccgcgttttcgtcctgccggcgtccactggaatatctttctctgtttatgtaaaatgatcctccggcggggaacgtcatggctcgaaaaatcgtggtgatcgacgacgacaaggtgacgcggaagcttttgaccgagctgctgaaccgcaacggctatgaggcttacggggctcacgacggcatggaaggcgtcgccttggtgaaatgggagcaacccgagctggttttgaccgatctgttgatcccccttcttgacggcatcggcgtctgccagcaaatcaaatccgatcccgagctcagcggaatcaaggtcatcgtgatgtcggccctgaaaaacccgctcttggtccgcgaagcccgggccgtcggggcggatgatttcatcgacaaacccatccggacgaacaccttgctcgagctgatcgcccggctgcttcagaattgaggccccgcggcccctcttgccttttgacttttgcttgacttcgtactattctatccgcggatgctggctggagaggatctttcaagccccgcttccttttcaaaccttggcgcctcgacagccagcgcctctattttacggggcatggggcgccataaagccgccgttcgttcttatttcttcccttcgcctttttccggctccttcttgtcctccggccgccagagcttcgaccgctcccgcagatggtccttgagattcaggtgggggacgccttccttcagccagtccggggcgggcgagcccttcagccagtggtcgaaccattccttcatccggacggtgtaatcccgctggttggccggcttggccaggccgtggttctctccggtgtactggagcatgacgaccgtctttttcaaccggcggagcgtgttgaaatactcgatcccctggttccagtcgacggccccgtccttgtcgttgtggagaatcatcaggggcgtgcggacggcggacgcgtgatagacgggggaattgcgctggtaggcctcgaggttgtcccaataaccgcccttgaaccggccttggctgctttcgaagatggccatgttggaaacgccggaattgaaatagatcgagctgtacatggagatcatgtttgtcagcggagccccggccacagccgcggcgaaatcagcctgggtcaccagaaaagacgtctcgtatccgccccatgaatgaccctggaggccgaccttggcccggtcgaccaccccggtcgccgcggccgcgtccagggctggaaggacgcaccaggcggcgctcatcccgggatcgttgatcttgtacgtgatatccgggaaaaagacggcgtatccgttgctcgtgtacaccgtcttgttgaagccgttggacgcgggcggcagatggcggttgagcatctgggacattttttcatagtaatagacaatcgtcggataagaccggcccggttcgtatccggccgggagaaagagcgcgccctggagccggttggtttttccgctcttcggatcgatgacataatcgaccagccttacgccgctcgaccagagaaaatccttctgttggggattggcctcggtcaggcggatccaggatttcaggtccgccccggcggcccgccagtccgggaaatcccggaacgtttcgcgggtggtgagatagacatccgctagacgggccttcaggagaggtccgaaggcggcgtcctcccagacgagaacgcgcggcccgggcgatcccttttcgatcacggagaatcccgcttttttcgtccattcaccgtacgttccgaagtagatcggccgggcgggatcgatgcccttttcgtcgggatcgagacgcagacgctgataccggaggccctctttccggccgttcccggtgaggttgaggctcggcccgccctgaacggggacggaccagacatcccagccgtccgagaggaggacggaccgggaatccttcatccagccgacggggggatcgggcggatcgatttcattgtggtcgtcgtcctcgttgacgaaatcggccgggacgtcccgggtgatcggccgggagacggccgcggccatgtcatagacggaatagacgccgccggcgtagtggagcaacttcgtcccgtcgggggacggcaggacgggccagcgggttttcttcaaggccagggttcgtgttcccgagatcatgtcgatcacgtacaggtcctcgtaccgccggccgtcgagggatccgtccagctcgtaagcccggacgtcgcggccgagggcgaagcggtctttcggcgccggacggacgtcgcggacgtcttcgtcggccaggcggatgaacttgttttccttgatccggtagaccgacaggtaactgaaattcctgtccctctcggcttcaacttgctgctgggattgaagccgcggatcattgaaatgccagaggacgaggtccggaatgttttcgtccggctcctctccgggcttaaccggcgcaaccggccccgggccggacccggcgcttttcttttttggcgcatgaatgccgaacaggagagcgtccaggctttcggtccagcgcggagtccggttcgggctgatcgtcaggcccgcggggaagctcttgtcgtcttgcggatcataggcgtgctttctcgggccgccggccggaaaagtgaagccgataaggctgaacagcttgtcctcgtagtccttgtcttcccggcccttgaggcaggccagagcgccgccgttttccgtccaggaaaggcgttgataagacgcctttccggaatcgagaaccgcgagaaccccggtggtcatgtcgcggagaaggagcccgttgccggcctgtccgacggcgtcgatgaggagcgccaaccgggcgcctttcttgtcgaaggcgaactcgctcacgttgccgagaacgagttcccggccggtggccagctcgcggagaatgaggtcggagccggtccctttatccttttccttggcctgtccctccggggcggtcttgtgaagggcgatccaggccggattctcggccgggaaagaaaacgacttgattttatcgtagacggtcttctccccggaggccagattcacgacggccgctccggcgaagaggggagcgcgttccttccggaggcgccgggcttcctcgggctcgggattgaccgcgaaggcgccgaaggcgccgtcggccgaaatcgcgaccgcgcctttccggccttccccggcggggaaggcataggctttgtccccccggatttccttgaaaatgacttccccgtttccttcctggggagcgaggcgggcggcgaaccatcggccgttgtccgagacgacggccgagacgattgtcctccaggcgaggatgtcacggagctcgatcggccgcggcccggccggttgggccggagccggggcttcttggcccgcggccggaacgccgccggaaagaaccgccaggaaaacgagaagaagaagggcgaaagccgggcgcaggattttcatggagcctcccgaaaagattggatgtctttctggcaaaggaagtcatggtaagggaaagaccggtggttttcaagcccggccatggcgatccttgatgtccatacggaattgaaggataatataatctttgtgaattcgatttcttgaatatcgatgacaaagcgatttaagaccgccataagggttttcctcgttgtctgtttatttgcatattcaatgactcctttccctgcgttttgcacgcaagacatgcagatgtccccggttcatcgcaaatggttggaagaacaagtgccctatatcatcactcccaaagaacgggaagtttttctagcgcttaaatccgatagagacagagatctgttcatccgggctttttggaatcatcgtgatcctgacaaaaccactcctcggaatgaattcaaagaggagcatgagcggcgcttgatccatgccaacacgaatttccgggccgggtccgcggttccaggctggaagagcgatagaggaaagatatatatcattctgggaccgcccgaatctattcagacattcgaagggagttcccagctctatccgacgatcgcttggttctaccagggcatgagccgatacaatcttgtcgacgcattttacatcgtcttttttaaaaatcgcggtgtgggcgactataagatttacagcccgacgatcaacgggccggagagcctgctcgccgatcacgcggtatcgcaatcgccctcctcggcttatcgacgacttctctcgatcgacgccttgctggccaagctttccttatctcctatcccgggagagaacacgcttgaaacgacggcctccttggcttttgaccggctcctgatggatgtcctggccgtccctcaaaaatctgtgcgggatgactacgctccccagtttatgaaattcgcgggcacgattgatattgagtattccgtgaactacctgcccagccactcatcggcctttgttatccgcgatgaaaccggcgttgctttcgtgcattatcttattgaactggagaagcttgtcttcaggcatatagacggcgggtggcgcacacggctggtcgttaacgtttccatgaaggatgatcgcgaccgcatcgtttatcaattcgaaaagaatgtccctctcgaattaacggatgaccagtacgccgaaattcgggatctctcctttcagttccatgacgcttttcccgttattgacggcgccttccgtctccaggtcctagcgaaaaacgaggcgtcgaaggaatttacgaccctggaagaaaacatcagggtggcggaggaatcgccgctgttcctctcgccgatgcttttcgcctaccgcatggaaaaagcgccgccggaagaaaaaacaaggagagcgtttaaaatcaaggagacgcagctctatccggtttctctaaacgatttttcgtctgaggatcaaatcatcgtactaacgcgggtttcggcgcttccggaagggatggatcaaaaaggatccttgcgcttcagcattcattccgacgatgccgtcatccgcgaatgggacagcgggttctctctttctgattcccccaatgacgttatcgaaaaaatttctctccgggatatccctcccgcgtactatgtcctcaaggccgctctcgtgggtgcggccggggaggaagttctgtccgaagaaaaaccttttatgatcagttctgcttccacgattccccgtccctggatcagcgcctctgtcctccctccggccggagattcctactatccccatattttggggttgcagtttctcaatagcggccggcctgcccgagccgaggcgctcctcgaggcagtctcggcggcgaatccagagcaaccggcatatgcggtggactatgcccgggcgctcctggcgcaaaaaaagttcgaccgtatttccgtcgtgcttgcgccgttctcgacacagccgttctctgaagtccaagaacttcttgctcgaagtcttcacgggcaaggcaacttctccgaagcgctcgccctttacgaggaacaactgattcgttacggaacgaactttgtcatcctcaatctcatcggagattgttattacaagttaggccggcttgccgaagcccttcaaacgtgggaacgttctttatcgataaacgcagaacaacccgagattcgagctcgagtggaaaagctaaaaaaagaaagttactgaatcgggatttgaacggcatcctggtccggcgagagagaaggatttttcttcgcgcctctcgtgaagcccctttgttcgccgtcgctgtcaatgagccgaaacgttccgaatagcttcgtcgcgttgtcatacaggacgtatatgccttgacccgaaaaacggccggaggaccatttataaatcagtccatcggcgatctggacccccgtgacgcgtactcctccccaatccaggacataagctccattttccaggctgagtttgaattgatgcccgtgagtttgtgttcccgctttgcttccctcctcatagaaggcgctgtattcataagttccgctgcgatcgggccagttcggctcgattttcgtcgggcggggattattgcaggtggaaaagatcaatccggagaagagaacaagggatatcaaaaaaacgaagcgttcattctttctcgcgcgtatcttcatattccgaaaagccctttctctttagcgtaacgatttcaaataacacgcatcaagcacgggcccccggtgcttgaaacatcgggggcccgtgagttttcatggaaatatgatatgcccgtttagaaccggaagtgcattcccaactggaagcgccgtccgggcgcggcggcagtgggatttccgaatctattcccagcggtccgagcgcccaagaaactcgtgtagttggtaatattgaagacgttaaaaacgtcgatcttaaactccagggaagctctattcaataaagcgatccttctcgagaggctcagatcgacattgtaataaggatcgcccctgaggttatttctgccgaaaggacgagcatttcccaaacctgttccccaaagatcaaggccgtatgtttccgtatagggagccgccgagttatatttcgcgatcccggagatctgccagtctttcaagatcgcgcttttgaagggagaattatagaagaaagcgaaattcaaaagatgccggcggtcattgccgcccggtcccttgtcatcttcgatgtttcggctgtcctgaggaaggctccagggattgagcatgtcggtggttttcgaaagcgtgtacgtcatgaggaacatgtaatccgtcccccggcgttcgagcttgaaattgagcgctttgtaccagctacggctcaaattgccgagatggttgatcgtccgatacccgtttacggtcggggtaatggggcgagtggcatcagcctcggcgatcgatcgagccacatccgtcgagactggggcgttaacgtcgataacgctcaatccatccataaccgtcatatagataccgtcaatgctaaaactcagattggggaggagttcgtgctggaatcccgccgtccattgcatgctatagggattcttgaggttttcgtctatctcccaaatattacgagccggaagatcggcgccatcggggaactccggcaagccgtaaggataatcggggaattcggccatgtcgggagtaagagtcaggtagacctgacccgctttacccaaaaaagcgcctttcgtgtaatggaaggaaaggttctgctgggagaagatcccgaatccggcccggacgacggatctcccgtttccaaagagatcgtatgtcacgccgaggcgcggctgaatattgtccccgtcgacgggagcggtataacctacgacattgaagatatgctgcacgtcataacgaagcccgagagtcagcgttaaacgattggaaacgctccactcgtcttcgacaaaaagagcccagttaagatctctcgatttgacccccgtcaagcttttatccaaggcgaagctctgcatgaaaagatatggattaggatatttatctggagagccggcaaagtaataaattccgtctgcataggccagctgaatctggtttgccgtcgtatatttaacaaagccgccgaacttcagaaagtggttgccgcgggagagggtgagcttgtcgaagatctcataggtcatctcaggggtgaccccgaaaccgtccgagtaataggcgtctcctccgagaaccgcataaccataacggtcttccgctgcccgatcggggtaatgggttaaagccttgcgaaggtcatggtaacttgcgacctgcagtcggagttcgttcactttgcctttatcaagcgtcttcaaccaggacagataacccgtgtggacgtatgtcacataggacattccctcgccgggaatattataacctccaaattcttgggcccagtcaaataaatcgttgctatagcggagggttatataatctgacggacttgcctggtaatcaaccttggcgaaaaccatatgctcatcctgattgttgggaacggttttgccgaaatagtcgggcgcaatgacagtactctggcttctttgacgacgatattcataattcagaaagaaatgcgcccgatctttcacgatggggccgctcaacgtgaatccgatttgctgttggtcgtagggtgcttttgaatgcgttaggaagtccggttcgtcccaggcaccagggcggtcgtagaaatataacgaccctctgaactcattcgtcccggatttcgtgatggcgctgctaatggcactcatcccctccccgaattcgaccgagaactggttgtttaatacctgaatttcttgaatcgtgtccaggctgtagcccgaataatatgttcgggccgcgcttctccatttggagaaattactgccgccgtcgacaatatagttcattgcccagtagtgttggccggatgtcgtcggccaataatcggatccggtgactccgggggctaaatgagtcaatccgatatagtttcttccaatcaatggaagcgaagtgacgagttcttctgtcaacacctgctgaaccgtcgtttctttaatatcgacgagcggggcttgcgccgtcaccgtcacaaattgttcaatcgcgcccgcctccaatcggaaatgcagagacgaggtttcgttgatatgaagttgaagatccttctggatatgggttttgaatccagcaagctcggccgtgatttgataggtgccctgaacagggatggctcgaaaagagaacttgccgttaggatccgcgatgaatgatcgtgtcatccccgtcatcgtgttttgtagggttaccgtagctcccggaagaggttgtccatcgatgtcgcttacggttccgatgatatccgccgtaacgacttgcgcaagagaagtgctagacagcataaagacagccgtggctgttatgacaaccaatttgatccacttgatcgccttcattccactctccttttcgctagatccgacttgccgaacggtcccggaacttgagcacgaacattccacgcagattgttcttttccctattttgacctccttctcatggcatctcttgccggatccggtgatcccaagcttctccacgatcctttaaccatttgtcaaaccattcccgccacatttcgtaattcaacgtctttttccttgggttgatgatcccgtgtccttctccaatccaccggatctgaacggcttcttttccctgcactttaagagctgagtacataaggtctgattcggcgagggtacaccagggatccgcactcccttgaacaaggaggatcggagtattgatcttatcagcgttgaaaacgggtgcgcgatcaacgtaaacgtcttttctattccaaggatatatccccggaagaacgatttccccataattcggttggccgaggacgacaaatgaatacaggaggggattgctgattactccggaagcgatcagggcggaaaagaggtcggttcttgtcgacaaagaaaggccctcaaatcctccgtagctatgtccgaatccgccgatcttctttgggtcgatgtacggtttctcccggagaagcgcctgaatgacgtcgataatgtcattggcggaggattctccccattcattgatatgagcgtcagcccattcctgaccatagccccacgttccccgcggggttaaggtgaaagcgatgtaaccgtttgctgcgaaccagtgattgagaacgcccccgttccccgttaggaacgtttggctctggggaacgacaccgccgtagtaataaacaatcataggatactttttattcggatcgaagtccggagggaagtaaatccaaccgtcgatcgtatccccgtggcggttcttgcttgaaaacagctcggtcctccctaatgtcagttgagagaggagttttccagcaggatcccaaagaacatgatgggtccctgtcctgagattgtaagcttccagccaggaaggacgatcgatttctccgagtttgagaatagcccaatctccacggggacttccgagaaaaccttccacgttcttgaaaggcaacgggatttcccggggacggtccaggctcttgtccaacgagtaaaggcgatagacagtccggtccagggccacaaaaaacagctcaccttccggatgccaccagagggattcgacatgcggcgtaaacgtggagggtagaatgttctgagcggcgccgctggtaagatcaacgagcattaggccgaaattccagcggctgtggacgggatctgcgggagttttcgggaagtcgaaatgcggggcgacaaggaccaatcgtttggaatcggggctccaggctatatctccgacatgagaaatacggaggtccatgaccttacgaggatgccccgaaaggagatcgacaatccagagttcttgatgctcatatggaaattcggttgtcggagttgaatggataaatgcggcaagacggccgtccggagaaatcgttgatctcccagaatcccggaacggagaagctcccgagtggatgatatggcggtttccgttttccaatgaacccagccacaggctgattttattccgccacaggggccagcgatcaaaaaaagaatccacaacatcgtaatcttggtttcgcggggggacatcggttgtcgtaaagagaatatgcatcccgtcgggatgccaggcgatttgggttacccctttcaaacctttgaattccggatgcccggatcccgtcgtccggtcaaagatccaaatctcttggccgtcggatgacgcgtcgacgacggcggccagacgttcccatgagggcgaccaagaaaatgccaatagaggcttggcgatggtaaaactcctcatgagtttcccatccgcgacgcgaatcatatcaagtcccccttggaggttgatgatcgaagtcatcgtcccatcgggggagagggcgatgtttattcccggttcgaaggatgataacgaaggctgttggagggcgacgacatcctcgatagagagagggtgtttgggatccaaagaagcggccggccaatcgtttttaaatttttcctcgacttccaatgaaatcctgatgccgccggtccgatcggagaaatccagagaagcgacgaggaggcggtgctttccttgagacaagaccagcgggatccggttcagcgcatctaacgcttttccatcaagaaagaccttaaaaggagctgtgctcttgacatgaagcaccgcgggttgccaccggggaaccgccaggtaggttgcggcgagaagaagacctgacgacttgtcttccccggcagggatcaatccatcgattgctttgatcggcgtccataacacggtttgaccgggcgaccaggcgaagggggagccggccgccggccagagatcttccggacgaaaagagagggtattttcgagattaagaggccggtgatcgaacacgggattgaaagctcggacgcgagccgtcaaccatgtctcgagggggcgatcggccgcttgcccgggtaaagcaacggccagaaagagagaaaagactaagagcgttctccaggagatcttcatccgatcctccttatttgttttttttgaacgctaattcgtcatgattgacattttcgcgatcccaggggaaaatgccgaaccaaaaaaacgtcgaaagctcgtattctaattgtcggaaatcgtcataatatcgacgtaaccggtcatccttaagaagttcggcgtaatgttcccacatgaatcggatgagttcgattttaatgtcttttcgtatttctccgcgtgtttgagccgcctgaatgtctctcaagaaaatgttgatttcattttcctgccgagtccgatagaactctttcaatccatacccggtcgatgtcgcgatatccgcttttaattccggactccaactgttgaaccattgctgccacagtttgaatcccaggatgattccttctttgaaggttttcgcatgtcgagtaatgttccggtattttcttttatattcgatgtcaaaagatcgaatgatatagatgactaaagaagctttattgctatagtatttatagtaagttcttttgctaactccggccacatggcaaatttcttccacggagacgcgtttgagcccgtgtttattaaataattcctttgctgcagcgatgattttttctttagaatgggactttagatgagaaaacgaatattcgcgaagtaaacgattatcgtatttcattgctaaaaacgtataccattataaaaaatattctagtcatgtcaatagtcatgttcaatactgatttcaattcaatttcatgcggttgcggccgcagcaaccgctttccttgagatcggactgaatgttcaaatcgacgaaaacaagattttctgtgaggaccctcgaatttgatcttgatggactaatagataatcatggtccgccttattggttgttattgtgaccatgaaggcgatttcccggcgattgcgggcggtctcggcgtattgagcgatacaggctttcccagagcccatttctttataaaaaaccatttactcgaggatcttttccgtcttcgagagagacggacggtcaacagcggttacccgatcatatggcggaatcgaaccttcgtcccgcggcagtccgccatgacgttgagaaaagcagacataatcgcgcgggaaggatttgatggccggccgtcatttcggtatcaggggaaagagtcggaacataaaaagatcgaaatcaagcttcctcctcccgtttttcctgtcgtgatagtaaaaacgccgaggaaaatatcaatttccatgccttcgccgacccatcccgagacgcgggtgtgtttctttcatcggccggattgattactggacaggttcaggttgtcttgtcgtcccgggatagatcttgacttccccggatcgacgatttatcctccgccgcggaagatcattgattccaaagaaatcccggccgctcgcttaagccggggatcgaaagcacctccatcggcggggcaaagccccgccggccgtcttcaggcgaaaaatcgggcttgaagaaaacggccgggcggacgggaaggagaatctcgatgaaaagcgtgttccgatgggccgcggcccttttgattgtcagcctcgcttcggcggccggcgcgtccggtcaaccgaatcccgccgcctcctccttcgcctctaagccctatgaagcgatttctctgttcggccgtccgcttatttccccggccccttccccggcggccgtgaaaagctacgaggacgccctcaaggatttcgacgtcgatccgagcgaagacaactggatctggctcggccgccgcacggcgtacctcggccgcttccgcgaagcgatcgccgtctacagcgaaggcttgaaaaagcatcccgattcctgccgtctgtaccgccaccgcggccaccgctatatttcgatccgccagttcggccgggcgatctccgatttcgagaaggcggccgccctggccgccggcaagccgttggaggtcgaggccgacggaaatccgaatccgtcgggcattcccgtttccaacacccagttcaacatttattaccatctcggcctggcttattacctgacccgggacttcgtcaaagccgaagcggccttccgcgagtgcctcaaatggtccaacaacgacgactccgtcgtggccgcgaccgactggttttatttgattctgcggcggacgggaaaggcggatgaagcccgcgccctcctgtccaagatcaattcgaggatgaagcttctcgagaacggagcctatctcgagcgtcttttgatgttcaagggagagatcgaaacggacgatttcggccgcggccggtccggcgaaaccgccatcgaaacggcgatccgttcttacggcctgggcatggctcgtttatggacaggcgacaaaaccggggcccggcggctcttcgaggagatgctccgccgcgaggactgggcgtcgttttccgtgatcgccgcggaggcggaactggccgatcttgtccgggccgagccggacaggagttcacccggcgcgacgctcgcggcttggaccttgagctggaacgtgtacgacctcgacctgactcaaaagcttttcgagccttcgcccaggacgacttacttttcctcggaaaaggccggccggatccaggggatggacgccctgatggaccattcccggagctttggcttcattcccgggggaaaaaccgcggacaaccgcctctggctcgacggtctcgatgtcctgggcgttgaggatatggccctggtcacggccttctggtatttcgaccgggacgtggccggcccgggccccgtccaaaaaggtccggtgacgttcgccatgatgcgggagggcggaaactggctgatcgtccacgcccatttcgccaacgatccccggtgaaaccggaggagcgggcttttattaagcaagcgccggggccggggcttgttccccggggacattccgaagggtgctcatccccggcggaaacgaacaggatgacgtcagcccggccgggcggtctctcatcgtccgaataaaaccgacgagcccgtataaaacgtcccggccacggccccggtcatgaggcaggccagggtggcggcgagcaaagcccgaaatccaatccgggagatgtcccggatccgcgtcggggcgagcgcgcccgtcccgccgacgaagatcgccagggaggccacgtgggcgaagccgcagagggcataggaggcgatgatggccgagcgcggatctttgagcgcgccggcggccaggagatctgacaggcgcccgtaggaaaaaacctcggtcaagatcgtccggtcgccgaggatcttggcgatggagaacgcgtcggccggaacgacgcccatggccagggtcaggggggtgaagaggtagccgaggagagcttcgatggaccagtcgaaatgccagccgaagagcccgttgaccaggccgccggcccatccgaggccgaggttgaccagggccaggattccgaggaaggcgatgagcagggtgacgatcccccccaggagcttcaggccttccccggcgccgttgatgatcgccatgatcaggttgtcctcgcgctcatagtggggcttgacgtcgagccccagggtcagcggcttctccgtctcgggcatgagaagcttggccatgacgatcgaggccggagccgagatgaacgaggcggagacgaggtggccggcgatcgtcgggatggatttctggagcatcatcacgtacatcgccaggacggtcgaggcgatcgtgcccatgccggcggtgatgatggtcccgagctcggaccgggtcatgtccttgaggtggggccggacgacgagggcagattcgacgccgacgaagatgttggccgaaacggagagcgcctcggccccgctgattttcatcgaccgggagaagagccgggcgaacaaccggacgaagaacggcatgatccgcaggtagtagagggcgcccaaaagggcggcgaagaaaatgatcgtcggcaagccctggaaagccaaaaaatagccgagggaggtttcgccggcttcgttcgtcgcgcccggcggcagggccaagcggccgaagacgaacttcgtccccgccgtggcggcgctcaaaaccgtggtgacggcgtcgttcacccacagaaacgccttggtcccggccgggatgacgaagacgaagcaggcgacgagaagctggagcccgatgccccagaagagaacccggacgttgacgattttccggttcgacgagaaaagccaggcgacgccggccaggacgaagatgccggcgaagctgacgaggttataaaccgtcatgcctttcctccttcaggtctcgagccgccgcgggccgaaatttccttgatgtcccgcggccgagtgtaatcagccgcagaagggatgtcaaatgaccgaacggcgccgttaaaaatcttaccctcctccgcttgtcccccggtttcttgattccggccggcgatcggattacaatgaatccgcgaagagagcggaaggacgggagaaaggattccgatgagaaacgcggctctcgctctcgcgctttccttccttctcgtttcctgcacctcgagcccccgacgcgccgtccggacagccgttcccccggctgacgacatgaaaacggccgagaccgcctcggctttggccggccggggatcgtacgtcttcctgaaggacgcctgccggatatacggcggcctatacgccaaggccggcctgagggagcgcgtcgccgccccgtatttccgggcggtttttctccttttcctccgggaacgggagctgggcatcggcggaaccgaaaccttcgcccgggccgagcgtttggccggggaaaatcccggcctgaccgggtaccggaattggctggccgcggcccgggaaatcccgctccgggtcaagggggtcgtccgggactccattccctggctggaaaataccttcgatccggaagaactcgatcgccttcgggccgacctgtacgcccgggctcccgccgacggcgaagcggcgtatttttacctggccctggcttgtcccgggaaatcttcctacgaccgcgccgacgaccgggcggcaatcctggccgcgcatcccggttcgatcccgatcctgttccggacgggattctgtcccgcgccggcggccggacgattcgacgaggtcctccaggccgacccggaattctgggaagcttacggcttccggggagaggcggccctgggacggggggagatcctaagcgcggaaaaagacctcctgaccgccttcgcccgcatccccgaatcggccttgtatcccgttctgctcgccagcctctatttttttaccgaggaattcgagaaaagcatcctctattgcgagaagaccctcgccctgctcccggaataccgcgacgcccttctgatcaaagcgatcggcctttcccagctcggccggaacacggacgcgatcggcgttctgaaccggatcatcgagatgcgttactacctccagggggaggcccattactggctggcttggaattatcatgccttgaacgagagggactccgcccgggggcatatcgaggcggcgaaggggccgatgcccacgaacacgcatgtcttcagcttgtccggaactctggccctggaagcgaacgaaccggccgcggccgaagccgatttccagcaggccgtggaattcgacggggccaacgacgaggccttgttgggcttggcccggatcgccgagcggagggaacggtggacggatgcggccggctggtacgagcggacgatcacggccatggaggggaaggcggaggggttgaaggcgaagatcgaggaaatcgccggctcggggctggccgctgaacgcaaggcgggaatgctcgcccggcgcgagtcgcagctccggacggcggaaatcgtggccgcggcggccgctttcaacgccgcggtcgcatgggccaatgccggcgacacggccgcggcccgggcggcggccgaacgggcggccggacatccgcaattcaaggagcgggccgtcgagctccttcaaaggatcaaaggcgcgccggcgccctcgccctctcggaagaacgacggtcagggagagggtgtttgacgggaccgcggatgtccggacttcagccgtaaatccggcgagtccgcccttcttcaagatcgaattgcggcgaccaaggcctcggacaaggatgtcgaggcgcgacgccgccggatccgtggcgccttcaaccgggaatcggcggctttcttctccgccatgggccggttcaaattgaagagctagagcttcgtatagtcgagctccgagccgagaaggctgtgggggatggaatagacgatcaagaggatgagcgaagcggccaggacccagccccgggccgcccgtcccttccgcccggcccacaaggccgccagccaggcgatcatcgcgaccagggttttattgtccgtcaggtcggttccgaacgggaatccggtccagagctttccgaaggcatactgctgcatcagcgggccgaggatgaatccgccgagaaagagaagggcgcaggtcgccaagacgagcttccgggggtgttccctgcggttcagggcggccaggccggcccggaccgaaaacagcatcgccaggaacatcacgatgatatgggggatctggataagaggcgggacggcgccccggaaccggacgatgacggattctcttccggcaagcggcatctcccggccatccttcgataagacgatccggtaggcgagcttgccggccggcggctgggcgggaagctcggccgaaaggacgtccccggccgggaccatctccacccgcgtccatggatcctccgtcggatgccgcttgaattcgatgaagccggaaagccgtccctcggcgttgttcaccgggatttccaggtcgcggcccgtttccgcgctccggggaaggcgataggggacttccgtcccggagacttcaacctttccccggagggggtaggtcggtccggatatccgctggtagacggccgcggccagggtcaaaacaaccgccaggatccagagaagcgcccttctcatgatgacggatccggtcaatccttaacggtgacgccgccgaaaatcgccgtcccccggacgtgcaaggttgattggacctcggattcaggcggattcgcatgcttcatggacaccccgcccaggatcggcgttccgtccaggacgaccttccaatcccgggggacgatgatgtccaccccgccgaaaatcgccgtcgcttccatggtcgcttgtccgccctcgaggccggccccggttaaatccagatcaaccccgccgaatacggccgttgcctctccgcccttgaaattccgggcttcgacgcggcgcttggccccggaaaaaacggccgtcacgtcgatatcgccccccggcgccggggcggcccggaaacggtcctgccgccttctcgacggccggaagatgatccacgcgccgagaacgatcaagaccgccggccaaattttccgccagacgtccacttcgaggtaaccgagctcccaggcctggaacaagcccccgaataggatgaggatgagtccggccccccagcggcggaagcggttcccgatcaggaccgaaatcccgatcaggatcaggatcgacggccaccaggtggacagcaggtatccgaaatcccagaaatcgtagcggaggaacaagactagggccccgatcaggatcaggaccaagccccagaagatgcggccgggatcggaacggcggttttcagcggacatagcgtcctccttcttcagcatttgcggcgaatgatatcacagccggaccgccggagaaacggcgtccggtccggactcaagcgccttcgatcagcaggaacggctttcggctgaaatgggagtagagcgggcgcagccggtcccggtcataggacgtatcgatgtcgacgatcttctttcggctggtcacgacctccagcggaacgtcgtcgtattcgcccttgcggagacaggccatccggccggacttgccttcctggatcaggtcgaaggcgatgttgccgaaagccatgggaatgatgtaatcgagcgcgtccggctctccgcaacggacgaggtagccgagcttctggttgaggacgtcgactttccggccgttgttgtatttgggggccagctccttgagcttttgggacaccaggtcgccgattcccccgagcttcttgtggccgaacatgtcggtctcgtggtcgcagaagaccatgtccccgcccgccggcgtcgccccttcggcgacgatgacgatggcgtagcggctggcgttctcggcccggtcctgggacagcagctccgcgaggcgctccatgtcgaacgggtgctcggggatcaggcaccggtcggccgccgcggccagggtgggcagaagggcggtgaagccggcgtaacggccgaagacctcgatgaccaggaagcgctcgtgcgagccggccgaggtccgaagggcgttggacaaggcgatcgtccgggtgacgcaggtcgaaaatccgatgcaatagtccgtcccgggaacgtcgttgtccatcgtcttgggcacggccacgaccttgacgccctgctggtggagatgaaccccgtagctcaaggtgtcgtctccgccgatcgggaccagataatcgatgcctaggtaatcgaggtttttcaagatatccggcgtcaggtcgttggtcttttccttgtaggcctcgcggagatgggccggcacggccgcctgcgggacatggctggggcgggtccgggatgtatgaagaaatgtaccgccggtccggccggctttccggacgtattcctcggtcaagagacagtaatgggccgtgttgtccgcttccttgtcccggaccatttccatcaacccggcccacccccgcttcaatccgatgaccttgtagccttcgctgagggcccggagggtgaccgcccggatggccggattcagcccggggacgtcgcccccgccggtcagaatcccgatgacgccttttttggatttggtgttggccatgatccttctccttcctcaagcggccgagtggcggccctcggtttcaaaattatacgggaacgccggggaaaaatccatgtttcgggacctcggacgccgccggacgccggttttccgggcgattccccggtttgtttgacttcggatattcgtcctggtatattcgcggagatttccgcgtttcctccccccgggcatgaaggccgtctgtcgagccgccgggagggggtccggccgggagggcgggttcggggggaaccgtccgcggcccgggccgcggaggatcagccaggagggattcatgcttgaggccatgcaggaggcgttgatcggcggccggaaggccgacgtcgaggctctcgtcgacagggcgatcgccgggggtctgcccacccgccgtattttgaacgaaggcctgatcgccggaatggaaaagctcggcgagctgttcaagaacaacgaagtctttatccccgaagtccttgtcgccgcccgggccatgaacgccgccctcgtcaagctcgaacccctgctgatcaaggagggcatcgagccccggggatgcgtggtcatcggcacggtcaaaggggacctccacgacatcggcaagaatctcgtggccatgatgctcaagggagcgggctttaaaatcatcgacttgggcgcggatgtggccgctgataagttcgtcgaggccgcgaaatccaatgaagcggacgtgatcgctctttcggctctcctgacgacgaccatggttcaaatgaagacggtcgtcgccgccctggaagcggccggcctgcatgtcccggtgatcgtcggcggggctcccctgacggccgattacgcctctcaaatcggggctcggggatacgccccggacgcggccagcgccgtggacgtcgttcatcggctggtcggctgagagactttccttaggggcgcgctttccgggcggcgcccgggagaacggacgccgtcagttcgtttcgggaacggacggcagcttgaaccacaggctgatcgccgcgcccccctcgcggcggacgtcgatccatcccctgagttgttcggccagcagggcgatgatctgaaatccgagggattcaacctttccgggctcgcatccctccggaaggccgattccgtcgtcccggaccgtcagccggatgatttccttttcgttttcccgtagctcgacccggatccttccccgccggttgttggggaaggcatgcttcaaggcattgaggatgagctcgttgagaatgaggccgcaggggacggcggtgttgatgtcgagataaaccttatccaggtcaagcttcagggcgatgcggccgtcctcctcatgggaggcgaaaatcgtcgaggtcagcgacttgatgtagtcggcgaaatcgatccgggacaggtccttcgtcatgtagagcttctcgtggaccagggccatggacttgatccgcccctggctttccaggaaggcctcgcggacctcggcctcggtgaacctggcggactggagacggagaaggctcgaaatgacctgcatgttgttcttgacccggtggtggatctcccgcaggaggacttccttttcccgaagggcgtccaggatccgcttctcggcccgttttctctcccggatgtcgcggatgatggcttggtgataccgggcgccgccgatatcgatcaagcggaggctgacttcgacgggaaaggcgatgccgtccttgtcgcggtggagggtctcgaaaatcaggctgccggtcttttccgcctcctcgagatggcgggggaagtcggcccgggcttcccatggccgcagatccggaaccctgaacccgatcaattccgcccggctgaatccgtaaaccgccagggctcggtcgttggcctcgatcacccggtgatcccggtcggctaggatgacgatgtcattggcgtacttgtggaggtattcgaagtgctggaccagggccaagcggtcgtgctcgatctcatactgtttgcggaaataagccgcctcgcgccgcttgatccaaaacaggagcatgaccccggtcccgaaacagaggatgatgatcatggaaacgaaagacgacattctggctaaaaggggctccaggatttcggacaagtcctcctgggcgaccacccgccaggatgttccggggacggctttgagagccgagaggacgcggacgccccggtaatccgttccctcgaacgcgccgttcttctccctttcggccatggaggccggaaggtcggcctcggccgcggggaggcgcagcttgaggccggagtccgggcggaaccgcggatcttgcaggaaaaggatgtcgtctccctcgcggcggacaagcaatgtctcgacgctccggccgggcgcgccccggctccgcatcgttggaatcagaaaatcggccgggtcgatccggaacaggaagatgccgtcgcaggagactttcccgtccggcccgcggccggagaccggcgcgtacagatcgaggtgcgccttcaacccgatttcggaggaggtgtgaaagccggaaagatacggttcgcccgtggcgagcacgcggtcgatggtttcctcggcgttggttccgatgacgggcccgctggagcccgaagccattctcactcgtccgtccgtgtcgagcaggacggcgtccatgtagcctttcgccttgacgagggaatccagccaagccttgatccgggggtcggccgtcgaaaccgcgggatccgcttccaggaaagggatgatcatcgcctgattgaacgggttggcggagatgatggccgcgtcccggagccgctcccggcgccagccgtccaggagggagaccttgagatttccaacggcgttcaggttggccgcggccgtcgccaggatctgttccttggattgggaataatagatccagcccgcggccgacgccaggaggagaagaacgatgaacaagaggagggggacaagaaccggagagcgcggcatcttcactctcccattgtaataattccaaggcggagctgcaatatcgacggcgggaccgccgccgagaattccctgcagcgattcggccgccttggttcccgggcggcgcgggaaggcccggccggtttccccgggacgggctcagaaccggatcgagaccaggatggcgccggcgaaggccagggcgacggccgccgctttcaggggggtgattttttccttcaagacgacggcggccagcaggaagacgaagatggtgttgagctgattgagggcggaggcgactgaggccagcgtatatttcatcccggccatccagatgaggacggagaagtaagccgaaagcacggaggcgggaatcaaaagcttgtagttggcccccgcccgcagcggccgcaaaagctcccggcggcggggatgcagagcccataagaccagcccggcggccgcccctccggtcatccggatcagagtcgcccagaccaccgaaatccctccgaggaagggtttgacgaggacgatgccgcccgcggtgagcagcatcgagacgatcccgatcccgacgccggacaggagggcgcgacgggaaagccgctcgtcggtttttttgcgggtgatcaggatcacggccccgaggatcaagcccaccccggcgatctggaggaggttcatccgctcgccgagaaagaggaacgacaggccgatgacgaaggggctgtaagcgcagtcgacgatcgccgtcagctcggctccgagccggaccagggccgtgaaaaacagccagtccgagagggcgatgcccaggatgccgctgagaacgaagagggcgaagatccggggcgggaggtccggcgccccgccgatgaagaggaccgtcccgcccaggagaaccagggccagaacgttcttgaacaagttcatcaccaggggatggatcgtgtcgccggcgatccggaacaggatcacggagacggcccagacgacggccgaggcgagagaaaggatctctccgatgtgcggcgtctgcatcaagctgtcgaacatgacgatcggaagctcccacttatagcagagttcccgtcaaatatccaggagcctgctcgcgtccccgaacccggtttgatgtcgggatgaggccggataacgcctcgaatccttcttctgaaattctcatcggccggaaaagggaaggtcggcgtcttcgtggagaaaccccgaattaaaggccgcttggcggcccatggtttggagaaggcgatttcggccgtttcgattcgtgtataatgaaggctcaataagcgcgccgagggcaaatcgaccatgcgggacatccgggacctgagctttgacgagctgcgggccgtcctggccgaggacggcgagccggcttaccgggccgagcaggtgttcgcctggctctaccggagaggggcgtcctcgttcgccgaattcaccgacctgccgcggcctctccgcgaccggctggccgcccggttttccctccggccgctggaggccgtggaaatccggtgctcggccgacgggacgacgaaaaccttgttccggctttccgacggatggaatatcgaaacggtgttcatcccctccgggacccggcggacgatctgcctttcgacccaggcgggatgcaagttcagctgcgcgttttgcgccagcgggaagggcggcttccaccgccacttgacgccgggcgagattctcggtcaagtcctgcatttccggagcggcccggacgccggcttgacgaatctcgtattcatggggatgggcgagccgctggacaacctggacaacatcgagcgggtcctccgcgtcctcaacgatccccgcggattcggattcgccgcccggcgcatgaccgtctccacctgcgggctcgttccggggatcgagcgcttcgcccgcatcgacctccagatcaacctttcgatttccctccatgcggccgacgacgagacgcggaaccgcctgatgccggtcaaccggcgatatcccctggccgagctgatttccgcctgcgaggattatctggcggccggcgggcggaaaatcaccttcgaatacgtcctgctcaagggcgtcaatgaccggccggccgacgccgagcggctggcccggctcgcccgccgtctcggggcgaaggtcaacctgatcgccttcagtccggtcgaggggcttccgttcgagcggccggatcccgaggcggcctcggccttcgccgggcggctcaggaacaaagggaccgcggtgaccgtccggagctccaagggaagcgacattcaagcggcttgcgggcagttggccggctcgccggccgccggctgattggtcatttccggacgaggacggccaacgtttcgatgtggggggtctggggaaagaagtcgaacagccggaccgaggccggggcgtaagccgccccgagaaggcccaggtcgcggataagagtggccggattgcaggataaatagatgatttttccggccgggcgttcaatcagggcccggacgaccgccgggtccaatcctttcctcggaggatcgaggatgacggtgtccagtccgcgcccggccagatctttcatccaggcttcggccgatccgtccaggacttcgacgttgccgaggccgtttcggacgatattggcctcgagccggcggacgttgtcgggaaacgactcgatgacgaagacccgggcggcggagcgggccagcgccaagccgaacgtcccgacgccgctgtaaacgtcggcgacgatttcccggccccggaggccggccgcttccgagacggcctccagaacgagagggaggatcgccccgttgacttgaaagaaggatccggccccgatttcgaaggtcaaaccggccgctcgctcgaggagaatctcccggccgtcttccaggaagggaagggaccggccgcttcttcccggcgcccaggaaacgaggccggagacgggaaaacgcgcggcgagggcgtctcgaatcgcggccgcggccttctcgggccggcgtttccgccagaacaagttgaggaggagggtcccctcggtccggctttcccgggcttcgacgtcttcgagatccgtgaggccgccgtcccggacggcctccaggacggtccgggccgcggcgcaggaggcctccgaggcgaggtggcagcggccgtccgtcgggacgaacgccgcccgggaacccggggaatgataagccaggaacgcgtccgggccggatcctctcacggaaaaccggattttattccggtagttccattccaggggggaagcggtgacctccggctcgaaaaacgggccggtcccaagacgccggaacatctcccggagctgggacttcttcagatcgagctgctcggagtagggcaagacttggtaggatccgcaggccgaaaagtggccgcagcgggcggggatccgccgcggagagggggaaaggacggccgtggtccgggcctcgacgaaggaggcgcgttccttgaggatctcgatttcgacggtctcccccggcaatccctcgttggtgaaatacacccggccttcatgccgggccaggcgccggccgggatagacgattttctctatcgacagccggattctcgttcccttctcgaaggtcatgggagggcgggaaggcggccgccgcggaaagcggaggggaatccatggccgggacggagacggatgtcgggcacgccggctcctagaaatggagaaagatgccggcgaacgtataaacggcgaatccggtcatgacaatggccaagatcaggaagatgcgctggaaggtccggggtttgaattggtgatggtgatgcgagacgtaataggaaaccaccgtgtaccaaataaagccgcccagcccgcacgaagcggcgaataaatagggggcggcggcgtaattgagaatccagccgtgcccggcggcccaaccggccgcccagatccagaagaaatacagcgacggattggagacgtagagcaggatgacgccgaggatcggccgaggcgtaaaggaggtagggagcttttcctgcttggggatgaccggcttcttcgacgtcaggtagagccgccagccgatgatcaacatgatgatgccggccgcgattttcagcgggatttggaaacgagtgatgttgacggtgatgagggcgatcccgagcagggagatcaagcaataaaggaaatcgagaacggcggcggtcgccccggccacgaagccgtggaagaagttccgtttcatcgactgggaaatgacgaaggcattcaccggcccgagggggatggcggcgacgaaaccgagaatgagaccgaccagcaggaacatgttgcagggaaaaataccagaagaaacggccgggtgtcaacgaggagggggggtggaacgaacgaacttgactttatctaaacgataggttatagtgtactcactcctgttgtgcaggctggacaggaacccctccttttacccctttagcttaattccctgaaaaacagcctgcttcacccctcaaagaaaaaggcgggagggaaagccctcccgccttttcattttaaatccgatgatcgtttcttctctactcctgggccgctccgccgaaatggtaggacgcgccgatggagaagacgaaggtcgtctgctggtaaagctcccggaaggaagccccgagcgcgggataaggaaggctcttcgagtaatccttgtaattgacgatcagggcgcccaggtcgacgttgaagttcgggctcagccggatccggccgccgaatccgaacgtgtcggcgttcagatcatagctcatgtccgactggtagtcgtcgacaagcccgtaccgggacagctggtagcccgcgctgaccatgatcaggtcggagatgtcatactcgaggccgaaggaaaggtcgatggaattcttgtcgagcaagtcttcccgcccgtcccaatcggcgttcttgtcgaagtaataggagaaggacagcgaggcccgaaaatcgggcgaaatgccgtaatccgccccgagggcgaggaagcccggaatgtcgccgtgcgtcttctggccgtccgggaacaatcccgtcccgtcgaccgtcgttttgttggtcagctcgatcttggtgttgaattcatagcgggcgctgaggttgagctccgggatggggctgtagtggaggctgaggatcggggtgaagcccgaacccgtctgcttggcgtcgacggccttgtcggcgaccatggccgccaagcccggctggccgatggccgtgaagaacgtcaccgccgacatcatcccgccggagggattcagcaagggatgctggggattgatcatcaccgatttcagccggccctcatacgtgttggtcgccgagatatagcggaacccggcggccagggagaaggtctcgctcaaggcgtaggagaggttgccctggaatccgaggaacaccgagctccccttgaaggcgatgtcggccgaatacttggtcgtcggcaggcccatcatcgtaatcaaggtcggaagcatggagatccccgtttcgaacgagggaagcccggtctggtaatcggccgagccgccgccggcgttggggccgaatccgaccgacacggcgatctttccctttttccaggcgatgtaagcgtccggatagatggggacgctgaccttgccctcataggttccgttattgagcagcgggaagtcgttgacgacggtcttagtctgggagatcgtctcgttggacagggagaaatgccagccgtcggccagccggaccaagccggccgggttgtagtagacggcatcgatctcggtcgtcgcgttccgcgacagcatccggatgtacgccgtgctctggttggtgttcgtgatgatggccgcctgggcggtgcccagggccagcagcccgagcgccaataacagcgtgatttttctcatgttttcctccttttcttcttcttttccgccatcccaaaaaagacggaatgcggaaactatactcattttcggggataaatcaagggccgggaaccgttcgccttccggccccgcccgatcgcctgtttttcctcttggttcaagggaaaaatgcggatgggccgaaggccggattttcgacccgttccaggcgggtgatgacctggtccggattgtccgccgactcgtcgacggccgtccgcagatagagcgaagccgcctgggcgacgatgtagatcatgaagctgatgacgatgacgatgtaaacgattaaggcggcggttttaagccgggaaacccggcgggccaagccttggggggcgaggacgtcgaacgaccatttccccacatacatgaggaagatcaaaagcccgagggcgaggcgaacgccgtatccttggcgggaggaaaaggcggaggaggagatgacgatgaacggggaaaccagccagacggcgaaagccaggatgaggatatggaaggctccccagaagaggcgttccctccgttctccggccgtcgcttcccggcttggcgttttcatcggtccgacatgatccgcgcgtcccgcggcgtccttgagacgaacggaacgccggttttcttcccctccgcggcttgggttccttcctcgaagccagtataagggaggggccgcggccggtcaacgcgcgcctcttcccgtcggatattgacgccggtccgccgtccgtttatgatgaaaaaagaaaaagaggagggcccatgaaaaaagcgaccgccgccgtcgtcctcgcaaccctggccgtgttttgcgcctggagctgcgcgcccggaccgaacaccgccgagaaaacgcccgacaccgaggggaaagtcgccggcttctggctcggcctgtggcacggcctcatctcgccggtcaccttcatcatttcgatcttcagcaagaccgtccgcctttacgaggtccacaacaacggcggatggtacaacttcggcttcgtcatcggagccgggctcttcctcggcggagggatcttcgggcacaagaaaagacgctcggataaataacctgcattatccacgaatcgagagggccgcggttctctcggccggggagaggaatcgaaaacgaggttgacgccccgcggcgtccgggccgtcggccgggccgggcgcttgtgaatccgttccgccggcgggaatgcggctttcgccgccaggcgcggaggggaagaccggattttcatgaataaggcgggagaaaaagaacgcgggccgcgggcgaatgccttgacaggcggccgggccgggcttaatctcgatttatgaagatgcgtctcgagatcgtcccggccctgcttggttttgtcttcgtcctcgtttttcccgcattcggccggatgaacgcgccgttggacgatacggaccggaaaccggcggtcgccgggtcgttttacccggccgaccccgccgttctccggaacatggtctcgacttttctggaaaacggccaaaaaggcccgcttccggggaccgtccgggccctggtcgttcctcacgctggatacgttttttcggggagcgtggccgcctcgggctacaaccaagtccaagccgattatccctatgcccgggtcttcatcctggcctcgtcccaccggctcgacctgggcaaggcctcggtcttcaccgagggagattatctcacgcctttggggcgggtcgaggtggatcgggaggtgacggccgtcctgtccgggacgcggccctgttttacgggcgatcccgaagcgcaccgggaggaacacagcgtcgaggtccagttgccgttcctccaggtccgcttgaacaagccgttcaaaatcgtgcccatcgtcctggcgacccagacgccctccgtctgccgaaaaatcgccgaggccctcaaaccgtatttcacgaaggacaacctgttcgtcgtcagcgccgatttttcccactacccttccgccgatgacgcccggaaagccgacgcggcgacggccgagggattctgcgccaatgatccggaccggtttctcgatgtccttcggtccaacgcccgtctcgggctccccggcctggtcacgagcatgtgcgcctggccggcggccctgacgcttctctatctcacggaaggggttgcggacctggaattcacccgggtcgactccaagaattccggcgacgtcgaaccctacggggacaagtcccgggtggtcggctatgaggcgatcgccgtctccgaacgagaggaaaagaagttcgagctttcggccgaggaccgggaggttcttttacggatcgcccgggcgtcggtcgaagccgcggccaaggccgagccgctccccggcctggctcccgggcaatacgctccgatcctgcgggaaccggcgggcgcctttgtcaccctgagaaagaacggcgacctgcggggatgcttggggacgttcgagccgcggaagcctttattccaagtcgtccaggagatcgccgccgcctcggccgtccgggacatccgcttcccgcccgtccgtcccgaggagctcgataaaatccggatcgagatctccgttctcactcccaggcggaagatcaagaatatcaaggagatcgaactcggcaagcacggcctttatatcgaaaaaggaaatcaacacgggaccttccttccccaggtggcggccgaaaccggctggaccttgcgggaattcctggggcactgcgcccaggacaaggctgggatcggctggaacggctggaagcaggcggacatttatgtttacgaggcgctgatatttgaagaatccgggcgctgagggacgatgaacgccccttacggactgattcccctggggctctttttagcccttctctacgggatcagttttctgttcagccggctcggcattctctcgacgccggcccacaggaaaatctggaactacgccctgctggcggtcttcctcgtcaccgccggcctcggcgtcttgatggctgttcaggtcaactaccggctggaaatcccctgggccgaaaaagcgctgaaaatccacgtcaacttcgggctggggatgagccttatcggcctgtttcacctttgttggcacgccccctatttcttcaagcggcggaaaacgcgtccggtcccgatcgccgcgtccatctccgcgggaccgtctccaaccgcggcccgcgcccggcgggacctggcgcttcccttcgctgtcggcttctccggcgtggcggtccaaacgcttttaatccgggaattcctgacgttgtttgaaggcaacgagttgacgctctcgctcatcatcttcctttggcttcttctatcgggagccggatcgttgaccggcgcccgggcccaggttccggacgcggcctcgtcaagagaagcggtgaaaagggcttcgacgctggtcaaggcgcttctggtcgtccccttggctgtcttccccttgatgttcccgctgaaaagcctcctcttcgcccccgggatcgaggccggaccgccggccatgagcggatttctggcccttctcctgcttccgtactgctttctcaacggattctccttcacgtggacggcccgggtcctgcggcgcgaaggccgaagcctccggacggtttacggctgggagagcgtcggcggagcggccggcggagtgttttgcgccgcggccgtccttcccggcctgccctcgttggcgatcgtgtttgcggtttcctcgggcttgttttttcttctggcggccgccggaaggtctgaaaaccgagcctggtgggtattcccggccgtcctgctggccgcggccgttttgtttatcaccgccggcggagacgcgtggatgatccagcgcttccatccgaacgagcggctcgtcggcacggtctcgggcggggcgggccggctgaccgtcacccgatcgggcgaccaagtcaacgtctatgaaaacggggttcttgtccacgcctcgggcaacgcgatgcttaacgaagagctggcggccttcgctctgatccagacggagcacccggaccgcgtcctgttgatcggcgggctgctctccggactgccggccgagctggccaagtacggtgtcggccaagtggacatcgccgagccggatccgcacttgttccgcctagccggaaagctcggcttggctccttcggcctccggggtcctcccgatccgcggaacgccgttccgatggatcgagacggccggcgtccgctacgacgccgtgttgatcgccctgcccggtccgtggaatctccagctcaaccgttattacacggccgaatttttcgcgcgggtgaagagcgtcctggcgcccggcgggatcgccgcggccgtgcttcccggcacggccaattacgtttcggaaagcgcggccgcctcgctcggctccgtggccgccgcggcccggaaatgcttcgcggaaacggcggtctttccgggggagatgagcgttctggtgatgtccggccggccgctgacgacggacatcctgtccgggctcgcccggcgcgggatcgccaatctttacgtccgcccgggctatttcgatgaagagctgttcaagacccggatcgaacaggtcaacgcggtgatcagagaggcggcgccgaacgccgacttgaaaccggcggcctatctcagccacatccggtggtggctcggccgcttcccggaaaagattttgggcccggccgccgtcctcttggcccttcttgtcctgtgggggatcctggccgggcgctcttccctggccgggatgttcatcatgggcgcggcctcgtcgggctccagcatcctcctgctgctgctcatccagatcgccgtcggcgcgctctatctctggaccgggcttttcctggggatcttcatggtcgggctggccgcgggaagcctgtccggtccgcggccggcggagaaagccgggagggcgaagaccgggggacctctggccgtcttcgccgccgtctcggcctcggccgggctgcttgcgccccagctggcccatggccggggaccgggatttctgaaaatcgtgctcttgctttcggcgggcttcgtcctggcggcggccgtcggacggtttttcgccggcctttcgaccgccctcgaaaagaactccgcccggcacgaccgcctgtacggatatgacttgctcggctccgcccttggagcgatcgctttcccgatggtcgtcattccgctggccggcgtccgcaacgccctgtttgccctggccctggccggtctcttggcctgggcggtcgtcgccttgggcgggaggcgaaggatggagaaaaaatgaaaaaacgcgatttcttgaaatgcattctttacgccggcggggcctgcgtctgcggatggacgccggccgcggacggcgccccggccgggggagcggccgccaagagcttcgtcaaggagcgggaggccggccattacagcccgacgccgcggggcgtcaaatgcctcatctgtccgaacgagtgcaccctgaaggacggcgagctcagcgattgccggaaccgcatcgcccggggcggaaagctgtacacgatggcctacgggaatccctgctcggtgaacgtcgaccccgtcgaaaaaaagcccttgcttcatttcctgccggaatcgcggacgttcagcatcgccacggccggctgcaatttcgcctgcttgaattgccagaactgggaaatcagccaggtcagcccgaccgaaacccgcaaccaggacgcgccccccgaggccgtggtcgacgccgccgagcggatggggtgccggtcgatcgcctacacgtactccgagccgatcacgtttttcgagtacatgcgggacacggcggctcgggccaggagccggggcctcaagaacatcatggtctccaacgggtccatcaataccgggccgctgctcgagctgtgccaagtcatcgacgcggccaacatcgacctcaagtccttcgatcccaacatccacctgaggctcaccggcgggaaggtcgagccggtgctggcgacgctcaagacgatgaaggaacagggcgtctggctggaaatcaccaatctcgtcgtccccggctggacggacgatttcgggatgatcgccgacatgtgcggctggctggcaaaggagggcttcgccgatgttcccctccacttcagccggttccagccgctctacaagctgacccggctgccgcccacgccggtggcgaccctgacgaaggccaaggagatcgccgtccgggccgggttgaaatacgtctacatcgggaacgtccccggcatcgggggcgaggacacctgctgcccgtcctgcaaaaccctcctcatcaagcggctgggtttcacgatcgaggaaaacaagctgtccggcgggtcatgctccgtctgcggaacggcgattcccgggcgctggagctgacatcccggcccgtttgtcggtcaagaaatcccgggaaagccgggaaccggggagaggcgctcgtcccgccgccttctccaatcaatccaggatgtctttgagcccgaaagaggccgcgtagagactgccgactcccgacaggaggaaggcgacgcgcagggtttcggcgatttcttccttcgtcgccccggccctcatcgcctgctcggccagggctcggacgccgccggccgctcccgcggccgcgtcgaaggccatcgccatcaggagcttgatcttgcgcagcagggcgccgtcggcatagacgagggcctcggtctcctccagatgtttcatgaattcaggatcaagtttcttcatgggggacagcggatgatcaggcatgagaaacctccttgtggttttagatcattatcttatcaatgccgccattttcaatttttgaaaataagaagggcgaatctatccttcaagaaagcccccggattcggtctcatgaggaatatcggcagcttagtccggcgcatgaaaacgcgaaggcggatggtcattcacttttttaaccattgtattcatgcgggaaccgaaggctgattgatgaaaaacattatgaatcaatatgttatagcggccggagggtaaacgtggaatcgcggaaatctcgtcgtcgatctgcggatcgaagggggtgaattccggaaatgagcggaacaaaccgtttggcattctcttcaaaacaggtctttgaaaaaaatggggtgggtgaggagactcgaacccccaaccttcggatccaggagtaatccggattatagaagttgatccagactatcccgaatttcggagcttcttcgaggataaagccgaaatcaatgaatcggttcacagaggcggcatattcggaataaagattgatttgggcccggagcttttcgagggagattaaatcccgcggggcgtactcgtatttataaagacatatcctttgcgggagcgagtgatcgatcgatatcatggttcccgccggcggcggcgatatcaattgagacagacgggaaaaggtttgaattgctccaaggcctcgaactgcggaacaacgaagatgatccggggcttggcgacgggcttttcccgtttctcgagctcggtttccgtttcgggcgggaagatgattgtatgcatggtgctctctcctccaggttgactcagatctgggcggctttctttggcttcattggacgatgttcgatgaactgttgaagatcctccgcggtgatcctaatcaagcggccaaccttgtgagacttgagaaacccggaatggatgatatcgtaagtcgtgctccaggagacctggtggacccgcataacatcctccgctttcaggtattatttcatttttgctccttataataaatatatatacctactatcaactaaaagcgtctaataacgcctatttgtcaagtaatattttgcttctttaggtgatagttggtattatttggcagtaatggaaagccaaaaagaaaagttaatgactaaggccgacgtagaagattacctgcggatttctcatatgactcttcaaaatcttatgaagaatcataaatttccttatatcaagctgggaaagcgagtcctattcaggaaagaagatatagataaatatttagaagctcatatagtcggaggggggaagaatgttccagaggatatggaaaaataagaaatggattttcttgggaatttgtatcgttattgtcgtcctactagttaaaccaattttaataattgaattcattaaagcgaatattgcatggatcaaagactttggaatgtttttgtttgctgggataggagctgttgttacgattctcgcatatcgcagagctcgtactacaatcttgcagcctattagaaacgaggtaataaagaagcaatcagaaatcttgtgcgatgttctgcatctctgtcagtctcctattaaaatcgatacgagtttagattatctaaaaatcgttcgtattaatgtacttcagcatttacgagaattaggtttcatttttaataaccgagaagaattttatagcgatatagacaaaaatatttccggttttatttattgtggcgattcatctcaaataaatgattttaagataataagtacttttaattctgacaaacaaaaatccgatgaagcaatagacctcgggaaaaaaaagtatgaggatgcgaaaaccgggattgttcatgttgagcgaatatatgtaacaaagctttattttgaatgttttgaaaagctgcagaatttattaattaatccttttatgccatcaatgttgcaaacacacttaggacaattactaaaagacattgaagataacctttgtatacatttaaagattgagcttgaaatatttataaaagattactttaaaaaaatatcgcatgaaaaggaatacccaaattttaatattgttggagtttttaatgcttacaatcatagaagaatccatcataatttaataattgaaagtttgaatgacgagacgcgaaaatatttacggattgatgagccttgggaatgaaaaattgggataattggaaaggattcgaaagactggtagcagctattcatatttcggaaggccaaggcggaatcgttaaatggaatgataaaataaataatcgacaatttgatgttactattcgtttcaaatattctggctatgattatctaacagtgatcgaatgcaaagataccgcagcgaaagttccagttagcgaagtagaggcttttgtaactaagtcaagagatataaattcaaataaagcaataatggtctcgccagttggattccaagaaggatgcgttgaagtatctaatcgttatggaatcgaactgctaattttaaatgaaaatcaaaaattatctccggcaatattatccggaatatttactcctgtgattaattattcggaaatatcgtttataagaagcgataatgatgaagaaatagaatttccgaaatctcctggtggtaaactcctatttctagtaaaaaaagctgaaattgaaacaccgtctgaaaaaatatcaatagataagttactaagacgttggtacttgcggaatcaaaataaaattggtagagaaatagaatatattcagataaagatgccgcagaattctaagttatggatacccaatcctgtcgataaagaaatagtaccgatacgatactttcgttttgcatgtaaaatcgtagaaggacgatatgtgaaattatcaggactcgatactaaattggaagataataagttaaaaacgatatcattaaaaagcattaatggggaaaatgttattgaaaaaaaagtgaatgatattcaatatggatttgataacgttttaaaaaaagaaatattttacagagatccgagcactgagtttgtatattacctaaaagaaatcgaaaacgatcttgcacgctggataatgattgaatcatatcaacacggaagctttattcaagttgaatttactcagacaatagaaaatgcaaatttatctgtaaaagattatattgaaatcactgataagaatgaaattgaaagattaaataaaattcttgaaagatatcttaaaaaatagtattatattaatagaaaatattttcgtaaatgacctgtagctgatccgcggtaagtttcaataaatcgcctaacgttaatttactaggaataataacgacacaaatcccgaaataattactctttctcttgggatgattgctggacttactatccggagggcggatcctggaatgaccgaatatccctaatttccgccctccgttcgcgtagaatcgattttccttttccgcccgtgcctccatgccgcgcggccgtgttcgctttaggaatcgcgtcaagacgcgtttccccagccatcgggggatccagctcggagtcattttttcgcggctgctttctcgagcgctttgatcctgtcctcgaggttccggatccggagctcgaattgctgcccggcatgcacaagccgggcgagctcgaggagcgggatcccggcgagctgcaaggcgagctcattcccggcttcgatttccttcaagagcccgcgggcggctccggcgatgaacgaaggatggatccagaaacccgcttccccggctccggccgggcggcccggcgggagtttggccgcggtattcctcggttcgcttttcttcaaggcaatttctcctcgagtcggcggagcgtttcatcgttttgcgctcggtccgcccggtttgcgaatccgcccggttcgcccgcggcccgctttgctgcatattcctgaactttggccggggcttcggcttcttccttggccctggccgcggcgattttcgcggccgtatcgcggcggagcggattcaggttggccaggatgagcgagtccgtcatgctccggtccatgagcgttttgaggaaatccaaggttcccttctccccgagtgccattatgatatttgtccggccggtatcgatgacatactcatgaccggcgaacgtctggaagatgatttccccgttttcgatcctgagagccgcggagaacatagaattattctcctccgccttcgccctcgagcccctgggtgatccgttctccggcatcggccgcgggctggaattgaacgcccatgatcgaattgagttcgccgatatgcgcgttgaccagcttcttgaaggactcgcaatccggatatcccagatggcggcgcatttcggtgaagatctgggaacgactctcgaaaatctgcttctcgaggggctccatgatcgaatgcgctttttgccgggaagcaaaagagagccaattgatattgtccttggctttcttccaattccagacggcatcggacatcttctcgaggacggccgaaatgtccttcatcttggcttccgcggcttggatgaagccctgattgatcctctcctccgcggaggttgtcggctcttccggatcttctccgattcggccgatgacttttccggagctgtccatcaccggctttccgtacattgcttgcagctctccaatgaattgatctttgagtgtcggcatttttttctccttgccgataaatttatcctacggccggttttcggccgggacattcaaggggggaagatgtaatatttcgtcggatccatcatccggcttgtattcgatcctataaatcgtcggcgtgctcgaaataagggcggctttcgtcaccggcccgattaaccggtcgaggattacgtctttcgcataggcgcttcccttcatggtctcttcccaaatgagggcggccaggtcttccgggcttcccccttcggcaagagctcgagcgaaagcctgggagaattcgagagcggttgcgcatttccgcccgcccttgtgtcggcggggatccggcccggattgaaacgggcggccgactactcgctttttcttcgcagctaccgggcttccctgcattctctgcaaatgggcgggaaccttggcgacctgcttgtggttgacggttttcatgatatgtccttcgattcggatatagagtccatcgtttctctctggggaacgggcgggatgtcgttatttgagccgtccaagggggagtcggcctttttatgggctgcaaaaatttcctccggcaagggatagccgtgatcgaggagatattgccgggttcgatcatctccccattccttgatgaaatccttgattgtttcgggagagagaggaagaacgtgtccggacgaaggtttctgatgtccggacgtcccccccctgtgggggggcggagggggggagatctgtaaagaagatctctgagaagagaagatctgaagatgttccgtggcgctggagcaaatcggcctgaaatggagcgaatttgtttttttaccctgtgttccgtggcgctggagcactcaacaggggaaggcgtgccaaagcgcttgatgatttcgatatcgcttgcccggcggccgtgccgtgtaatggtaattgcgccaagctcctcgaagaagcgaagcgcttgaattatcgtagtttgggagcagcccgttttctctgaaatcttcctgacagagaccttggatatgaaggttttaaaattcatacgactacagacataaagatagacctttgcataatttccgggcattttgggaaaggaagaatggtcgatcaagtcgagtgcaactcggcaaaaccagtaaccttccttagccgcggtcatgatcgatagcagcgtgatgcttgtgctatggtcgtgctatatcgaccgggccgcggccttgatctgagcttcgaggttcgattcgagggctcgaaggtccacgcggacaagtcggccgactcgggcgaccgggagttttccggctgcggccatatcgtaggcggacttgaccgcgataccaaggtaggcagcgcattcaggaatctttacccatcttcttctttcggtcgatgggatccctgagcccgaagattcgctttgttgaccgtgttttgtggttgtgttagataattgagggagtttggtcacgcgatctgctccttggccccattaaaacccgttgcaccgggttggggccattaatttattgtttatctttttctcgaaaagatagctccctaaaaagctttaaggcattttccggcgtgatttcctttgctgaatagttagccggaagttttccgctgagaagcgtctttttgatttgatcgattttttcttgattgcccgaataacgagcgtcaatcatcgaaccgagtaagaaattttcgaacgggaggagaactttgcttcccgtattttctagaaagcgacgatattcacggttcgactggtcactaaacattttgcctaatttaagactcaattgagaataaagagaggggaggaaaaggataatcataagcgaagccgccagatcatcagttccaaggggttttcttttatcgaattcctcaaatatctcttctccgctggcgtggaacgtgatatccggtttacctgctttccggatgataaccatgaacggcttcggatagcttggattcaacgcggcaaattcttccgcgaagaatgatagctctttggattttccccttacgattccgcgaatcgtttcataatcgagaccaagtttatcgaattgagaagcaagagcgatatagaagacattccttaaatcaaacagatggctcttgccgcgtcctttttggaggatagccggtttgacaagcgcggttcgaatccaatattggagctgatccgggcttataccgagaagttgaacaatgtctttctggcttaagaaaagatcgaatttaatacgtttcattacttaatcctaatagacaatgaagtaacattacttcattatgatatcgccgaatttcgcgcttgtcaagagggaaataaagtgaaaggataaatctaatttgaagctttaggagaatatggaaatgtcgagaagcggcgatttctctaaaaagatccaagagcttgcgcttaaaagacaaaaaaataaatgcgcctgttgcggtacagagatttcctgtatcggattgagcggccgtaaaactcataggtacggcgaaagcgcccatgctcaccatattcggccgattcgatgcggaggatctaattccgcgagtaattgcgttatcctttgctattcctgccattattccgctcatgagggcgggagctatcgaaccggtactgtaatcgggagaaaatcagactttgaattcttcagcggataatgcgtaataatcgagtgtcgtgttttgcgtcgtgtttgagccggaaaagaacggaatacagggggaaggatgggatatgtattcggctgagaattcgttctggaatcatcgcaaatgcctgatttatcaggcttttcaggggaagaaaaggtggggtgggtgaggagactcgaacccccaaccttcggatccacagtccgatgctctaaccggttgagctacacccaccgtccgaacgtgaggagtccgaattttcgcatttggcgccggagaagtcaacttcccggcgacgacggctgcatcattccggctcggccggacgtttaggctatcggcggatgactttttcaaagtgttttttcgcttcccccggtttatggtattctatggccagtagcaaagaatagatgttatgtaaagaaaaaaagcttcaccgggcgaaaaaccgccgtccggaacgcgaggggggctcttctttccccggaggtttgcgcgtcgccctctacgccggcatgttcgtccgggatttcgacggggcgacgaaaaccctgttcgagctgatccggtcccttcaggggcgtaaggccgagatcgccgtctggacgttttcccgccgcccgacccagcttccgggcatccgcgtcttccgggttccggccatcgccctcccgttttatccggattataagttttcccttccctggccgcacctgttttttcaaatcgggagattccggcccgacgtgatccatttgaccgtacccgacgccatcggcctcgtcctggccgtttatgccaagctccgaaggatccccctcgtcatgtcgtatcacaccgatttcgtctcctacctggaggagcgcaacctctggttcctggtctggatctggtggccgattctgcgcgtgtattacaacctcgccgacacgctcttcgtccccagccgggacagcggggcgaagctggcccggcacggcatccgggcgacggccctgtggcagcggggattgcccgagggcctcttcagccccgctcagcggagcgaatccttgcgccgccgctggggggccgaaaacaaaaaagtcattcttttcagcggccggttcgcctggttcaagggtctccaggtgtacgtccaggtttacgacctctttaaaaaagacgggaacttttcgccggccttcgtccttctcggccgtggtccgctggaggaggagctgaaacggcggatgccggaagccgtcttcccgggctatctcaatggagacgcgctctcggccgtctatgccagcgccgatcttcttctgttcccctcgacgacggagacgttcggcaacgtgatccaggaagccatcgcctcgggtctgccggcggtcgtctctgacgagggcggatgccgggagatcgtcgaggaaacgggcggcggcctggtggcccgggcccggcggggcccgtcgttttaccgtgagtgccgccgcctgctgaccgacgaatcgctgtatcgccgggtccgggagacgggcttggaaaagatccgcggaagaaactgggaagccgtcaaccgagtggtcttggattcttacgcccgcctggtttgtctccatccgcgctgagcggaggtccgcggttcccggaggctaggtccgccggagagacgcttgcatgacgaggaggccgctgacggtgacggtcagccccaaggcggtgagccccgtgatcctgaagccggggagggcggcggcctggaaaagcaccgggtagacgatataggaaaaattttgggaagggatgaggacggaagcgcggatcccccttcggaacgcccattgggacgcggcaaaagacagggtggcgaagaggaagctggagagaaagatcacccatccgagcggcagccggggaagatagcgcccgtcgacccctcccagattctggccgatccctttcaagatagggtcgagaccggcggcgaagccgatgagcagtccgcagacgatccccaggctcgtcaacccgcccttccgccgcgtccggaataagatcagcaggccccccagggccgaggcggcgaggatgattcccgcggccggaagacggacgccggccatggtcatttccggacggaggatgccgtcataaccgagcaggagggttcccagggtgagaaccagcgccccgccgtactggagcgggcggaggggctccttgaggatgatcccggcgtagagcatcaaggcgatgagtccggcgccgaacatggaggtgtaataggacgacgggccgtagcggttggccaggatggcgaaaaagcccaggctgttgttgaggaggaaccccgtcgcgtagagggccgcctttttcgatgcgcccggccggcggcggccggcccgccgggcggcccgttttggggaaaggcaggagagggcttcgatgccgtggcgctgcattcccttggagaggttgaacaggatcgatccgacgatcccatagatcatggccgtggcggaaggagacatgggcggctaggcgtggatgcgctgccccagccgccgctggacgatccgggacaaggggaggcggatccgggacggcagccggtgatgctccttgcgcatcgtcaggaagatccagcggtgctccaggacgttcagggctccggccaggtcccagaggggcgggagaacgagggtcacccggtttccgacgcgccggagctcctcgaaaaaggcgtccggattctcgacatgctccatcgtgtgcgagcagaggacggtctcaaaggagccgtccttgaacggaagacggtcgatcgagccgatctggacgaaacgcggcacgtccgcgtgacggacgatgtcggcgttgaaacccccgccgtccgtccggccgcagcaaatgttgagatcccatttccgccggcggagaatgcgcgccttgaggacgcgatagctcaggacgttgagcgcttgggagacggcggccaagccggctgcgcttaagatcacgatcaggacggtcggcatccgcggcgctccgccgttctccggctaggcttccttctggccttcgatgaggtcgaggacgtcggccgcgtcccgccactggggacggactttgacttgcaggtcgaggaagatccgggcttcgaggatctcctcgatctccctccgggcttcgatcccgatttccttgatgttctgcccccggcggccgacgatgattttccggtgattggggcgctcgacgaagatgctcgccttgatgtagacggcgggccgggcccggcgttcttcccgggtcggttttggcttttccccgcgccgccggatgttcggccggtccgagacgcccgggacggcgatcgtccggccggtttcccgctcgggctcgggctcctcgagggcttccctttcgccgggcgtttcctccccgccggcttcttccggcccgctttcgtcttccggctcctcctcctcttgcccccgcttccggtcgatccggtcgatgtagaccgccgtggtccagggaagctcggcttccacccgggccaggattttctcccggatgatctcggccaggagaaagcgctcggactggtcggagacgtcgtcgtcgccgtagagcttctccgcccgggggaggttgtcgaagagaagattttccaggacgtcgacgttggtccccttcaaggccgacagggggatgaattcctggaattcccggagggcccgataccggtcgatgagcgggaggaggatctcctttcggacgatgtccgtcttgttcagcaggagaaacaccggcttccggacgttcttgatgatctccagggcgaattcgtcgccgtggccgaatttcgccgtggcgtcgacgaggaggcagacgatgtcggccgtctcgatggaggcgtagacgaagttcatcatccgcttgttcagcttgtggagcggcttgtggaggccggggttgtcgatgaagatgatctggccccgcggcgtcgtgtggatgcccaggatgctcaggcgggtcgtctgcggcttgtccgaggtgatggcgatcttctgccccaggatcttgttgagaagggtggatttgccggcgttaggccgtccgatcagggcgacgtagcccgtccggaatttcgaaaccggcttcttcggggcggagcgggatttgcccgtccgggctgcggcgcgggacgtcttacccggcatgttcgggctcctcgtcggcggctttcctcatcctcagcttcttgatccgcttctggtcgacgtccaggacgtcgacgatcaaccggccgatggtcaggcgctcccccttggtcggcaggcggccgagcgcctgggccaccagcccgctgacggtgatgaagtcgtcgtcggccagctccatgtcgaaaagatcctcgatttcctcgaccttggccgccccggagacggtgtaatcggccgggccgttctggacgatctgggcctcctcggcgtcgtattcgtcctggatctcgccgacgatcacctcgaagacgtcctccatcgtcaccaggccggagacgccgccgtgctcgtcgaccaccacggccagcttctgcttggctttttggagttccttgaggaggtcggccactttcatggattcgggcacgaagaggagcggccggaccaggggctcgatcgaggcctcgtcgaactccttttccgaataggccaggagatccttggccatgaccaatccatccacgccgtcgatccggtcgcggtagacggggatgcgggaatatttctcgacgatgaaaagatggcggagcttctggatggtcgcgtcgcggcggatgcagaccatgtccacccgcggggtcatgacctcgcggacgatcgtgtctccgaactcgaccacgttccgcagcagcgcgtcttcgcccttctcgatgatgccttcttcctcggcctcgtcgaggaacgtctcgatttcctcctccccggcctccctgtcctcgggcccggcctcttcctccttctgctcctcgcggactgagagccagcggacgaaggccaggacgggcgcgctcaaggaaagaaagaggcggtaggacgggaggaagcgggagaggcagcggtcccgcccggcggcggccagaaggcggggaacgatgtcgaagaaaacggcgtaaacgacggcggaaaagagaaagagccccagcggccgggtccggaaggccgggaagatcaaaaaggcgtatacggccagggcgatgatcaggatcatccgccagaattcgacggcgatcttgatgtcgtcgtagcggtcgaggatccgcgtccggtccgggtggttccgctcttccaggaagccgctcaggccgaccttggaataaccggagagcgtgatgtggaacagcgacagggccgaggcggccaggacgcacagccccagcccggcccaggtgatcgtcgaaatctccatcgcctattccccgggccccgcgggcagaggcccgaatttttcccgccggagaagccggagcacccgggcttcctcctcctcgtggccggcttcatgctcgtacccgcagagatgaagaaagccgtggatcgcgaggaaggcgagctcggcgtccaggctgtgaccgagggcggccgcttgccgccgggcctggggaacggagatgacgatatcgcccaggtggcgccgtcctccctcgccccggccgtcgatggggaaggacaggacgtcggtcgtccggtccttccggcggaatacccggttcaggcggcggacgaaagcgtcgccggcgaagacgaggacgacatcggcgtttttcagccgtgcccggcgaagcagccgctcgagcaaggccgcgtaccggtcagtcctgattcggctcttcgactggcggttgatgatttccaccatggggggtcctcggggaagccggcggttcgccgttcttggggggttttttcttggattcgaagtcgaatcccggatattcgatccgcggctggtagatggtttggagggtcgagaggaacgactgggcgatcgttcggatttccctgagggaaaaggcgcagtcgtccaactggccgtcctggaaataattatcgaaaatgtcgcggatgacccgggccaggtgctcgtccttgtgggaccggaggctgcgcgaggcggcctcgacggaatcggcgagcatcaccagggcggcttcccgggtttgcggcggcggtcccgggtaccggtaggtttcctcgccgacatcctggatgtcgggtccgcatttttccttggctttctggtagaagtagcggacgatcgaattgccgtggtgctgttcgatgatgtcccggaccgcctgcggcaggcgctccttccgggcgatttccagtccctctttcacgtgattgacgatgaccagcgtgctgatgctcggggacagatcccggtgggcgtcgtgtttgcggtcccggttttcgatgaaatactcgggccgcttgattttcccgatgtcgtggtacagggccccggccttgaccaggagggcgtcgagcctaaccttttcagcggctttctcggccagggtggagacgatgagggaatggtgataggagcctggagcctcgagggccatttggcggagaatccccgattcggagctggtcaattccaggagcttcgactgggtgatgagccggaaaagactctcgaagatcggcaggaagagaaaagccagggcgccgctcatcagtccgcccacgacggacatcatcgtctcggcggccaggacgggggccgcgacgacgcggggttggatgagaaaaagggtgatcacgacgaaaagattgacgggcgtgacgatgaagaagcccgcccggagagcgttggtccgcttggcccggccatagaacttgatcccgtagatcgcggccagcccgccgatcaggccgaagagcatgaggtagaaatcggccccggtcaggtatccggcgagcaggctgttgagaacgacatagattaaggcgacggcattggtcgtgagaaaggcgaagagaatcgccccgaactggaacggaaggatgaaccggtacgcctcggcgctggaaagaagggcgaagcttgcattggcggccgtcgtcgcgcccaggaaaagccccagcttgtacaggaggaggctcaaaaaaatcgtcagcatgatcatctggttgtatttccgggcggtcggaagggcgtggagcgtccggagatagtaccagagcgtcacgaacaggagggcgaagagaaaaaaggcgccggtgaaagagccgagccaggctccccggtcggcgatcgcccggttgacggccgcgatcagccggacggcggcctcgccggcttcgtcgcccttccggatgatgacccgccccttcttgacggtgaaaaacacggtttcgaccgtggaccaagcgttggttttccggatttccgtttcgatgcggtcgaaggccatgttcggggcgaggaagccgaacgacaagctgaggaggaggccttttttccgggccgaaagctcgagggcgttgacgtcctcgagaagccggttcttggcttccttgatttcgaggatctcggcggccttgaccgtcttttccgacccgtccggaagcctcagggtcaagccgcgctcctcctcccggttgacaaagagctttttcgagagaatcaggccgccggcggacacattttccaggagggtcaggaggctggcttccaggtccgggccgaatccttcccgggccagggcctggaggtcgccgatggaaagctcaaggccgaacttttcaaggatgacgctccgtagggcgggataatcccggggcggcggcgcggcgagccattcccggccgtagacgaaaaattgatggatgtggtcccccgcgttcagcatcacgttgggatccagcgtgtagacgggaagaaccgcctcgacggcctcccggcggcgctgctcggtcgtctccgtgtcctcgatcgtcaggtcggccggggcgataaggtcctcgccggcgatgtcgccgggttcgagctcggagagctgcttggacggaaggtaggaaaggatcgtggccaggaccagggcggacaggaaaatgagaaggaatggatcccggacgatccgcttcatgcccgtcgccctctccggctcgggcgggcgcccggaggccggggaacccggcgccttgaacagcttgagatccttgatggagacgaggggcatgtcagtcggaggaacgggactcggccttttggtaggccttgatgattttctggacgaggggatgccggacgacgtccttttcgttgaaccggcagacggcgatctccttgagaggcgcgaggaccttgagggcgtgaaggacgcccgaatccctgggttgggggagatcgatttgggtgatgtcggcggtcacgacgaccttggaatcgaatccggcccgggtcaggaacatcttcatctgcggccgggtggtgttctgggcttcgtcgaggatgacaaacgccgcgttcaaggtccggccgcgcatgtaggccaggggggcgatctcgatgatgttcttgtcgatcagccgctgggcctggtcgaccgaaaccaggtcgaacagcgcgtcgtagagcggccgaagatagggattgactttttggatcatgtcgccgggcaggaagcccaggcgctcgccggcctcaacggccggccgggtcaggatgatccggctgacgaccttgttctgcaggaatgtcagggccatggccatggctaaataggtttttcccgttccggccgggccgacgccgaagaccaggtcatgggtccggatggattgaatgtattcctgctggttgaggctcttgggggagacggatttgcgggcgaagctcaagggctcggccgggtaatagtcctccaccggcttggtccgcccctgttccagcagatcgaggatgatctggaagtcttcctccttgaggtcgtgtcccttctcctcgagctggcgaatccggtcgaaatagaaacgggcgaattcgaccttgtcgggcggtccgccgatgttgagggaatccccccggatgttcagctcgacgcccaggcgggattcgatttttttcagattgcggtcgagaacgccgataaacacacttttccgcacaaacggatgggtgatttgttccatatcaagggcgcgtaaagctacagtcgtccacgggaatccattatccagccctccgtcccccttgtcaaggacgtgaactcgtccagtagattagtgacacttagctttattatgctccattagccagttttgataaaactcatagggggttagatatccaagagactgatgggggcggatatagttataagtcttattccattcctccagttgacgattatggccttccaactgattttcgatatcttccacctcataaaattcttctcgatatgtccggttggatcgctcgacgcacccctgcagcttgggtgacctcggcggaatcacgaacagccggattcggcgctgccggcacgcctcctcgaaatttttcataaactcggatccgccgtcgatttggatcgcccggatgagaaaaggaaacttcttttccatgtattccaggaagaccgcagccgtgttgctggtcgctcttcgataagcccggcagctatcccaccgggagatggcgtcccgggcgctgaactccagataatccatcgactcctgttccccgtccgctccgcgctgagcggccccttatcgacgagaagttagaggacctctttgttcaaacaacgtaccggaagcttatcagagaagataccgaaaccgacctcttggcctgtcaacgaacgatgactccgcgcaccccatcgccctctcggacgaaggcatcgccaagttcgatggcgagcttcctaatatgaactcgtgccgctttggagagatgaggatggatatcaattaaccttgccgaatcccggccggcgaaatgcgacggttcgagcgacaggctttggaattgacgattccgacagagcggaaaaaatcattagattttgaatccgacgccgatggaaatgactgtcatcggattgttgtcaagtccccaaaaatctccagctttaaaattttcattaacgactcggtatgttgtttgatccggcaagagaaatgttctctgcatgaaaacatcaccttgaagggtgatttcaaataaccgcgcagagatatcgagaaagaaattgtcaaatgcgattcttgtgcctgcccggaagccgaagtttgtctgatgcaggtttccgaaagcagacgtaccggtttgtaagcgacccaatattctccgaccgaacgagtccaatataatgttgaggtcggcgccggcgatgacggaaacattcaatctggcagtcgaaaggatcgaatagcccaaccccagggacacgggaatcattgagagcttatcattttgtaaaacgtcttcatcaaattcattgggcaagtcgatacgctgtttgaatgttcttggaaaaatatattcaacgcccagattcacgaacatgttgcgggttatgccatagctggcctccaggcgcattgctggagaagggccgtttaacgacttatggctgttgttaattgccggttcgatatatgcctcttcaagcggccgcacgatattggaagcgaaataggatgtgcctgccgagaaacgccaggatagcctgttgttttcctctggcaatgcataatggctgtaaaacaatactgataatccaagaaacaccattgatctaataggtctcatttattaagccctcctttcattttttgaggtgcaaaaagcatgccaaggaattcctggtcttgctgtgtttcgtcgatgaaatgataggaatttccttttatcacaagccccgacgatattccctgtctcgtcatgaaatcccctctttccctccgaaataagataatttagcgcaggaggactgtcaagtccaatcgaaggcggtctgttttagttcaacgaatgcttaaggctcggaatgagccgaaaatttgccaaaattcccctctatttgggaatacattatgaagaatagtcaaccgggggatcggcgatcaaaggaagatccggaagctcgcttgccggcggcgggcgctcggccgtaaacgagatctgaactagttcacgtccttgacagactccgaccgctcaactatcctcattttggcgggaaagatgggatttcctgacgagacgtgggtttgtcgttgtgatagccgaaatacgaaattcctatctttcgcagtttttttactagtctcatcaacgaaatgagaactcgagacgacgatgcgcggcgaaacagccgccatcgcgacggccgcgacgacgaaaagtggaaagctttgactcggcggctgtttcaaaggagaacgtttctatgcagttcgtggtcatcgccctggtttgcgccgccctggccgtcgttctctttttgctctggaagagtggccgcctgtccatccagaccaaggcctactcggtcgatcaggccaggtaccttggaaaccgccgcaacgcctcgagcatctatggctcgccaggccgaggcgtcttctactcgccgttcaacctgtcgttggaagcgatgtccaggttgctgctggtcgacgtcgatgacgatcccgtgtacggcacgatcgagctgcaggtattcgacgacgaacaaggccggggagcttcggtgctgctctaccacaaggatgggcggatcgatacctattacacctctggcctgaatcgagaggtgtacctggacaggtcgagggggcaggcctctttaaatgacgatatagagtatagattcgaggtcaccgctctcggcctggatgcgcagttgagattggaggatgaggccgggcggaacatagccttccatatccgcgagaaccagccggctaaaaagactttcgacatcctggccccggctggagcgatgatcgacgacctggccgggttcccctttttttacatgaaacggactgcctttgtgaaacgtgcggggacgcagatcgatgtcgagatcgggggggtgaagagaaacccggtggcgatccccgtcgccatcaacggcaccttcgtcttcctggcccgttactgcaccgagccgatcgtcggcacttggaacgaggcctttacgggccaactggaccctctttcgccggggcaggccggcgaagcgagagagggagggaccacctatcgactggtccataacgacggccattgcgagatcgcgagcatgacgagggtgggctgcggacacgagatcagcctggccttttccccgccggttccggacctggtcggtctgaaggacggtgtgacgataggcgggcgcttctcgtccggggccgatgggacaaccgggatcgtcgccggcgcgtatcggctttaccggtccggggctcggatcgagctggtcatgcagccgatccaggggtggcagccgatgccgggcaaaagatgggtcaagctatatcgctggtgtgcgcaggtagaggctgacggccgagaccgggtgacggtgaaagccgcatggacgcggaggtaaagacgggggcccgcccgtggctacgtatttcgcacgaaaccgatcgctgtttccagcgaaggccgaaacgcttgccgtccttggaaggttggcgttagccgtcctggatccaggaacgggcgggaggactcatcaaaatgaccatcacaatttgtcttgagcgtttatggaactttcagcgtttgcgggtgcggcggtgacgacagcgccggtggcgatgccgatacagatacggatactgacacggccgcggacacggatgccgacacgggcgatggaacgcagattattgcggatcacacgatagtcgacagatacgacgacattccgcctcaatagatcgccgaagtgaagaagatgttcatcaatattcccggcgaatcacactcgcaagcgtatcgcaccgggctcgagctcctcgaggagatcgaaaacgcgggaattctgcccatcctgccaggccaagcaggtcgaaattatgggcatctccattttctggtgacatgcggcggcctggacgcggggggagttttccgcgaaatcgcccggatcgatgacgtccggttgtcggagctctttgcccgggaggtcttggcgattcttgcggccaagggattgctgagctcggagagggccgaacgccttctcgcatggcggcattccggattcaatgtgcacagcttggttcggaccgaaaccgaggccgaagcggagcggatcgggaagtacatgatccggccggtcgtctccttggaacagcttgagtttatcaagccggaggaccgggtgggttaccgtatcggctgcaaggacggggatcaggagtcgatggattatctggagttcatcgcccgggtgacgtcccatgttccggataaaggccaggtcatggtccggtattacggcctttatgccaatgcataccggggaagggcgaagaaaggcggcgcgtcggatattcgtactatttttcataaggtgttccctaatagctgggagttacggacaaatatcagctcattcgtagtttcgacctgttcccggggcgactcgggccatcttcagcgtcttcaattgagcttcaacgggccttacagacttcgaccgctcgactacgttcattttggagggaaagatgggatttcatgacgagacagggaatatcgtcggggcttctgataaaaggaaattcctatcattcgctcatgcgccgcagggagacggggactgaaaggccgacaaccaaggaggcgggattcgggcggggaacttttgtggtcgctggttcgttctaatcatctaccatggacaaccgtggcggacaacgctcatcgagaaaacgaggagtttgcaggatgccaactgaaatgctcatccgtcccatgcgcgacgaggagaagtcgacggtccgcgacatcatgcggcgatcgtttccgctggtgcagcggtggtttttctccttcaccccccatgttctggtggcggaaattgaggggaaaatccagggcgccatcgtgctcaaggtatcctcgctgccgcgcgggcgccggatcggtctgatgtactgggccttcacccgcccggacgcgaggggacagggagtgggacaacggttgttcgacgcaggcatccgctttctggaagagcgggattgcgatgaaatcctcggctgcgtcgagggcaacaacacgagttccagcaacctgctggcggcgcgtggctttgaaatcctgtcgccgggccggcagcttcgccgctgggggctgcacatccccctcgtgtggttgaaaatcttccactatatcgacatcggacatttcgtgtgggcgcgtcccgggtccggccgtgccgacagcgccccgctgcagtggtggaacaacctggcgataaacagcctgctgctgtttgttgtgttctggcgtctcatgggtagagatttctttgactccccgcgttactgggaaatccccttggtgctcggcgtgttcttcggtgttcgcgagctggcgatgcgcctcgttgcccacggacacgggctcacgatacgctatcgtacctgggagtcggctttgccgctaggcctggtgctggcagcgggtccggcttgctggtttccgattctcggatccgtctatccggtgactccgagctggcggtaccgggacaccatccggaagttaggaccggtggcgacggccggcggtctggtgctgttgctcctgtcttggggcgcgtgggcgctgctgcgatgggcggctatcccgccgacggttacaccactcctcaatctaacggccatgcttggatcctcgatggccttttttgacattgccctgccgttcttcccgttcgtctgcttcaacggtcgacgaatctgggactggaatcgcccggtgtggatcgtcctggccgccctcgccgtggcgcggtttttggtgtaaattcggccgcccggcaattcagtcgtcgccatacctgtccttgatcgcccggatcacggagatataaccgaaagttgtgtatgaaaggaatgagcgtatcctatgttggatctcaaaatctaacaaggaccttgcggggtccggaaggatacgctcatggaaaagactaccgcaaaacgggacgcaggtcgaatgatttcggaatcgcgggcggccttggacgaaatcgtccggcagggggcgcagcggatgctccaggaggctttggaggcgattttggggccgcaagaagcggccagactttcggccaccaacatcgtccggctgaaagagggctggagagaagagtacgaaagctgggcaaaacgggatctttccgaccggagatacgtttattggcgggccgacggaatctatttcaacgtccgattggatacggagcggctttgcttgttgattcttatgggagccctggaggacgggacgaaggaactggtggccgtctgggacgggcaccgggaaagcaaagcctcgtggctggaagtcttgagggatctgaaggcccggggactttccgaatctccccagctggcggtgggcgacggagcgctgggcttctaggcggccttggaggaagaacggtcgaaaacccgggagcaacggtgttgggttcataagacggccaacgtcctggacaagttgccccggagcgtccaaccatacgcgaaaaagctgatccacgagatgtatttgtcgccgacgaaggaaaaagctctgaccgcctaccgccggttcttgtccgaatttgaggccaagtaccccaaagcgacggactgtttgcgaaaggacgaggacgtgctgttcaccttctatgattttccggccgaacattggatgcatatccggacaacgaatccggtcgaatcggccttggcaacggttcgtcaccgaacgcgccagacgaaaggttgcggatcgcgccaggcgacattgatgatggtcttcaagctggcccagcaggcggaacggcattggaggaagctggaacagcgctcagttgctcgctcatgtgattcgcggcgtcgtttttatcgacggggtcatggaaaaagcggcttaaatggagaccaacgggatatgcttagatctaccccgtacacaatatttaacaatatctctttggagggaaagataggattacttggcgagacgtgggtttgtcgttgtggtagccgaaaaacgaaattcctattcctctttcccttaatttgtccatcatatttttccacgatatattccgtacccttttcgtagtaaaagaccgcatggacaatggaatcgccattggccatcatgtaaagttcagcgagattctttggaaatttcgcttggattttgcatttcccctgggatcaaaaaccgaaacaacggccccatccacaacatgtatgttttgctctgcatcacaatacaaattgccgggccttttgaattcacccggtccttcgccttttatgaagctgctcaaaagcaaccggaagcccaaatcagaagccgattctggcagcgaataaagcgatattggtgccggcgttaataaaggcgtggatcacaatgcaaagcaatatgtttcttgtgcgcagatagacagccccgagaagcaatcctatgaaactctgcacaaaaacagactcggcaaaaccgtcaagcagtgtttttccaaagccccaggacgtgttgcccgctgcgtgaacgatgccaaaaaagagcgctgaaagcagcaaaccgctccagggagatttcagcccggcgcttaagcgcctctggacaaacgcccggtagaacagctcctcaggtaaagccgccatgaaaatattgtagacgaaaccaacgcccagcacggcagccagctgcgctaacgaaagccgcccgtttgtcaacatcttcaatgagccggagtagagggacaaggggataaagagcgccgcgcagatcactaccccaagaaacgcgtcttttctgaaattgcttttaaggattatcacctcctggacaggagcgcgaaatcccagggcgagcaggaccacgggcagaacatatacaatgtttttgcgaatgatttccccggcctcccaccactgcaacgggatcacgggaacgatgcctctgagtgcaaaaaccatcatgaacagaattgtcagttcaaagaatggatcttttagcggatcctcagcaagggacctctttttggtgaggtcaaaaacccacagaacaagccccgaaagccccgcgtccataagcagatagagcgggatcgaagcggggctgatgatcaggcgcgtgattatggcaaccaggtaaaaagctgcgaaaatcagaagcgaaatcttcaggttcttatcgccggaaacgaagcgctgcatgattgtgttaaaaaaaacttttatcttcacttttatatcctcctttaatcttggtttctaaatcaaatataattacatttttttgcggtttcgccagagccaaaatcatgcctgaactctcagttctcattttcagaaagtcgctgaaaaaccggtctggactatgccgcggtaaacagagtcgccgtattgggtgccttttttcccggaaaagagaagcgggcgaagataaagcgccgtgttgtcaaaaagcgaaaacgacgcttccgcggcgacaagaaaactgccgtccgccaggttaagaaaggtcagggccgaaaggctggcctttggcagcgttttgcaggcgcgcgcaaaaaaatagtcagacatcactgcttgcggaacgctctgcagaaattccagatccgccgccatgttcattccggccagggagtccggcaacagctccaggcaatgggtgaaatgctttcccaagcgccggtaatcccggcgggaaatcccccagccggaatgataatactcggcaatcaggtttactttcccgaccgtaatgctggtccccagcaacaactccggataaaaacggtccggcggctgaaagagcggccattgaacaaacaactcctctccatcgggaaccgaaaaagccatatgactgagaacgggggaacggctccgcagcatcaattcaccgtggagctccacgctctcaccggccgtgcctgaggcggccaggccgaactccagcttccggttttccggatagtagacgatggcataaagatccaggcggccgaggtttccaaaggcgaaaatcgccaggttgctccaattccctttcctgaaaaccatggcgctgatcgagaagttttccctgtaataatcagccttgaccagccagacaccttcctgctgatgatcactgtcttccgggtccgagagctgtttttgaggagtgatcacgctgatggggctgaagatataaccggtgcccagtttgatcaaagctttgcccgcggtcaggtcaaagtttcccaggttcaggttgcagaccgcttcacgcagcctgccttccaagccgccgtcatgtttcacccgcaaaagcggtaaaccccgcagcctaagcttgcctagcaaaaggcggccgtcagtctgcagcaggagcgcggaatcccgcgctgccaagtcatggattccgctggggttccagaggctgtcggcgcgcattgcgagccaggaatacttgtagtggccgtaaaaatcaagcttgaacggactttcggcgccggccaggaaaatggtcatcatcaaaaaagccgccgcgaagatcaatcgctgccccatcttactccgtctcgatctgcggcaaatagacgacattgaaatatttttcaggaattttatcggggctgaatccgagaaattccatcaaagtaaagcgccgcgcattgagcttgtcctcaatccgtatcttgaagatcacctcccggccgtcggccagagcgccttcctgataataagcggttttaaagtgcttcccggaaagcagaaagaattcagccctaaccgggcgataagatcctttcgtagcgtaaagcaggatccgttgatatgtggctttagagttttttgcctgcaattcgagcttcagcaggtcgccgtcagcctccaggattgtcgcgttataatcgcggctgaaactcaacttggccacatccccgttggaggcttcacccatcagccgctgcatcggggtgatgcgcagcgcgcgccgggaaccgctcaggttgatccacatgtcatcacccttcatcaacactttcatgcccctgttttttccgcgctcgcagatcagcaggctacgatcatcaccgtagaaaaagcctttgaaaaaagcctcctcctttagcctggtatcgtcaaaatcccggatgcgcaggctcattcgaaacgacccggacacaatacggtaacgatcaatcccggccaatacttctgccgcgtcagcagcgcaaaaaagatccgaaaccagataaaacagcagaagcataatcatggttaaataatttttaaatctgttcatgatagtgctccccttcagccattacgcagggcacggacaatgttcagcctgaagatacgccgggccggaataagcgtcgaaaggatcacaacgcaaagagttaccgggcctacaaaagtgaagatcccgggcacgttcagcagccccagcctgtaaccctcggtggccccgggcggcggcggcatcatgagattggcgttattgataaggaaggcgaggccgatctcgatcactattccgatgctgacgcccaaaatcccgatccaggcgccttccgcaatcagcatccggaacatgcggaacttggatgtgcccatggcgcgcagcgtggctaattcgggagatcgctccatcagcgacatcaggatcgtgttcatggttgaaaaccagacgatcagcatcaatacgggaagcacaaaaccgatcatgccgttgaaaaaattcatggtcttggcaaaatcgggataaacctctttccagctctggagggcaaacccctccggcaggttttccttccaatagaccagcgcctcgttcagggccctggtgtcatgcagcgtcactaccagcctttccaccttttgagaagccagaagcgcctgggccgcgggcagcaacaccctggcgaaacgtttgtccgcttcctcgtatcccgtactgatcgtgccgctgactttgaaatcataaccgttcatggcgccatcggcggttgtggtcaggagcgtaacctcttctccttcctcaacctgcaggctttttgccaggagctttcccagcatcacaccgtccggctcggaagcgagctttttcagggagtcgctgttaatgtgccgcccgcccatctcgatctccccggatggcaatacagcctggaccattaccgcggttgatttctcgccgctggagcagagcccgaaaaaattaatgcgcggcgtaaccgcgcttacccgccgatcctgacggatcttttccgccagtttcctccactcctcaattccgaaagagagaatcttgtcttcctctttttgcagcaggtcgcttctcaacacctggaaatgtcctgtctgaccatgaatcactctctcgccgtaacccaccttgataaactccacgaaggccatcgccaggcagagcatcgaaaccccgatcgtgattaccgcgagggtgatcagggtgcggcgtttgttacgccaaatatttttaattgccatttttacgatcattttcctctccattgttgttttctgccacattatcatcgatcagcccgtcacgcatctgcaccacgcgtcgggcagccttgatcacaatggggtcatgtgacgccacaatgaaagtgatgccttgctcgcggttaagagtttccatcaactccatcacctccctggtattctgggaatcgagattggccgaaggctcgtctgcgatgatcaatttgggctgtttgatcagggcgcgcgcaatcgccactcgctgctgctcgccgcccgataactgcgccggcttatgacggcgcctttcccacagccccacgcgtttcaggtacctttcaaccatttcccggcacttcttcgccccgactcgcatcagcagcaatgggaattccacattttcataagcgctttgcgttgccactaggttaaaattctggaacacaaaaccaatcgaacggcgcctgatatcaaccagttttctctcagggagcctgcctaccatattcccgtcaaaaaaaaggtttccggagctgagaccgtcgatcaggccgaccaggttgagcagggttgttttgcccgaacccgaagggcccgcgattaccgtgaactcgttttcagcgatctccagatccacgccgcgcaaggcacggacctctgttttcccaagccggaaagactttttaactttttccgcttttacaattaaagacattttattagcctccagaaatgttcaattttggttaatgataggaatttccttgttatacccctcgttttctcgatgagcgttgtccgccacggttgtccatggtagatgattagaacgaatcagcgaccgcaaaagttccccgcccgaatcccgcctccttggttgtcggcctttcagtccccgtctccctgcggcgcataaacgcgaaacgtgttgattctaattgatccggggaagatgccggatgttttcaccgtctccctggaaaaagagggtttacacattagcaatatcgattgggtggtctgttcccactcccacggcgaccaccggaaaaactccaatctgttccctaaagataaagtctacaacccgttcaagctttataagaagataccggaggacctggtgatcctggggacggaaatccgggtcatacatatgccggggcacgtggataaccatatcgccttcatctcggcaacgccggagggccggtgcggcatcgcgacggacgttatctggtgggcggaccacgaagaacagaagacggacatgaaatccttggtggagcacgtagatgtagccgctaaagatatggcgcagatgatggaaacacgctggagattctacgcgcaggtagaatgcatcagtaagatattcaaactaccaatgataggaatttccttttatcagaatccccgacgatattccctgtctcgtcatgaaatcccatctttccctccgaaataggataatttggcgaagatgaactattgactcctgtatattaaatgtcctatactctgatccgaagggaagcgatgagaccatccggaagcgcagagttcctggaagcgagacgacaccgggccttggattatttgagacaagggcttcagcctgtggagattgctcgtaaaatcggtgtcgaccgccgtagcgtccgacgctggaaggcgagtatcttgaaggacgggcctgaagccattcgttccaagccactccccggccgccctccgcggctcgattggcagaaaaagcggaagctggaggcgatcctgcttcgaggggccggccgatcgggctttgtgacagacctgtggacctgcccccgagtcgttcaggtcatcgaaaaagccttcggcgtccgttatcatgtcgaccatatcggacgaattttgcacgctctgggctggagcccccagaagccgcaacgccgtgccgttgagcgggatgaggcagccatccagacctgggtcaagatcgattggcctcgggtaaaaaaaactccgctcgcctaggggcttctctcgttttcatcgacgagagcggctttctgatgatgcctttggtgcggaggacatgggcgcctcgcggtcagacgccattgttccgacatcgaacaaacagttatcggaaggtttcggtcatcgcggccctggccgtctctcccgcccgggaccgcgtccagctgtttttccggcttcatcctcaggaaaacatcaacgccggcaaggtcctttcgttcttgaaggatttgagccggcattttgaatgtcccctttcgctactttgggatcggttcatgccgcatcgggctcggtgtgttcagcgctatattgctctcaaaaaggactggcgcttggagtttctgccggcctatgcgccggagttgaatcccaccgagaacgtctggtgttacctgaaaaccaattcgatggcgaacgaggcgatcttcgaacacgagctcttgacgaactcggttcggcgacacggcctagcccttcaaaggaaacaatctctgctccgctcattcctgaagcacacgcccctttttttgcgtttaaaataggacattatttatgcaggtgtcaatagctaaatacgaagctctgattatcgacgatatcggctatgtccatcagggacaggacgaaatggatgtcctcttcacgttgtcggccgaacgatacgaacggggcagcgttctgatcacctcgaatcttccgttttccaagtgggaaacgatctccaagaatccgatggtgacggcggcggccatcgatcgtctcgttcaccacagcgtgatcctcgaactgaatgtcggaagctatcggatgtcgaccgcgaagaaaaaagccgaagaggacgcgaaatgatcatcggtcttcccgagatcgcccctcctggagcctctggtgaagtcgcttccctccatcggttcgggaaaacatcttttttagctcaaaagcgcccgccccaatccgggattttaattgtcgctggagaggaataatacttgacgttcatcaccggtgaagggcctggggaatgggctgagacccgcggggtattgttgcggtccgatggaggactgtccattgtcagtgacgcaccggaaaaactgattttctttgattccagtttccgactgcttagggaaatgcgttttgataaaagtcaaaattggttgcgggtgttctcagcgtatcctcgtggtggtctcatcatcagttccgaatcggacttttccaaagccagcgatggtgttcatctcttgactgtcaaacttaaacatttcgatgaacagggaaaggtgagtgaaagcggactggaattccgtcaccgggtggctcagaaggtcaggcgctatgaaggcggtgtcggcatttctataaatatggtggatcccttcttctttggctatatggaaaaacgggaacggctactggtgacagatcatgaaagctaccgcctccggatggtggatgtgaaaaatcgacaactgatcggaacctttacccgggcctatgtccggcaaccctggttcaaggatccggatgataagaggaaaccggctttttcggatcctgaattcttcatggatatttctgccatagttccatgcagggactgtttctgggttttcacaagcttgctgaaccctgctaagggggtttgtgtcgatgtggtcggggtcgatggtgactatcgggaccgtttttggttaccgttgcccggactaacccggcccgattcagtcggaaatagccggctctgtgtgaccggggatcgcattgcctgggtatattccgatgaagatgataatcctgtgatcagcctgttttcgtattgatactgtagaacttcatcacaaaggggaagcccgttaatcagactccctaagattaattttttaaatcaatagtactaacatccgtgcgcgaccattaccacagtattacaaagcaatatgaaaaagggactgtcccaaaacatgccctcccaaaagctgccttttttaaaaaaaataaaaaagtagttgacaatgtgacaaatgtcgcatattattagtgcgacacgtgtcacacaaggaggtgggttcatgaatatcggtgatttaccgaagctgtcggatgccaactacgagatcatgcgcataatctgggagctgggggaagccacggtgccccaggtgctggagcgtctcaactcggcgcgttccgaaccgatcaaacgatcttcggtacaggtccagatgacccgcctcgaggaatacggctggctgaaacaccgcgaggaaggccgtacctatttcttctcggcgaccgttcccaaagacccggcccaccggtccattatctccgatttgaaagaacgggtattcgaaggttccgccgcccgcttgatgcaatgccttctcagcgagaggcggcctgacgagacggagatcgccgaaatcaaggcgctgatcagccgctacgaagaggagaaggtaaaatgagcggttggatgcctctgatactgaaaacagtgctgatctccctgcccgtcagcctgatcggaatctggggctgccgcctgctgcgcttttcgccctggcagcgtcaacgcaattacatcaacctgatcatgagcgttctggtgctgaccccgcttctggtctggatcgggccggtcttgtggcaggtcaccctgccgcccccggagtcccagtcccccgtgctgagctctttcagttacaacctggtcgtccaggccgatccgggtgcaagcagccagttgcgcttaggttccgtactgggccttctctggctcatcggaatactcgccggctgtttgcgcctcgtctggggaatcatcagcgttcagcgcaatatccgcaactcgtaccaaccgggcagcgccgaaatctcggagaaactggcattgggctccggcatcgcctgcgacatgcccgtggaacgaatccgcctttccgaccgtatcaaaggtccggcggccgccggtttcatccgtgcctggatcctcatccccaggctgctgttccggcacatggacgcccgcgaattcagggccgtcgtactgcacgagtgggcgcatatccgcaacagggacgggctgttcactctgctgggcgaactggcggtcgtgctgtactggtggaatccccttgtccgaatattgcagaagcggaggctcttgctgcaggagatgatcggcgacgaaacggcggtcgggatcgccggcgaactggattacgccaaggcattgctgtccctggccgaaaagagcaggcgtgacggggaattgaagggggcattggcctttttcggaccgctgggtcttaaagaaagaatcgaacgtattttatacaaggagggaaaaatgaatctgcaaaagatgaaacacggagtcttgttcctggggggattgacattggccttgaccctggcggcttccgggacccggtttgtcgcatcggcacacgatcagaaggcggaggctcagaattcgccgcagcaggagcgaagcgagccggtgtccatttcatccccaccgaaagtgatccaccgggtggttccgtcatacccggaagaggccaaaaagaaccgcgtcagcagtcgggtgacagtggcaatcatcgtcaacgaaaagggagaagttgttgatgccaaggtggaaagcggccatcccctgttcaacgaagcggcattgcaggcggtgaaacagtggcgctttgagccctacatggtcaacggcaaggcgatatcggtcaaagttctgattcccgttgtcttcaagctctccgagaaagattcccaatctttgccagaaaaggaaaaaccggtaagggtcgcgaataaagacgtaccgaagctgatccgacgtgtcgagccggagtacccccaagcggccgtgaacgccaaattggaagggcaggtcgtcctggaggccgccaccgatattaacggtcgggtgaccgaagtcaagcacattgttacgccggaaacggaaaattccgctccggagtattcgctgctggtggatgccgctaccgctgccctgaaacagtggctttacgagccgtacatcgtcgatggcaagcccaaacccgtcaacagcttcaccgtgacattcactttcaggcatgggaagagcaaaaaagcggaagaaaaggcaatccgcaaagaaaaaacggacgagccgaaaagcggagatgaacagggaaaaccatccggggcaagccttgccgcgcaagccgaagacaaaaaaatcctcactgtttcccaaaaggaggtacccagactgatccgacgtgtcgagccggagtaccccctagcggccgtgaacgccaaagtggaaggctgaatcgtcaactggagcgctttgcttacgagtataactatatccggccccaccaggccctgggctatctgacgccccatgagctgtgctgccgaaaaaaaatcccgcaagcaccaggaggcgtccaccatgtagtgacccaggacaagccgttgacgagcggtaattctgtcgttatacttcagtgatgagcggcggcagagccgttttggggaggtgagtggatggccgtgctggcaagaggcgaaaacgtcagcaaacattttaacttgggccggaccaaggttcaggtcctggacgacatcaatctggaataaaatccaatcaggagaggatggaacaaatggcttggatcgggtcatatgggaaatcccggataatgccttttccggcccaagcgaccattcttggagtggggggaattttttgggtgtagaatcgttgatcctgccggcaggaataatctggatatgtgaattgctggtgaaggaaaagccagactatctagagacgtatctgaacatgctgccgaccttgcggcgatatgccattacgggaagtccttctcttgccaagattcagatgaaaaggctgccccggaagggcagcctggtggtgtatccgactcccccgccccatcttcgcagcatgggcagcatctttggggtcatgggcgtgaatgaacgggatggcggcgcgcgcatggacgtgaagatgacatatggcccgttgctgttttccttgattgtctttgccagcgtcttgatagtgcccgaggatacggcaaccaaggccgtctactcgttgatggtcgctttgttttttggcgtttactattgggtcgaatggcgattcttacaaagaaccatccgcatgatgggggtggaggttgatcgatggaagggatgatcccggcggcgggaaatgatggcgccatctggcgggcggcctcacggctcggaaggggatcggctggatgggcaaggagcatcgacatgaatatctgggaccagctgctgggcgggttgctggcgctgctgcttttgctgggattgccccttttcatcctgcggctgcgcgaccggtccaggttcggccgcgcggccagcgcggcgtcgggagtggcggccctgttggtgggagtgctcatggccgttgcggttgtctggcaggttgtggaaagcaagcttccttgggcggacctcacgctgcgaagcttgatccgctacgcggggcagggcctgatgtcagcgctgttcatttttgcgggcgtgaaatggatccgcgacgaggggccgggcatcgacgaatactctgtggatgaagcagaaccggaattccgggccgcgttcacccaggcgcggcagacgctcccgtacttcgtggagcaggtccggaatcacgtggatgacgccttatgccgcttcgccctggaaatggacgtcaacgatgccgtgcacgtctggggatacgtccatggattcgaccgggaccattttgacgtttcccttgtgggccatgaccgaaaagtagcgaaaaagcatccggcgcgcatgcgcattcaccgggacgcggtcgaagactggcagatcattggcgacgacggccggttgcggggcggatactcctacatcgcgaaattctccattttgaaaaggaaaggctaccgctttcacaagcggctgcgggaacagctggcggatttcatcgacgcgccggatggggggcgggtgcctgggagctgaaggaggattgcggggcgtgcggcggggcgtcctggttgctcggcccgcgcctctacgtcggcgtctcctacctgcgggaaacgacgcggaaaagcccggccagcctgcaggaaaaccgcttcaccctggaggcgggctggaaggtcgatctctccaagacgctcagcttcgacgcccgggcgcgcaacgagatccgcgtgttcgaggacaatctcgccgaggaccacttgcgtttgcgcctgcgtctggtccagaagctggccctgggcgcgcggaccttcaaggccttcctggccgtcgagcccttcgccaatctgcgctagggcaaggtcaacagccaccgcgtctacgccgggacggcgttccccctctcccggcaggtcgagtggaccctcagctacatcccgccaggattccagcggcaaggagccgctgcacatcctcaacaccggcttcgacctgaaattctagccgtcaaccaaggccggccgcgcgcccgcgccggcatctcccgccgcgtcgtcgagcgggcccaggagaaccctctcaaagcggagaagaaaaggagctgaagcgcctggtcagggagcgcctgagcggcgttcggcttggttgctttagccggatgcgcgtttcgttgcgggatcgacgcatggggttcaaagcggcggctatcggttttgtttggcaacccggtggatcaattggtaacgattgcgaactccaagcttgcgatagatgctggtgacatgatttttgaccgtatggtaggaaatgaaaagcagggtgttgatctccttgttatttctcccttccagcatcaaggccagtatttccagttcccgcttcgtgagattaaactgcttttccaatgcggccatttgttcacgaacatccattgcttcaaggcgactgccaaggtgccccgtgaaataaatgccgctccataggaaagggacgatgttggcatacagaaaaacagccgcggccagcaacaaccaaataggcctggcgattccgctcaggcaaaacaacaagagccagcctccgtaacgcgaaaggtagagccaacaaaacccggcaatcattttcctcgaagtcggttcggcattcttccggcttgcgacaagcagacagatcagaatggctggctccaggagcagaaggctgtccaaaacctggttgaccgtgaaagcggccagtctttggaaaaagccgctggccagaaaattcttgcccaggaaaatcagcaggaccaatccgcaccaggcaccataccagagaaacgctcgtttcaggaggcggaggcctagaagctcccgggagacctgagccagggaaaacagcatggccgagatcaacaggatggatgcaaagttccagctttcccccaaaaactgcgagtctcgcgcgcttgcggccccaggcaagttggcccgcccgtacatgaatacaagcagctgaaagacagccaggttgagaaaaaaggtgtactgtgccaggtgcttgagataagggaaacgatggcttttccccaagtagcgcagatggacaatggcccagacaccgatcagcaggttgatgaaggccacgaagatatataagtgcgctgacatgatgccgagtctctttacaagccgctgggaatgatatcactatttgccgcatcctgaataggaaaactttcccgttttgaaaaaaggaatggtttcccattgccgggcaaggttcgcgaagttatcttatttgcggctggccgaatgccggtcgggcgattcgaaaacaagaaaaattcaggaggaaatcgtggaaaaaaaagaatgcaaagcagcggatccgaggcgaggtggaatcggccggtcttcccccgggttgatccatggccccctgtcgcggatgctccttgcaactacggtgctagtcgtcggctatttctccatcagcgccatgctgaagcccctgacgcggctcatgaaacctgaggaaaccagcggacgtcccattcgggccatcctcactgccttggcgatgttctatttgtaccgcctgctgttcacaatctatgaaaaaagaaaagtgagcgaacttgcacgatcccgtttccccagggaagccctgctcggcttggccgcaggcatgctcatgatggccggcgccgttagcctccttgcaattcttggatactacggcataatggcctggaaattcagctgggtgaaaattctggctggcttttcgatcctgttcgccctggcggctgtggaagagattgttttccgcggggtcattttcagaatcatggaggaatggctgggcctccatccagccttgctgatctccgccttgctttttgggctggcccatctgcccacgccgggcgccaatctgctcagtgtcatttcggctgtttccggcggaatcatgatgtgtctcgctttcagcctgacccagcgcttgtggttgccggtgttcatgcatgcagggtggaatttcgcccaggttcttttcggattgacagtctcggggctcagtgaattcaatggctattctcctttgcaaagcaggctgcacggccccgagttgcttaccggtggcaagttcgggatcgagaactcaatcccggccattgccatggtgatcggcgtgagtatcttgctcggaattctgcaggccaagtccaaaaccaggggagccaagaatggggcagcctgatcgctgattcctagtcaaggtggcggatggaatccccggttcgttcgggcatccgtattttgccggccgtgacggtctgtggcgcagcgcgttttccgcattcgcgggcgttaaaaatcggcgcatggactacgctccattcaagcacggacgcgtcgctggccaggctctcgctcccgcagataggatgaggcactccccgtctccgcgtcggttccttgctccggcggcggccacggttttctgcgcttccgccctgttcgccgccggcatcccgcgccgcgtcgtcgagcgggcccaggggaccctgctccagcctggccccaaagctccgtctgctgttgcatatttttatgttttctttagaattcaaaaatcatgaaaaaacatcacttcaacatattatttcccttgctgccgggcctcctcctggcttccgcgttgcaggcgcaaacccctttctactctcattacaccacgtgcgacgggctgatccagtattcggtttcctccatcgtccaggacgacgcgggctatatgtggtttggcacggagctgggggtatcgcgcttcgatggccgggaattctgcaatttcaccaatgccaacggctttgtcaacgatgccgtgcgcgccatcgcctgtgcctccggctcggtgtacgcgccatcggggcagcggaagctatttgccagccgctggggacgcatggccgccgttcccgatacggggcgccggtggaattcatcttccccggccggcgctacccgctctggttgctcaacgaggacgggctggctgcactggggggggatggcggtggccctgcccggcctggtccgggaagcgcggattcatgcgccggtcagcggccgcttcgggaaggggttggctttcgccgtaggccgctcgctgtggtccttcgacgagcaaacgcctccgcagtggctcgggcaggtcgaagagccgatcatcgacatggctccagcagccaacggcggactggcccccgtgacggccacgcggcggctggcccggtcgacgtagatgtggacgacgtatttattcccggcccgcatgggcgtttgctgttcgccgaaagggaccaggaggtccttgggcaggccccagtcgagaaacgccccggccggattgaccgcgacgaccttcagaaaagcgaattccccggccccggcccgcggtttttccgtcgtggcgatcaaccggtcctccgagtcgaaatagaggaagacctcgagcttgtcgcccggcgcggctccttcctgaacatagcggcgggggaggaggatctcgccgagctcgcccccgtccaggtagacgccgaagtcgaccgttttggcgatcgctagcaagttggttttcccgatctcgaccatggcggaatcactatacccgccgcgccgccgggattcaatcggattgacttctatccggcctcatgtaatatgttccgagccggaccgcgcgatggaattctgatcggcgattcggcccgtcaacggcaggaaggatgggtgagatgaattggaaaacggcgacggtctgcaacttgattccctacgtcctcggcaatgtcggcgggacgctcatttatgaattgatttcgcccacggcgatgatcgtttcgacgatgactcttttcccggtggtctacacggcatttgtttatctctatttccgggtgacgaaaaacccgggcggggcgtttttcgataaggaatggaaacagctcacgctttactggatcgggttgtcgatcttcctcgacgctttattctggatgtttatcctgccatcggccgtttttccccgcatctatgaaaattatccctcgcacatcgcctggggcttcttccataaagagcgttcctacatttgggccaattatcttgtcatcattttgatcaccatggccggaaaatggatttaccggcggatgctccgccgcagatccgaggcttcaacatccgagcactcttgaccctcccggtgatgatcaaaaaaatacgctgaaagtttctgcttttcgattgtcaaacggttggccgcagccaaggccagttctgagttttcgtagttctttgcctaaaattgatccacggcggcagaaatatttcgtcaagcgttgatcgccgttgtctcagaagtcttcatcaacggcgtctccacccggaaaatcgagcgtcaacggtggttgtcgtttctctccgtgatgcatagatccgggccgttgcgtccagggagccccgtgagaatctgatcttgacctgaatcttgagtcatatcccgccatggcgggagtctatcgtcctcggcatccagagcagtcggtgctccacagggtattgtcccatcatttcgagggattcctggccgagcacgagagccgctttgagcaggaatatggatatttccggccggtggtcaaggaggtcgtcgagaagtatctggactgcgggaatccccgttgcggtttcgcccggccatgtcaacatgagttcgcatgtatgaaagcgccggacatttcaagtgatttttctatatcttctccttttcaataagctgagtctcgtcgcgtcgctcaatacccgttccgtcagatgcatgtattcgccgtctcagcggcatgagcatctcccccgtggaggatcgcatccaattttcgaagctcaaggcctcatgcgaactttcgcgcttgctcccgggtggacgaaacaggctttattgcattccgttctcgataaggttctccttttttcaatatccaagaagtcgcttccgatagatgcctggctacagctaccgcggccttggcatggcctcttttctcctgaagtcttgaatatagaacagaggcatgtcgtcctatccaacgtttgtaatggatgacgaccgtattcgcggcttcgatgaaagcccattttaaatagcggttcacatcgggacggatgcggccatagaagatcttcccgaacgatcaggcgctgatcaagcaggtctatctggcgatcgacgaagccgcataaaaatggactttatgataacgcgattgggctatgatatattcgcagttaatgatcttcttcgaagatcgcatgagggggcaagcgtaaatggccttatcacatttatacagattttctgatactacccatttatttcttatgtatcataccccatgccaatgcatttcatttctttaaattcaattctccacgatctttcggcactccctccttcgagattaactaagatggaattaacattttttcttttaaagaaataaaatttatcaagttttagactaaatatttcatcttttagaatttcagcatatttattattctctattaaccaattattttttgcttcagcgagtgttttgtttaaccattcagtattatttaatatatttcttgcataattaataagatctatatcaggttctttttttttatcataagccaatgtaaagatatatccattatattttccaatccaagcctcatcattatcattccataataatcgtcccaaaatagaatcttcataaactgaaataggctcttcaccacttttaataaaatctaaaaaacccattgcttatttcctccatttttaactttgcattttatatcttctgtcttttaattttttttatagggataggaatttcgtatttcgactatcacaacgacaaacccacgtctcgtcaggaaatcccatctttcccgctaaaatgaggatagttgagcggtcggagtctgtcaaggacgtgagcggctccgctccctctcctcccggctccccgccgataggatttcggaccggaacgggaggcggccggcgctttttcttgacttggacggggccaacgaggaaaatgtcccctccgggccggaggacccgcccgtcatggcttatgatttcatcttcaagccgttcgaaaacatgtcgcccgaggattacgccgcggtcggattcaagtcggggctggagatccaccagcagcttctgaccggccggaagctgttctgccgctgccccgccggccgctatagcgacgtctatcacgccgaaatcctccgccacatgcgccccaccctctccgagctcggcgagtacgacggcacggccttgatggaattcaagaccaagaaagaaatcatctaccggatcaaccgggagagcgtctgcacctacgagatggacgacacgccgccgttcatgatcaacgaggaggccttggacatcgccctggcgatcgccatgctctacgactgcgtcatggtcgacgagctccacatcgcccggaaacaatacctggacgggagcatcccgacgggctttcagcggacgacgatcgtcggcgtggacgggcggatcgatttcaacggtcgggacatccggatcgtccagctgggactcgaggaggacgcctgccgggaggtcagcgacatcggccaccgccgggtttacaaaacggaccgcctggggatgcccctgatcgaaacggtcaccggccccgacatgcggactccccaggaagcggccgcggtcgcccagattctccgccggatcgtccggtccaccggccgcgtccggacggggatcggggcgggccgggaggacgtcaacgtcagcgtgaccggcgggacgcgggtcgagatcaagggagtcccccggattccccggattccccgcttgacttaccatgaggccatgcgccaatggaaccttctccggctgcgggaggagctcgtccggcggggcgtgacgacggcttccttcgcctcttccatcgaggacgtgaccaagccgctcaagcggacgcgctatacgccgatcgaggccgcggtcaaggccgggatgatcgtttgtggagtccgcctcaacggcttcgccggccttctccgctggccgacgcagacggatacatatttcagccaggaaatctccgaccgggtccgggtcatcgcctgcttgacggtgcttcccaacatcctccactccgacagccccggggaatcgctgtccagctcggagtggacggcggtgaagaaggcgctcggggcccgggacgaggacgccgtggtcgtggtctggggaggggaggccgacgcccgcctcggggcccaggaaatcgccgcccgggcccgggaggcgacgatcggcgtgccttccgagacgcgccaggcccttcccgacgacacgaacggtttcgagcgcatccttcccgggcccgaccggatgtacccggacaccgaccttccgcctaaaaagatcggtccggggcggctcaaggcgatccgggcctcgcttccgccctccgtccaggagcgggagcggtggtatcggcggctcggggtgccggctgatgttgtcgaatgtctttccttttcgccggccgcccggctgttcgaaaccgcggtcaaggaacacgcggtcgatccgaaaaccgcggccgtgattctcatccagtatcccaagcgcctgaagcgcaagggcttgcctcccttgccgccggatgcgccggcgttcgcggagattttcgaggccctggctgaaaaacgccttttccgggagggcgtgctgccgctcctggaagcctccctggcccaaggaaagcccgtttcagacctgctgccggccgccggccgtccgggcgacttggagaaagacgccctccggatcgccgaaaccctccggggcccccgtttcgccgacggaccgcgccggatgcggcgggcgatggggctcttgatggccgagtggcgcggccggatcgatggagccggggccgcccgcttgatggccgaccggctgggaaaggtcagcccatgaacgacttcaacaacaccgagtataagggctaccggggccgggccctcgaggtcctccaaagcttcaaagccctcgtctggagcgacgcgaaaatcgtcacggccgacggatcgtatatcggcatcatcctgccccgctcggagacggccgatcccgaccacgtcgtcctgaagctccgctcgggctacaacatcggggtcgcggtcgaccgcatccgggacgtcgagatccagggccgcaaagaagcccattacaagatcccggaaaaggagtttccctttgatccccggaagccccgggtgaagctcctggggacggggggaacgatcgccagccgtctcgattaccggaccggggcggtcatcccggctttttcgccgggcgagctctacggttccgtccccgagctggccgacatctgcaacctcgaaaccgagaaaatctacggcgtcttcagcgaaaacatggggccggaacagtacatcggaacggccgaggccatcgcccgggaaatcgaaaagggcgtccagggcatcgtcatcggccacgggaccgacacgatgcatcacaccgcggccattctctccttcatggtccagaattcgccggtgccgatcgtcatggtcggatcccagcgttcgtccgaccggccgtcttccgacgccgccctgaatctgatgcacagcgtcaagacggcggccgagagcgacatcgccgaggttttggtctgcatgttcggcccgacgtcggacatctacggcctcctccaccgcggaacgcgggttcgaaaaatgcactccagctaccggtcgacgttccggacgatcggagacatccccatcgccatggtcagccgggagaagatcacgcccctgcggcaggattacaagcgccgccggacggaccgcggcgtcgtcctcaacaccgctttcgaggaaaaggtctcgatcgtctattactaccccaacatgaagccggacatcatcgactccctggtcgaaaacggctaccgggggatcgtcatcgccggaacggggctggggcacgtcaacaagccgctctatcccgccctgaagagggcccaagaccgcaacgtcgccgtctacatgaccgtccagacgctatggggctttgtccagatgtacgtgtacgacacgggccgggacatgatggagctgggcgtggttccggcggccaacatgcttcccgaggtcgcttacgtcaagctcgcttggaccctcggccagacggacgatccggccgaggtcaagcggatcatgctgacccccatcgccggggagatcaccgaccgggagccctccaacggctatctcatctttcagggcggcatcccggaagtcgaggaattcatctcccagtaccggaaataaacgccccctgtttttccgtcccgcgggacgatcatcggatcctcccggtctccggtctcatcccgccgtccggcgtcgatcgtgatcaagaacccggccggacgatcgaaccgccacatcaggatcgcggggacgaagaccgttgtcccggccctctccctcatgacgaactcgagaaatgtcatgaaaatcaaggcagggggaaatgcggccgattttccttgacatgaaaacggcgaatccctatactggcgccatgcttacgaccggggtttcttccgccgccgccgcccggtctttctattacgggttctatttcgggcgataagcccgaattaagccccatacccccaacccctttcttttcccggaccggattgtccatcgagaaaaaggtgttcccatgcaaggattgaaattaaccgctcgctccgataagcctcggacggtcgtcgaggccggccccctccgcctcggggccggatttgccgtcatcgccgggccgtgcagcgtggaaagcgagctccaactgctgacgatcgcccgggcggtgaaggccgccggggccgacgctctccgcggcggggcctttaagcctcgaacatcgccgtacgctttccagggcttgggccttaaggccctcaaaatcctggaaaaagcccgccgcgagacggggcttccgattgtcaccgaggtcctcgatccccgggacgtttcctgggtctcggagtttgtggatgtgctccaggtcggcgcccgaaacatgcaaaacttctccctgctgaaagaagtcgggaagggctcccggccggtcttgttaaagaggggaatgcactcgacgatcgaggaatggctcaacagcgccgaatacatcctgagcgcgggcaattcccgcgtgatcctctgcgagcgcgggatccggacgttcgaagtttattcccgcaacaccctcgatctaagcgccgttccggctgtccgggagctgacccatctgccgatcatcgtcgatccgacccacggaaccggacggatcagcttgatcgagcccatgagcctggccgcggtcgcggccgggtccgacgggctgatcgtcgaagtccaccatcatccggaggaagccctgagcgacaaagcccaggcgctgcttccggccgctttcgcggccctggtccgccgcgtgcgggccgtccggtcctgtgtcgaggccttgtcatgacccggctggttttgaacgtcgggggcggccgctcggacatccgtatcggcgccggggctttcaggctggaagatcacgccctcaaaaaaaggacgttgattctcaccgaccgcaaagtgcaggccttgcatggatccctgttccgcggctggaacacacttgttctggaccgaggcgaaaagatgaagaccctggccgtcgttgagcggatttcccgggcgcttcttcggcggggcggcgaccggggcgcgacgatcgttggagtgggcgggggcgtcatctgcgacctggccggtttcgccgcggctgtgtacatgcggggaatccggttcggtttcgtccccacgactctgctggcccaggccgacgcgtccctgggcggaaaaaacggggtgaacctcgaccgttacaaaaacgtcatcggcacgttccgccagccggatttcgttctggccgatccgcggtttctgtccacgcttccgcccgcggccgtccgcgagggactggccgaagtggtcaaggccgcggcgatccgcgaccgggccttgttcatcgagctcgagaacgcggccgaacgggctttggccggcgacctcgccgtcctggagcggctggtcgcccgggcggccgcggtcaaaatcgcggtcgtcgtccgagacgaacgcgagcggggagcccggacccttttaaatttcgggcatactttcggtcatgctttggaaaaaacggccggtctcagccacggggaggccatctcggcgggcatggccgccgcggcgcggttttcaaccgccggcggtctccttcccggccgggaggagacgcggttaaccgccttgctcgatcgtttcggacttccgatccggatcgccgcgtcctcaagccggatcttggcggccgtggacaaggacaagaaaaacgacggccgatggatccgtttcgtctgcctccgtcgtctggggaccgcggtcatccgcccggtccggcggagcgtcctcaaggagtttcttcgtgatctgcgtcagtctcgctgaaaaaacggccggggccgcgcgcgccgccgccctccgccatgatttcgccgaaattcgattggacgccgtttccggcctgacgcgggattcagtccaaatgatcttcgccggtcatccccggctgatcgccgccttccgcccgggccgcgttcccgagccccgccgcctcgagctattgacgtcgggcgtggcgtcgggagccgcgtatgtcgacgtcgaaatcgacgcgtccccttccagcctccgggacattatcgtctccgcccgggcccgccgctgccggcccatcgtttccttccatgacccgtccggcactcccactcgggccgtcttggaggatatccgcaggcggggattcgatcagggcgccgagatcgtcaagatcgcctgcttctccggcggcccggccgacaacgcccggctgatgggcctgcttgattttcccaagccggtcatcgccgtcggtatgggctccgcgggccggatcacccggctcgtcgggcccttgctcggtgccccgttcacttacgcctccccggccgcgggaagggaaacggctcccgggcaaatcgaagccgaacgaatccgccggacatgggaggcctggagaaatgactgaaactgccgtttacgccgtggccggacatcctgtccttcacagcctgggtcccgggctcttcgctgcgggattccgggcggccgggatcgccggacagtatacccggctggccgtcgagaacgccgcgcaaatcaggaggctggccgcggctctggatcttgcgggattgaacatcacctcgccgttcaaggaaacgatccttcctttcctcgatgaaatcgatccggacgcccggaaaatcggggccgtcaacacggtcatccggagagacggccggctcatcggctggaacaccgatcccgacggcgcggttcgagccttaaccgcccgcggtctcgacgtttcggggcgatcggtcctcgttctcggcgcgggcggagccggccgggcggctgttttcggaatgcgtagagccggagcccgggtcgtccttgtcaaccggactccggaacgtgccgaatccgcctcaaaagatctgggctgcgcctggctcggaccagaaaaaaccgcggccgcggccgccgacgcggagatcattgtttcctgccggtccacggatgagcgtcctttcgatcccggcttgctccgaccggaccatgtggttctggacgcccgctaccagggatcgaggctggccgacgaggcggcagcgcgcggggccgtcgtcgtgcccggccgggagtggctgcttcaccaagcggccgccggattcaccctcttcaccggcgaaccggctccggtcgaggaaatgagaaaggccgcggcccgcttccagccggagaggcgctcgaaggcgattgccctggccggattcatgggagcgggaaaaagcgccgtgggaaggatcctggcccaaagggggaataggcgattcgcggatgtcgacgcgctggtcgaggcggccgccggggagaccgtcgccgatattttcgcccgccgcggggaggcggccttccggataatggaacgggccgtcatccgggggctggacgatgatccggagacggtgatcgccttgggcggcggatccgtcctcgatccggaaatccgcgcggttctcaaggaccgggccgtgacgttctgggtgtatgccgatcccgtcgaatcggcggcccgtttggcggaagggagccgtccgctgttggaaaaaacgagatcgccgggggagatcgccgccttgttcaaggcccgcgtcccggcctatgcggccgcggccgatgccgtgatcgagaacggcggccggccggctgatctcgaacgcgtagcccggaggatcgaaaatgaaacacgttgcgttttcccggcttgagggcacggccgccgcgcccccttccaagagtctgactcagcgggccgcggcggtggcttttctctgccggggggaaacgaaaattctcaacgcttccctctgcgacgacgccggacacgccttccgtctcatcgccgacatgggcgcgacggtggattattccggcgccgggcgcggggaaaaacggattggtgtccgcggggggaggccctccggggcgtcccgggtgaattgcggcgaatccggcttgtgcttgaggatgttcgcgcccgtcctggccctgttttccggtccggtcacgcttgaagccgagggatcacttagacttcgacccgctgacatgatggaaaaaccgctggtggatctcggagcccgcgcccggacgacctgcggacgcccgccggtgacggtttccggaacgcttcgcggcggccggacggaggtcgatggatcggtcagctcgcaattcttgagcgggcttctgctggcccttcccctggccgagagggactccgaaatcgccgtccgcggtctcaaaagccgggcctatgtcgaaatgacgatggatgtggtccgggccttcggcggcgttctcgaaagcgatccggagcttacgattttccggatggccggccgccaggcctaccaggccggcgccttccaggtcgagggggactggtcggcggccgcggcccttctcgtcgccggggccgtcgccggccgggttgaggtgacggggcttgatccccgttcgcgccagcccgaccgggccgtcctcgccgccctggagtcggccggggctttcgtgcaggtgtcgccggatcgcgtcgtttgtcaaaagtccgtcccgcggccgtttgaattcgacgtcggcgaatgccccgatctcttcccggtcctcgcggccttggccgcttgcggcgagggaacgagcctcatccagggcaccgagcgtctccgtcacaaggaaagcgcccgcgaccgttcagtgcagcgggaatttgcgaaaatcggaatcgacgtcggcttggacgaaggagtcgctcgcatcagaggcggccgaatccgcggaggccgggcggattcccggggcgatcaccggatcgccatggccctggccgcggccggcctctcctccgcggagggaatcgatatcatcgggccggaatgcgtgtccaaatcctatcccggatttttccgggacctggcccgcctgggagggaaaatctcatgaatgtcttcggacggtgcttgcggatggaaatattcggggagtcccacggcccggctgtcggcatcattctggacggctgcccggccggactggagatcgccgagcgggatttttcagccgacctggcccgccggaaaggcgggcggccggggacgacggcccgcctcgagacggatgagccccgctttctcagcgggatcttgggcggccggaccaccggctcccccctggcgatatggtttgaaaacaaggacggtcggcccgaggattaccccgatctcaaccggtttccccggcccggccaggctgatttcagcgtcctccgcaagtacggcggttttgccgaccgccgcggcggagggcacttctcgggacggttgacggccggactggtggccgctggcgtggtggcgaagaagatcatccgcccggccgaggttcggggcgaagttctcgcctgcggcggatcggaggatttcgaggcggccgtcgcttcggccgccgcggcgggcgattcgctgggcggaatcgtcgcctgtgccgtaatgggtttgccggtcggcctgggcgagccgtttttcgattcgttcgagtccgtcctcgggcatcttctgttctccatccccgggatcaagggcctcgaattcggcgccggattccggggagcggccttgcgcggccgagattacaatgacgtgatccttgacgcctccggccggacccggaccaaccacgacggcggcctcaacggggggatcaccaacggcaacgatgtggtgtttcgagtcgccgttcggccgacggccacgctcggccggccccaggagaccgtcgatatgatcacgggccggccggccgccgtccaagccggcggccgtcacgacgcctgcttcgccctgcggatgccggtgatccttgaggcggcggccgcgttcgtcgccgccgatttccagctttgtttccaccccgcattccatgaaggaggtctcccatgactctcgaagaaattcggaggaaaatcgatgagatcgattttgagcttttcaagctgatggaagagcgcatggagtgggccctgagaacccggcgcttgaagtccgcctcagccgatccccggcgggaagcgatggtcctggagaaggccgccggcgccggccggcctcttctccgccccgaattcaaccgggaaatcatcgagcgggtcgtatcggaaagccgcgcccttcaggaaaaggggctgtcattgatcggctttcagggcgagcacggggcgttcagcgaggaagccgtccggttccgtttccccggacaagtcgccttgccgcatcccgaatttgaggacgtcttcaagggagtcgaggacgggagtctcgactacggcgtcgtcccggtggaaaacaccctgggcgggaccgtgacccggatcaacgagctgctgctccaaacgcccctccatgtcgtcggcgagatccgcgtccggatcagccattgtctcctggcccttcccgggaccgatcccaaggagatcaaggccgtctactcccatccccaggccctggcccaatgtcaaggatttctgcgccgcaaccgcttggaagcccggcctttttatgacacggccggggcggcccggatgctgttcgaggaaagaccgccggcggcggccgccgtcgctggggaaatgtgcgcccgtctgtaccgcttggaggtcatcaagtccggcctcgaggaccgggacacgaacgaaacccgcttcttcgtcctcagccgggagccgcggaccggggaggggaacaagtgctcgctcgctttcgatttcgagacggccgacaaggccggatcgcttttcagcgtccttcgcgtcttcgccgaggccggcctcaacctgactcgcatcgaatcattcccccggccggccgatccgtccggctgcgcgtttttcctggattttcacgggaccttgggcgatccggccgtcgccggtgccctggaccggctcaaaacggtagcccggtttgtcaagatcttcggttgttatgatgaggcgcgccgatgaacatcgtcgtcttgggcttcggaaggatgggatcgtggctggccggcgagctggcccggactcatcgtgtgtttgtcttcgacaagaatcctcatcaaacgcggggagcgtcccgcgtcgaggtcctcaatcggccggacgaaatcgccgggcttaaacccggctggctcatcaatgccgtcgacctggcagggacggtcgaggccttccgggaggtcgaggagttgctgccgccggaatgcatcctgggagatatcgcttccatcaagacatcgcttccggactattaccgccgatgccggttccggttcggatcctgccatccgatgttcggcccgacattcgcggactcggcttctttaggcgaggaaagcgcggtcgtcatccgcgagtcccatcccgaggccgccgcttttttcgaggaatttttccgaagcaaaggcattactgtccggacctgctccttcgatgagcatgatcgaatgatggcctacgccctgaccatgccgttcatcgcctccctggtgtttgccgtttgcttggacggcccgtcggtgccggggacgacgttcaagagacatcgggacgtggccgggaagctcctgggcgaggatgacggcctgcttgccgaaatcctcttcaatccacattctctggcccagctggaaaaagtcacccggaagctggaattccttaagcatgtcattgcggcccgcgacgaggaggaagcccggcggattttcgcccggttgagggaaaacctcggccgaggacggccgccgggctgatccggagcggcggccggcgctctttttttcgctccggcaatcccgtacaatagctccttacgccatgagctgtccgacgaatccccgcccggccgaaatcgagacggaggggaactcttgagcccggtcgcccattccggcctcggtcttctcggctggcggctgttcgaccggaagcagaccgtcggaacgctcttcctttaccttctgatcgccaacgcggccgacgtcgacttccttctccacgcggttttccaggaccgggccgtcttcatccaccagtactacacccacaacctgctgttcgttttggccgtttccctgggcttcatgttcctgcttcgggacggtccgagccgctggggtctcgtcttgaccgggatttcccacctggcggccgacgtcatcgtcgtcgacacgctcaagcccgtcgggatccgcttgttcttcccgatcgccggcgctttttacaacttgccctggttcccctatctgcagcgcgggacctggaaggaaatggccacgctccggaacttgggcgtgttggtccttgagttcggcatcttcgttttaccggttcttctcctcttccccaaacccctctggaagaggttcaggtcgtcggctttttggaaagtctaggatggacggatcagagggagccgcggagaatccgggcgggaagggtgatgacggccttgaagaggtcgaacaccgcgttgaccgtgatgccgaccagcttgaagggaagaaggaacagccagacaagagggtaaagaatgagagcaagcaaggccagcggccagcataaaacgagcagaatcagccagacaagaaatttcatgggtcaaacctcctcccttagacaaatacgcagacgggcggggaaaagttcacggaatcatggaagaacgtgaacgccgcgtctacgaggccttggaggctttgggaatcccctatgcccgccacgagcacccggcggctttcacggtggccgaggcggtggagcactggaagggaatccccggggcgcattgcaagaacttgttcgtccggaacaagccgggcaagcgccattacctcatcgtggccgggcatctcaaagcgctcgacctcttagccttgtcccggctcctgggcgacagccgtctgagcttcgcctccgacgagcggatgacccgctacctcggactccaccccggagaggtctcgccgttcgggcttctctatgacgaaaaacacgaagtcatcgtcgtcctggacgaggatttgatccgggcggaatccgtcaatttccacccaaacgtcaacacggccaccctgaccatcgcgaccgccgattttttaaggttcctcaaatcccggggcaaccgggtcatcacgatccgcttctgagccggccgaagttcttttcggacaacgccgggattttcggaaaagggggaggcgtccgggacgtgacgccgttcggaggagaagcgttttcgcggccggtcagcgctcctgggatatcatttccgcgctgactcgttcgaaggcctcgacgacggcgggatcgaattgcgtccccgcgcccttgcggatttccccgatggcctgccagggcggacggcccttccggtagggacggtcggtgatgatggcgtcgtaggcgtcggccacggcgacgatattcgccccgaggggaatttcctcgttcccggccgacttgactcgctcgacaaagaaacggtgatgggccatgatgatcggcacggcccgccggagcaccgacccgacccgggagatgattcgagcgcccatgtcggtgtgcttggacagcgcctctcgctcctcccggctcagggcggccgccttgcggatcaggtcggcggtgatctcgaatttcccgatgtcatggagcagcccggccgcccggatatcctccacttcatcgcgcgggaggcccatggcgatggcgatgttcatggacagcgtcgagacgcggaccgaatgcccctccgtgtagcgatccacggattcgagcagctttgacaggatttcgagaacgccgatataggcggtcttcaaatcctccgtctgtttttgtttttgctcgttgagatatcccacggtgaacgcggccaggatgagaaatccgccccagggcagaaggtttaaaacgagggtgaggacctcgtttccggacgatgcgaggaaatcctcgggaaaaacgatcaccgtcaggacgacgatcagaatcgagccgaacgccgtgagaacgccctcccgttttcccagaatcacgccggccgcaaggaccgggaggaagtagaaattaagaaagctcgtcttctgggggacgaaaacgaggatgaagctgatccccaggagcaaaacggccaccaggatgtattcaaaatgcttgatgaggaaatccttgactttggcgagcgccatattcccccctccccgccgttttcggccgaacgacgccccggccttgcgaacgttaaccctttggggtcccggacgtcatcttcccgggcgaaggataccacaagggggggcacaaggcaaaaaaaaacgcccggaccgcgtttccgcgcggcccgggcgttccggtcgtttgctccgggtcaggacgcgaaagcgttcttcatgatgtcgacgagacccagggcgtaatcgatctggatgaagggagccttggttttctcggcgatcttggcgaagcggccgtccttgttcgaatccttggtgacgatgatgacgtcggccgccggggcgacggcgtcgatcatccgctcgttgtcgctgccggccgggccgcgggtggattcaccgccgacgtggacggcgaccaggaggatcttgtttttcttgcagtaatcgacgatcgccttgacccggctttcctcggcgtcgatggtcaggccggaagcgcccatgcccttgaggctggcgccgatggcgacgatgaccgtcttgaacggcgtccccgcgggaaagagggccgtgtcggtcgtcgactcgacgtggaagccggcggcggatttctttccgcccaggctgacgccggcctggagcatctcgacggtcgggacgtcgcagtaatcatacaggacgcccgcttcctccatgacgatattgacggtattggcgtcgttgctttgcccggccgacgtggtgaacacgggcaaggcggctttgaagcctccgccctcggcggaggccgtcaggcccagccccgccagggcgagaaggacggcgagagtttttttcatggcggttctccttcttgcgtgatgattcattatcttatttttccatccacgtgtcgaccattttcacggccttctgccagacctcgtcgtagaggggaacggaccggtcccggaccctcttctccgtgtcgtacaggccgatgtggttgtacttgaccaggagcttgtccccgaggtcccaccaggcggcgacgatccggtcggcttggtccacgcaggttttggtcaggtaagcggccgctttcgccgggctcttggcgtagagctccatggctttccggtcgatctccgggacggcctggatggccgcgccctcatgctcgagccggaccttttccacgtcctggatcgcccggttgtaaaccacctgggtgtgaaaatcgacgtagtcgaaagcccagcgggcggagctccggttgaagacgaaatgatcgccgacaatgaacgacttggggagggccgtcatcccggcgtacagggggatgtagcaggacgtgtcctgggccccgaaggccacccagaggatccctccgatggccgacggaaatccgcttcggcactggaccaggctcgtgtattcgacgttggccaccgagattttccgggtggcggcataataattgggattcttgaacgggccgccgcggatgccggccactgggtcgaagatcgagccgtagctcttgtcccgggtcagattcatgacatcctggacggagagcttgtgatcgggtttgaccgaaaacggcaggtccatgttgggcgtgttgggatcgagcttgagggacggggcgacgaggtcgaggaaccgccagagccgggaccggcgtccgttcgtgctcaccgcgccgccctcggccggggagtaggcccgcttccagttgaacggcttccccgaggccggatcgtagagcttctgggccacggcgaaagagaccatgtgggccgagcccatgaaattttccttgtcctcgaggttgacctcgccgatgcgcgattcgttgggacagactgagacgtggtcgtcgggcaggcgctgggcgcaccagaccgccccgggcttgcccgtttccggagaccacagcgggccgaccggcatgatttcgaagatccagacttcatccggatcggagacggcgaacatttcgccgtcgtcgttgaacccgtagccgtatttctcggccagggaacccatgatttcgatgcattcccgggccgtccgggagcgctccatccccaagagcgaaagcatcgtcaggtcgagcttggccgagggggtgttgttgaccagcttgcggactgtccccagggtcgactcggagatggcgacttggttttcgttcatatagccgaacatgccgtggtggaaagcgtaggtgtggggaacctggggaatggagaaatccgtctccccctggctcatggcatacggccacttcgtcgcttccttccaggtcttgtattggctgatgtggtagatcttccgggtcgagccgggcttatggtcggccgccggaaaatgaccgaaggtccagtcgcacgtgccgcaatcggccgtgtgggtggtcatggtcgaaccgtccgtcgaggcggctttcccgaccatgatgaccgtgcaggcctcgttgtcggggccgagggtcgtgtcgagaccggagtcgttcttttcggagaaaacgaggaggccggcgccggcgaaagcggcggcggccagcaggccgatgaccggccggagtcttttaaacgtcatgacgctccttccttgattattcttcgtggacggatccggcgacggcttcggccgggtcgtgaaaccaggctccggcgcctttttgaacgatatcggcgtagcgggggaagccgctcacccggatcgcttgctcggggaatttcttggaatactggcggaggagttccaggaggacggacgcgtgctgaccgatccgcttgtccagcggccagccgttttcatcataagggacgaacagctttttgctcgcggccagcttcaagaggaagggatccttgccgtcgagcatgagcttgacggtcttgggcccggtcggctggtcgagaaaaggaatcggggcctcgagcaggaacggcagggcgtcgctgtaatcgccgatctcccggtgggacagcccgcggaaattctgcggcgacggctcgacgtggttgtcgaacccctccacggccttgaccgtcatcgagaccatcgtcgcgatcctggccgctttttccggggcgacgatgcagttggtgaccgggaacatggtttcggcgccgtggaggtcgaccgccaggccgaccttgttcttccggatcaattccatggccgcgtacgtcacccgttccatgaggaggccgttgggccgtccgggccaggtccggttggtgttccggatgtccaggaacgacaagagctgcttttcggggtagtggatgtacacgtccgggtcgggccactggtcgagcggggaggcgtcgcggttgcccatccggaaccgcttctccccccagggcgtggggatgtcgaaatacaggggatacccgtcgccgggccgggtttcgcggctggcgctgacattgagcgtcgggatgacatacagcgtccctttctcgacggtcgcgttttcgatgaggatcatcgcggcgatgatgccggccggctcgttgggatgggttccggccatgaaaagggccgctccccccggctcccggccctcgaggacgtagacgttcgtgtcgccggcggttcccttgagcgaagggaggaagtcgctcaggcggaggacccgggtgaccccggggccggccacgaccggcgtgcggaaccggtggtgcttggagagagggattccgccggcgatgaggagggcggcaaaaagggcgcccagggcgatcttgaggattttttcgtttttcatggcgggacccttatttcacccggagaaggcggagaacgagcggggtcaagacaagcagggtgaggatgagatgggaaacgctttttttctcccggacgaaattccagcccaggatgaagacgaggtaagcggtgatgaggtaataaaaaatcatgatgatgttcatggcggcctcctcacatgctccagcggactaggaattcgagcttggcgctgaagacgaccatcaggacgctgacgatggtgatcaccacccaggggatccaggtctgcgtcaggaacgatccgtacgagcccttgtagcccgaaaccatcatgctcaggcgtccgatcaaagccgtcggggggagcgcgtcgcccagggcccagaggaagctcagaccggcgatgacgaccgtggcgtgcaggccgatggagtccaggaaccagatcaggggaatgcccaggatcaccgccccaccgtaggtcaggacgccctcggagaaggggatgatgacggccaggaggatgtacagtaggataagcggcgtgctgatgaccgcgaacgaaagaaatccccgcactccggaggcggtcatgatctgctggagcatgcccacgacgaccgtggtcgccagcaggggcagcagccggatcatcgtctttcgggagagggccaggaagtcgatcctcttcgggctgaccagcagggcgacgagggccgaggccgtgaactgcagcggcaggccgatgaccggcgtctcgaacggccagatccgggagacggcgatgaacccgaagaagacgaggaacgggagaaggacgcgccatcccgtcattttcgccgggacttcaggcagggcggccagggcggcttgcttgtcggacacgccgacccgtttcagccccagggtcagcatggtgatggttccgagaaccaggacggggatgccgagaacataggtgaagccgacatacgggatggccgtcccggcgcaaagcatcatcgcccagatgttgacgggcggggcgacggccgcgaggccggcgacgatgaagagaatggccgcgacccggcgctcggtgatgccgagatgcttgagagccagggccaccggggcgccgacgacgagcagcgacaccgaccccgcgcccgtgagagcgccggggatcaggacgatgatcatcaggacgagcagggccaggacccggacgttgtagaagagccggatggtccctcggacgacgtaggcgacgccgcccgattcctcgacgacggccatgaagatcgtggccgtcgagaagaccagcatcacgtcgagataggggaaggcgccctcgacgaggtgacgggggagttccaggagaggaggagttttcaccacggcgccggcgaggccgccggccaccgcggtcagaaaaatgcagatttccaccgggagctttttccagtgggcggcggcgtaagcgccgatcatcgcgagcagaatgaggacgatttgaaaaatcatctcgcggctccttccgccgtcgggcggttgagatcctgaattcagtcgagcttgaagatatatcccatgcccagcgggaatgtcaatcgaatgcggtcggcgggtcttccggccgttccttttcgattcgttccagcagggcccggacttcggcttggccggaagcgaggcggagggaggcgttgagggcttcccgggcttcggcttttttcccggtccggtaatagcacccgcccaaggcgttgagcacccgcgtgtcgcctccatagagcttccgggcttcgagaagattcgccagggcttcttcccacgcgcccttttcctcgagggcgaggcccttgatcaggaaataatcgaaccggaagttggacgaggcggcgaagagctcgacgatttcgagcgcctcggtgttgttcccggcccggacgaggaaattcgcgaatcgaaacatcccttcctcgaactccggatggtcccgctggatcttccggtaggcctcctcggctcgggccgcgtcgccggattggtcgtattgaacggccaggccgtaatcgaagagaaacgcccggctctccggcaccgtgctgtgcagaatgacggcccgggggacttcggccacgggggagaggatgaagttggcttccgtcgcggcgagaacccggccggcggcgttcttgagggagaaggtcagctcataatagtcgggccggaggtcgacggcgggcgtttcgccggtgatcgtcagcgtcgggctgtattcggtttcggacagcttgatcgtccggagggtgaccggtttgcctccgctcatggtcccggcggccgcgacgtcgaccgtcccgccggcccacaggtcgggcggcaggcggaggacggaaaggccgtagaccagcgtgtcggcccggttgatggtcgccctcggatcggtcaggatccggcggccggcgagcttgtagggggcgtaatccggctcgggcgcttcttggagaccgtagccgatgaagggctcggtcagttcggccgggccggtttcgaccgggacgtcaaggctcttttcgaagagcgaaaactcctttccgacggcgttctggagaaggacggtcagcttgaacttgccttgggcgacggggacgatatcctggacggcgattccgttcttgcggacgttctcgacttgcccggccggaaatcggaagggatagtcccggacatattggaacacggtcgtctcgccgcttttcaagccgacggtgagcttgaaatcgcacccgtactggtcggaggacgggtcgtaatcgaaggacgaatgccggggcagaatggcgaaatggaggaaggtcatcccccgcccgccgtcgcggacgaggctggccgaggcgtcgctttcgatgaaattcgccaggtattcggggccgacgattccccggtagttgaggaagtggttgacgtacgccgtgctgatcccccgcttcgccgaggcgaaaatgtcggcgatgatcatcgtgttctggggggtgggccggtaattggagggcatctggttggggacgatggtcagggcggcccgggcgagcggcggggcgatgtccttgatcttttgaaagacctcgatgggattgttccggttgaattggcgggtgtcgaccaggagactggccgggccgtcggagatcggatcgtacagacggaattcgccgccgccgccgcgctggaaaaaaaccaagtcgaatgcctgcggcagctttttgagcgggtccccgatataatgccagatcgtggccgggtgcagccccgacgtcccctcgtaggtgtccttggactggggcgggccgagaatcatgtagatccgcccctggtccgtctgccaggcctcgcggagagccaaccggccgaagttctccatgacgaaccggaagcgcttctcgatctcctcccggaattcgttccggggcgtgtccggacggggatcccgctgcttccaaaatgcttccatgaacatgtcccggtcgcgttcgttcgtcaaggagaggaaggcttccttttcggccgggagaatgaaggtgtcggtgatcttgagccattcccgatgccggaggagaaggtcttgtccctcgccggcgccctgggccgcgggcgcctgggcggcccaagcgccgccgaagacgaggacgagaagcaaaaggaaaccgggaaatccggaagtctttcggatggtcgcggtcatgactgaacatccctgtcgttcaaatcgcggcgcgcggccgcgcgtcgccgccggctttggattgtagcatcctccccggaggaatgccaaggacgcgggcttgggccgggagacgtcttcctcgaaaggatggagggaaccggcgaggcggattttcccgccgggcggccgaagttgcattttcggccgagtttcattataaataggcgctttcaattccgtcaggaaaagaggatccttgactccacgcctcggcccgcatcaacccattccccaggacgataagcgcacgatcaaaggctgggtccggtacgactgggccaactcggtctaccagttgaccatctcctcggccatcttccccatctactacaaccaggtgacccgtcacggcgacgatttcaccgtccatttcttcggcctcccggtcatcaacaccgtcctctattcctgggccatcgccgcggcgtacctcctggtcgccttcctttcgccctttctctcctcgatcgccgattacaccggcctgcggaagggattcatgaagggattcacgattctgggcgcggcttcttgctcggctctgttctttttcgactcgaatacgatcgagctcggggtcatctgcttcgccctgggcacggtcggctacgggggcagcctcgtcttttacaactccttcttgccgatcatcgcctcgccggctgaacaggacaaggtcagcgcccggggatacatctccgggtatctgggcggcgtcgttctcctgatcgtcaacctgatcgtcgtgatgcagccggccttttttggaatcaccgatccgaagctcccggccaagctggccttcctttcggtcgggctgtggtggttcggcttttcccagaccacgttccggcggctgccgaagtatacgttcggccaccgggagacgggaacgagcgtcatcctgggcggctaccggcagctgcggatcgtattccgccaaatccgtcggatgccccggctccgcatttttctcccggcctactttttcatcaccatggggctgctgacggtcatgttcatggccgcgacctacggcgaaaaagcgctccgtttgggtgaaaccgtcctgatcgcgacgatcctcctcatccagctgatcggcatgctgggggcctggctgttcgcccggctttcgggccgggtcggcaacatcaaggctttccgcctgacggtctatatttggatagggatttgcgtcgccgcctacttcatcaccgacgccgtcgggttcctctgcgtcgggatcgccgtcggcctggtcatgggcggctcgcaatcgctggcccggtcaacgtattccaagatgctgccgccgaccgaggaccacacctcgttcttcagcttcttcgacgtgatggagaagctggccacggtggccggcaccttcagcttcggaatcatcgaggctctgacgggcaatatgcgcaactcggtcctggccatcaccctgttcttcgctgtcggcttggcttttcttttccggctgatggtcgttgaacgccggccggcggccgcggaatcctgaagaaaccggcctcagaggaagacaccatccctcttcacctcatttctccctccgctcccgtgaatgaaaggagttccgggcacaaggggaaatcgggtgaatcgggatggtgtctcctctttgtttacagctctttgaggtagatgttccggaagtacggcggcgagtcgctgtcgtggttctggaggccgatgtacccctccggggagatgtcccggaccttgcccccgggcgcggcctcccaatccaaaacctgtttttcgttgatccagacgttcaggcgcgagccccggaattccactttcatgtggttccaccggcccggcgggagcgtcgcgccggtcaaaggcgcctggatgtcgtaggccgccccggtgtgatggaggccggtcgaatggtcgtcgatctggatttcgatcgaatgataaatgtagtcgtcgctgaccgggacgttggggacgcggaggaaaattcccgagttcgtcgtttccgcggcgcatttgaattccaggtcgaggatgaaatccttgaccttttttccgtaccagagaaggcccatgcccccctggcccttcaggacgccggctttcggatcgacctcgaaatgccccgggccgtaatgattccagccgtgcttttcgtagtcgccgccccagccgcggcggaagatctgcgtgtagccgtcgtaatacgtgatgctcttcacgtagtcgatgcttttccggaaggccggcatcgggtcgtcgacctcggcttcattctcgtattccatcgtcagccagccgtcataatcctggagggtcagctcggccaggagatcgcggatggttcccgcgccggcgccccaggcgacgtcgtcgacgcccggccccgtcccgaagccgttccggtccttcaggtggacgtcgagaatccggccctcgaggagcttgaacgcctcccgcgggtcgatcatcccccgcatccagtggccgttgtcggcgcaggagccgatgcggggatccttgccgtcgacgtgccggaaaaccgtctcgggcaagtggtacttggacggagcggggtggttgtggatggcgatcttgatgtcgtattcggcgaccagcttttccagcagggtgaaatcgtcgtcctccggctcgcagacgaggatccggacgcccatcgtccgggcgaagtcgaagaccttgcgcatctccgcttcggtccggccgatatcgactacgccgtagccgtagagggtcacgccggcggccgccaggacgtccttcgttttcgcgatctgctcgggcgtcatggcctcgccgaagcgcgccccggggaattccgcggccagggcctggcccggaaaagcctcgaggccgcggacgccgagctccttgagcttggccacggtttcgaagaaggtgaatttccggaacgtccaggcctccgaggcgaaggggaagttcttgatgcggacggacgcatagtccgtctcgccgaccttcttttggagctcgggggagaggtgccggatgtcggccgcgcccggcgcgacggcggccgccagcagaagggcaagcggaacggcgatgtttttcatggatcctcccgtttgatggacttcacttctttatcggattccacgttcccttggccacggccgggacgaacgtgcccaggcccttgggcgggaaaggaacggtcttgcccgtttcggcgctcatgtaggcggccatcaggagctcggccacggccgcgccgtcggcgaaattttcctccgggcggacgccgcggcggaacgactggaccatgtggcggttctcgtgcgtgtagccgtactcggccgcctcgtcggccacgaccggcatgaggccgatctccgcgttctgcttttcgacgaggtcctcgccggccttgccccggacctcccggctgaagaagaccttcagggcgccgtcgagcgtgttgatctggagggcgtactcggggccgagcagctccatgctgagccggaggcccgctccgacgtagcaccagctcgtcgtcgtctcgacgacgaggatcttgccgtccttgttccggaactcgaccagggaccgggcgaaatcctcggccgggcggttgaggtaatcggtctttccgccgctgtttttcttcaagacggcggcgtatttcggctcctgccacttgaggcaattcgtgtaggccgtgaccgagacgggcgtcaggacgtcgcgcggcgcccccggcggcgtcagcatgaagcgggcttcctcgaccgagtggcacatcatgtcgttgagcactccgccgccctggagcgttccttcccagaaccaaggcatgtgcgggccgctgtgctcctcggccgcccgagccaggtagggcgggccggcgatggccgcgccccgggcccacaggatctccttgccgcgggtgacggcgggggagaagacctggttttcgagataaccgtccaggatcccggctttttcgacgagggcgagcatccggcgggcttccttggcgttgcggccaagcggtttttcgcaggccacgccccgcagctcggctttgcccgaaaggacggcgtgggcgatttcctccatgacttcgaggcgggtgaagttgggggcgcagatccagagggcgccgatggccggatcagcggccatggccgtgatcgaggcgtacggcttggcttcgccgacgccgagggagcgggccagggcgcaggcctcgcgggcccgtttccggtcgggatcgaaaacgccgaggatgtcggcgtcgcggacgccgacgaagctcttgatgtggaagcgggcgatgaacccgccgccgatgatgccgacgccgaggttgggtttagctgaatgatgcgacatggggagatctcctttcgtttataatgccgtcggcccggggattttcccggccgcttttttatcccggaagaaggcctggatcatctccgggcagaggacggcccgagccttcaaaacgagaaacgtcttggccgcgtcgatggtcggggcggcttcgccggcggaccgtccgccgatcaacggcgggatgatcatcgccggggggaagcagggcgaaagaaaggcccggcccggcgccggagaagcggggatcgctccgaagacaagccgggagcattggagcccgcgagccccggacggcgcaggggaggaacatcatgacgccgagacggagttttgcgctcatgcgagaaaaccaaagtcctttcgtgggaaatcgaatgcccgcgcggcctccgctaaaataatccgaaccggccgccgtgtcaatcaatgaggagacacaatgcctaatcaccatgttgattatctcttcgctttgcccgatccgttccctcgttcccgccgccgatcttccgaaacggggacaatggggcttgcgtttccccttgtttgaaataaggttaacaggtattgtgtctcctgatttcctttggtagggtaaaaagaggagggagaacgtgaagatgagaaaacgagcgattcgggcgttggctgtgtcgctggcggtcatcggggcggtttctctccatcctccccgggccgcggccaaggatttctatttccccgaggtccggatcgacatcgcggtcgaggccgacgggagcttcacggtcgacgaaaaccggacgtatgccttcgacggcgaattttcctgggccaccctctggatccccctccgggtcgagcggatgggccggacgtacgaagctgaaatcgaggatttcgcggttttcgaggacggaacgccccttcggactgaacaagggggctcgcgggaccgcttggaggccaagtggtactatcgggcccgggacgaacggaaaacgttttctattcattaccgggtccggggcggcatccgcacgtccggcgaggcgaccgagctttactggcagccgatcgggagcggctgggacaaaccggcctccctggcggtcgtcacggtctccctgcccgagcctgtctccggcgcgtccgagctcctcgtctacggccacggcccgctttcgggacgttccgagatcgtcgaccttcagacggcccggttcaccgtcccgaaccttccggccgggcggatggtcgagatccggatggtctggccggcggggatcgtctccggccttccggacgcgggcctgacgttcgcttccgtccgggccgaggaggagcggttcgtcgacgagacgatcgcccgggcctcggccgcccaagccgaggcggcccgccggacgagacggaccgaacgtctcgtccaagcttatcttttcggcctcatcgccctcccgatcctctggctccctttctttatgaggacttggcgggccgtcggcaaagattacgcgttcacggacatcccggactattttcgggaaatcccctccgatctgcctccggccctcgtcgacctcctccagagggaggggatctcggtgacgccggcggccttcacgtcgacgatcttcgacttggcccggcgcggcttcctcgagatcgaggaccggaccgaggaaaaatccggcttcttcggaaccaagcaaaagaccgtcacccgtttcacgttcaagaaggaattcggaggggaagacgacggcctgcggccgttcgagcgcgacatcctcggtttcctggcggcggccgcgggcggagccgtcgacaacaccggggccgccgccttggccgcggctttgggaagcgcggccaaagccctcgagcgcttccgccgcgcgcggggcggcgccgtttcgccgccccttccggtcgatccgggcctcacctcgcccgtttcccccgcggggacggttttttcccttgatgagctgaaatcctggttgaaaaagaatccggccaagtttcaagcctggtttcgggcttggggcgaggcggtcaaggcggaaggaaaagcactcgctttcatcgagcccgaaagcctcaagcgccggaaccggttcatcgccgcgaccgttccggcggccgtcctgacggtcaatcccgtcctcggcgtcctgggcgcggtcctcatcccgaagatcaagcggcgctcgctccgatgggccagggaaaacgaaatgtggaaggcgctccgccggttcctcgacgatttctccgagttcaaggaaacgccgccggaggcctaccggctgtgggaacaatacctggtcttcggcattcttttcggcaacgcgaaaaaaatcttgaaatccctgccgctcatcctgggcgacgagcgggcggcggtgcccgcctggtacgccggggcctcccggcaggcgttcctgtccggaggagggatcggctcgatcgcctcgatggtccgatccatcgagagcgcggcgacgtccatccagcaggccagcacggcggccgcccattattcctcgggcggcggcggaggattcagcggcgggggagggggcggcggcggaggaggcggaggaagcgccggctgaacttttccttcttcgtttccgtagataatcatggaaaggacaacggccatgagcgaaaacacgaacccgaaaaccaagacgagaacggaggaattcaaagcctccgggggcgacatcctgaacaagatcaaggaactgctccacgaggggaatatccgccggatcatcctcaaggacgagcagggcaagacgttcatggagatcccgctgacggtgggtctcgtcggcgtcgctctgcttcccgtcctcgcggccatcgggacggtcgcggccctggtttccaacttgacgatcgtcgtcgaaaaagtcgaggattaagcggcctttttccctccgggccggcccgccggggccgtgttttgcatcccgccgggagaatggatacaatgcgggcatgcgcccgcctcgaatcatcccccggtttttcatcctgtccctgatcggcgtcgcggcgacgcacgccgccgccgagcatcgcttcctcaacctgatgccccggccctcggccgtccttttaaccgaaggccggttccatctgagcgagacgttcaccgtcggagcgctcggccggcccggcgaccgcgcccgccgggcggccgaccggttcctggagcggctcagcggacggacggggctcgtcctccgaaaagaggttcccctcccggaaggaggggaaagcggggcggccctgcttttttcctgcgagcggaccggcgagctcctgcccggcgaggatgagtcctaccgtctgaccgtggggcctgaccggattctcctggtcgctccgacggatctggggattctccacgggttcgagacggcccttcaattgctcgcctcagggccggatggatattttttcccttgcgtccaaatcgaggacggcccccgtttcccctggcgcgggcttttgatcgacagcgcccgtcattttcacccggtcgatgtgatcaagcggaacctcgacggcctggccgcggtcaagatgaacgtcctccactggcatttgacggaggaccagggattccgggttgaaagcaaggtcttccccgctctccaccggctcggctcggacgggcttttttactcccaggaccagatccgggacatcatcgcctacgccgcggaccgcggcatccgggtgatgccggaattcgatcttccggggcattcgacgagctggttcccggcttttcccgagctggccagcgcgcccggcccctaccggatttcccggacctacggcgttcaactgcccgctttcaacccggccaattcccaggtctacgtcttcctcgacgcgttcttaggggagatggccgggctgttccccgatccttatattcacatcgggggggacgaaaacaacggcaagcactgggacgccaatcccgaaatccaggcgttcatgaaggagaagggcttggccgacaacgccgccctccaggcctatttcaacggccggctgttcgagatcctggccaagcacggccggaaaatggtcggctgggacgagatctttcagccggagctgtccaaggatgtcgtcatccaatcctggcgggggaccgaagccctcgtccaggccgcccggcggggatacgccggcttgctctccaacggctattacgtcgatctctgttattccgcggccgatcactacctgaacgaccctcttccccccggacacggcctttcggaggccgaggcggccctcgtcctgggcggggaggcgacgatgtggagcgagctggtctcgcccgagacgatcgattcgcgcatctggccgcggacggcggccatcgccgaacggctctggtcgccggccgacacccgcgacgtggacgacatgtaccggcggctggaacctctttcgatccaactggaagaactgggcttgacccatcttaaaaataaagacatgctgctccggcgtctcgtccggaacatggaggtcggaccgctccggctgctggccgacgccgtcgagccgctcaagggctacaagcgccatacggtgggcaaggtccagacgacgctggccccgctcacacggttcgtcgatgccgttccgccggaatccctgaccgcccgccatttcagccggatcgcggccgcgttcctcgaccggcgcgacgccggatcggcggaagcgctccggacgatgctggagacctggcggatgaatcacgatttgatcgtgccgctcctgccctcttctcccgtcctcaaggaaatcgagccgctgtcccgcgggttggcggagacggcgcatgtcggcctggaggcgatcgaggccctggtccgcaagcacaagatccgtcattcgcagtcggccgaatggcaggccgcgctggccgaatggaaaaagccgctggccgagctcgagctggccattctcccggcggtcgaaaagctggtcgcggctgttcccatcaggtgaggccggcccggatcttttccggatcccggccgtggatcgaacgcccccgggcgaacggagaggagggatgataaaccaccgccttctatcatcacggcgccggatcgcggcggccgcggcctttttcgtcgttgccgtcggcggcccggcccttttcctttttccgcagaaaacggaaaaaccggtccttcacggccgccattgggcggccgtcaccggcaagccgatggccgccacggccggggcgatgatcttccagaagggcggaaacgcggtggacgcggcctgcgccatgctcggggccgtctgcacgatgtgggacgtcctcagctggggcggcgaaacgcaggccctgatctaccatccggttcaaaaaaaggtcatcgccgtcaatgccctcggggcggctccggcgggggctgtggccgcgtacttccgggatcgtgggatgcgccatccgccggcgaccggaccgctcgcggccgtcacgcccggtactcccggcgggctgatgacaatgctggccgagttcgggacgatgagtctggaggaggtgcttgccccggccatgagcctggccgagggctatcccatggaaaaaggcacggccgactcgatcgagcgggagaaggacaagatcaaggcctggccgtacgcccgggcggtgatgctgccgcacgccggccggaaccgggaagggccggttccgggcgagatcttccgccaggacgacctcctcgaaacgctcggcaagcttgtccaggccgaaaaggacgcccgggccgcgggccggagccgcaaggaggcgatctacgccgcctatgaccgtttctacaagggcgacatcggacgggaattcgtccgcggagccaacgagcagggcgccttgttcggagaggacgacctggcccgctggcgcgtttacctcgaggaacccgtcaagacgacttacaaggggctggaggtctataagctcaacacctgggtccaggggccggtcctgctccaggctctgaacatgctcgaaaacatcgacctgaaaaagctgggatacaactcggccgcatacatccacaccatctgccaggtgatgaacctggccttcgccgaccgcgatttttattacggcgatccctattatccgcccgcggagccgctggccgggcttctctccaaggactacgcccgggagcggctgcggcttctcaacccggagaggaacgatcccgggatcaagcccggagacccctatccgttccaggggcaggtcaatcctttccggaaaatcctggaagcctggcctccggccgatgagccgactctgaataaagatcccgatccggcaagcttcgcgaccgggacgacgtccatccaggccgccgacgcggacggctgggtcgtctcggtcacgccgagcggcggctggatcccggcggtcatcgccggccggacggggatcggcctcagccagcgggcccagagcttcgtcgtcgacgagaacgagaatccgtacaacgtcatcgttcccggcaagcggccccgctcgacgctgacgcccgggctcgtcctgaaggacggccttccctatctttcctgcgccgtccagggcggggacacccaggatcagaatcttctccagtttttcctggaaatggtcgaattcggaatgaatgtccagcaggcctgcgaggcccctcatttcaccagtttccagatgcggaactccttcgatgaccacaaggcgattccggggcggctggaaatcaacgagcaggtgcccgagtacgtccgggccgagctccgggcgatgggttaccgcctggacgtcaagaagtacacgtccgggcccatcaacgcgatctttttcgaccgggagcacgggaccttctggggcggatcgagcaattacggcgacgattacggcgtggtctggtagggcggcgttccgtcagcggaggtagcccagcgaccgaagctcttcctccagcttcttgtcgacgacgagctccctccgtccggtccgctccatggccgccttgagataggcttcggcgacgggcaggagctcccggacgacggcggctttgcggttggcgaggttgtttttttccattggatcggccgccaagtcatacaattcgatcgggatcctctccggcggggggggagtaaagtattcgcggaatcccggcaggaattcgccgttgaggacgagcttgtacggccgccggaggaccgcgacccggctcggaaagtcataaacgaatcccgccggaaggaagcttgtcagcatccgcccggggagtttttctcccttgaaaaggggacaaaggcttaccccgtcgaatccggatggaggagcagccacgcccgcctcggccaggatggtggggaccaggtcgatgagcccgacgtcttcgtggacgcgccgccccgcctcgcgcgaccgcggaagcttgatcaccaagggcacgcggatcagctcgttgtacagcgtatgaccgtgctcccaggcgccgtgatcgaaaaattcctccccgtggtcggccgcgaggataatcaaggcgttctcgtataggcccagccttttcaagtcctcgaccagcgggccgatcaagtaccggtcgacggtccggatttccacgtcgtagagagccgtcatgttctcgcgttcccgcggagtcaaggaccggaacaaatgggggaatccgatgccgagcacatcctgaagggataccctcttccagggcatatcgtcccggagaaagaaagcccgttcgggaaattccggggagcggtagggattgtgcggctgataagcatggagaaacaggaaaaatttcgaggccttgcgggcttccagccatagggcggcgttccggcggacgttggcggcggaattgaggagttgattgcctccggcccgctcattgtacaggccgaatcccttggcgaagccgtatttggcgttgagctggcctccgccggtgaaggccgcggtttcatatccggcccggcggaggatttccgcgatcgtcggaacggcggggggtatcccatcggccatgtaaagagtttggtggcgggccggattcaaacccgtcagcatcgtcgcatgagaagccaacgtatacggcgccccgctgaaacaggaggtgaacaggacgccgtcgccggccaagcgttcggccgccgggctcgtcggaaggcgatagccgtacaagctgagatggtcggcccgcagggtgtcgatcgaaatcaggatgatattgggcggcgcgtccgccgctttccccgcttcccgtctcgggacgaggaggggatcgatccagaaggccaagccgtttttttcggaaaacgcccgggcgtctttcggttcgagaacctccgccgcgcgggttcgaaaaacgatcgtgacggttttccccacccaggctgaaagatcgatttcgcggaaggcggcttgatggaggttttgcgcgccgtcgagattcagcggttcctcgaaaatttcggccggatggggactctcctccagcttgatttcaaaaaccgtatcttccgcaccatcttgctttttctcggcatagagcccgcatccgaaccgaagaacgctttggggaggaatcctgaggcggtaccggaattcggtgggaggagcggccagcaggaccggaacgacgtttggaccgagaacgagcgttttctccagggaccagggatttttcccgaaggaaggatcgaggaccacggcggtggtcagcatggattccggccattcccggccggttgccttcgaatcggccggaggggaggccgtcttcagcggcgaggcggcgacgttttcctcggtcagccggtcgatgaacagaaacggagcctccgcccgtttgcagccgaaggcgaaaagaagcggaagggcaagcagcggcgcgaggaggggaagacgcaagccgacgttcgaaaatctatgactcatcgtccccctcgtcatttttaactctgtcttggacaggctcgttttctttctcttgtcccttcgactatcgaaaaagccggccggttcattcagacgaggaaattctagcggggatcttccgtgctttcaagtccatgacccgttccgcccggccggaagaacccccgtccctctgatttgtcgaagggtttccgcctctctttcgggggaaccgcccggggaggcgattcccccggattgtccggcgttgatccgggccgtcaatctccgatttttacgatccgtcccggagtccagggcgcccggtgctcctccaggattttttccagggcgggaatgtccacggttttgagcgcctcgagctttcggatcacggtctccagctcctcccgggccgcccggtagttttcgacctgggttttgcccggcgaggaggtcgtggagaactggatgccgatcagttcctcgacgcggttgcggatgggcatcggggccgggggaacctcctcgaagctggctttggcttcgtagccgtccagggccaggcggatctcatcgagcgttttcccggcctggcgaatcgccggcatcaggccgtcgggggcgcccggcatcccggccgcggtccggcggatccggaggaggcgggcggccaggactccggtttcctcgtccgcgccgtaagccgcgcgggtcagctcggccacgtcattctggaaggcgacgagcccggcccggtcggcggcggcgagggtgacgccggccagaggagtgacggtgaaggactgggtttctccgagcggcgtgacgacgctgtcgacgaccttggccgcggagaccgtgtagcgcccgggcatgaccatgaagccggacggatccttcccgaacggatcgaaagatccgctttcccgggccggtacgggcagggggtagctgagatcccagacgatccggttaacgcccgcggcgggagcggcccggaggatccggacgggccgcccggattcgtcggcgacggtgaaccggaggtaaggcttgtgctcctccgcttcccggcgctgttcgtccagcgaggggatgggaatgcgctcgcccttgtcaaaaagctctttgtcgcgcttctgccggatttccttccgggtcagcgggctttccttgaggaaatacgtgaaaaccgctccgtattccgggttgggggcgaggaagtaggtcgccccctggccgtatttcgcggacgtccggatgaaggacacggcgtccttgacggggaagagccggaattcgttccgaacgtcgtccgccttgatgtgccgcagcggcgtgtagtcgtccaggacgtagatgccccggccgaacgttccggccaccaggtcgttttcccgccgctggatggccagatccttgacgctgatcgccggcaggcctgttttgagggcgaaccattcctttccgccggtgaccgtggcgtagacgccgaactcggtcccgcagaacagaaggtcgggattgacgtgatcctggatgatcgtgtgcacgccgccgttgtccggcaggccggaggcgatcgggatccaggtccggcccttgtccgcgctcttgagaagatagggtttaaaatcgtcgttgagggtgttgttgaaagcggcgtagacgacgttttcgtcgaacatcgaagggcagatgtcgctcacatacgtcagggcgggaacgccggggaaccggtcgaccttccgccacgcgccacctccgttctcggtgatttgaatgagaccgtcgtccgtcccggcgaaaagcagcccgtccttgaggggcgattcggccagcgagacgatcaagccgtattgcgaggtcgagacgtccttggccacggcgtcgacgctccagtacttgcccatgaccgggatcgagttccggtcgatcccggcggtcaagtcgcccgagatctcccgccaggagtcgccccggtcgtcggaccggaaaaccctctcggccgcgatataaaggcgggtgggggagtgaggcgaaaggaggaagggcgtgtcccagaaccagcggaacgtcggctggcctttggccggctggggcttgatggaaaagctttccccgctccggcggtcgaagcggacgatgttgccgtactgccattcggagtaaacgatgttcgtgtccgtcggatcgacctgggagacgaagccgtccccgccgaccgtgaagaaccactcgtcgctcgtgacgccgtcggcgctggtgttccgcgaggggccgcccatgctgttgttatcctgggtcccgccgtaaatataatagaagggccgcgaatcgtccgcggtcacccggtaaaactgaggcaccgggaggttcgtcacgaaccggtatttcgccccgccgtcgtaggtctcgtagatccctccgtccccgccgatgaggaaatgggcggtgtcccgcgggtcgatccagagggcgtggtcgtcgacgtggcgggcgtccaggcccaggggcgtccaggtgcgtccgccgtcgcggctgacccgggagacggtctccgtggaatagaccgtgtcgacgtccttcgggtcgcagacgatttcgttgtagtactgccccgaggaatgataggagctcattttcgtccaggattcgccgcggtcggtcgagcggaagaaaccgcccgcgtccccggccgcctcgatgatggcgtagatgacgtcgggatcggcgggggagagggccagcccgatccctcccatgggggcggaaggcagcccggacgtgattttccgccaggtcttgccgccgtccgtcgttttataaaacgccgtttccgggccgccgccgatcttggtgaaaacgtgccggcggcgttgttccgaggtgacgaggagaacgtcgggatcgcgcggatccatgaccgcggcgttgacgccggtgttctcgctgatcgacagcaccttggcccaggtcttcccgccgtcggccgtcttgtagagaccgcggtcgccgccgggaccccaggccgagccttcggccgcgacatagaccgtgtcgggattcttgggatggatgaggatgaccccgatctgccgggagttcttcaggcccatgtgtgtccacgacttgccgccgtcgacggtcttgtacacgccgtcgccgtagccgagggcccgctggtggttgttttcgcccgttccggcccaaacgacgttgggattggccgggtccatggccagacagccgatggcgtacgcgccgtaattgtcgaacaccggagtccaggtgatgccggcgttgtcagtcttccagatgtggccgctggccacgccgacgaagtattgcttgggattgccgggattgacggcgaaatcggcgatgcggccggacgtgtgggccgggccgatcgaacgccaagccaggccggcgaacgttccggcgccgattccctccgttttcttccccgggtccttcgcggcggtttgatcggccgcgaggagggggagcgtgatcaggattgcggcgaaagcgcaggcgagcgtttttttcatccgagcctccttggatcggcggaatcgaagggaagaatcgtaacccgggtccgggttcctgtcaatgaaacgaatcgcgccatctaaaatcttaccctcctctctttgcctgaggaggccggaggatggatcttcacagccggagggaactcatggaatccatgtccaaacgatatcgtcaagcctcaagagcttcaaatatgcctcctgccatgatcgcgacatcggatttccccgaagccggccctgcaagaaatacgataatgcccagatcgtgcagaaaaaatggttatgatctctcaacgatcttcggccgcgataaggtttttggagagcaagacaatgccctcttgagtaagattttaatatagcttgacaggcctcgcccgatcaaatattctcatttccgagggggtggatagaatttcgcgataagacaaagctcgcggcttcgaccggttgaaagacgaaattcctatcctttggttgcgttatttcggccaagaataattaatgctcaattagatttattttcatgaagaagcgccggaagaaacagcttatctcccgtggcttcgccgcatcgttgccttcaattttagaaatcgaatcctgcacccggtgcaacatccatcctccgtgtgtcatgtgctatccccggctgtttgacaaaagaggcttctctggcgatatctgcgacgcggccgtccaaaagctcctaccctatatgcggggatttaagacaatctctttgcatggcgtaggagaaccgttgctcgggaaaaagctcctcgctctcctcgacaagacggatccggacaagacgtgggttcaattcgattcaaacggcctgctcctgaccgaggaaatgagccggatccttatctccaaaaaactcaatatgatcgacttttctcttgacgcggcgacccgcgaaacctaccggaagatccggcgatcggatttcgatctcgtcatcggaaatatcaagcggttgtcgatgatgaaacaggcgtcgggagtctcccgtccgaagatcaaggtcaacatgacattgatgagggaaaacgccgcggagatcgtcgccttcgtcgatctggccggggaattgggagccgagatcattcacctcggcctcctgaatccgacgaaagattacgaggtacggaacggggatttcgttttccgctatcacgatcaaatgatcgatgtcaaagagccggaattccgggaagccgtcgagacggcccggctgaaggctcgtagccgtggaatcgagttcgtcgccgaattttccggatattatcaatgagaaaaaccgcttccccctgccgcaagccctgggaaaatattctcgtcgaggtgaacggagactgctatttctgttgtttcatcatccggccgggcgggaagatcgggaatctcgccaaaaatgatttcgaggacatctggaacagccggaaagcccgccgcattcgaagggcgatcgcccgcggcgtcattccttattgttgccagatctgcccgtatcacggccggttcgagcacgaaaagagccgggtctacagggcgtattttttcgggcggaaaattatggacgcggtgattgattatgcccagggcggatttactcaaaatcgattgcgccggttcgttaaaatcacgcggggacgaaataattgaaaaaacagcctcaagcctgtcctcgggaggacggcctgctgaatataatcgaaccagatcgttcccaaggtcatcctccggctccggttcccggcgattcggaaaaaggccggcgctttcccggagccctcggcggctcctgaaaaatccgggccgccggcgacttccggaagtctcttcagatgacagcctgtcctccggagaggacgtccggctccgtttttcttcggtttcccgccgggaccgggcttggcatgattcttgataacttatccatagggcaacgtttaggccggaaaaccggtttgacaattcgttagccgtaagcgaagatgaaatggcgcgaaagaaggtcgcgaagaaggagttcccatgaaatcctcaaccggagaacataagccgtcgggcgtccgttttcgccggatcgttttcctgctgattttcggagcgacggccgtcacggcttcggctcaatatttcggccggaacaaggttcaatacgagaaattcgattaccaggtcctgaccaccgatcattttcagatttactactatccggaggaggaagccgccgtccggacggccgcccgcatggccgagcgctggtacaaccggctggcccggatcttcaaccatgatctcaagggcaagcaagccctcatcatgtacgccagccatccccaattcgagcagacgaccgtcctctccgagctgatcagcgagggcacgggcggcgtgaccgaatcgttcaagcggaggatcatcctgcccttcggagcttccctggacgacacggatcacgtcatcggccacgagctcgtccacgccttccagtacgacatggccttaggaggggaaggccgggccaatccgcagggcggggagggactggcccgaaccccgctgttcctgatcgaaggcgcggccgaatacttttcgatcggcccggaggatcccaacacggccatgtggatgcgggatatgatccggaggaaaaagatcccggccctcaaggacctggaaaattactacaagtatttcccctaccggtacggccaggcggtctatgcctatattggagggcggtggggggaccttgtggccgccaggctgatgcgggatgtggtccgcggctacgactaccggaaagccttcacccgggtcttgggcgtcactccggagcaattctccaaggactggcacgaagcgttgaaagccgaatacggcctgatcgaaaaatccaccgagggcccgctggataaggcccaagtggtggtcaaggggaccgaggatgtgtccctgaattgcgccccggcgatctcgcccgacgggaagcatttcgttttcatctcctcgcgcgacctgttctcgatcgagatgttcctgggggacgccctcaccggaaaaatcacccggaagctgacgaaaacctcgatcgacccccatttccagagcatccagtttatttattcagccgggtcctggagcgcggacgggacgcaattcgccttcggatcggtcatcgccggcaaacccgccctgtcttttctcgacgtcggggggcggcggctcaaggacgacatcgtctttccccatttgggcgagattctcaatccgacgtggtcgcccgacggccggaagatcgctttctccgccttgaccgggggatgttcggatctcttcatctacgacctggaaacccaaacgcttcttaacatgacgtccgatccctacggcgaccttcaaccggcctggtcgcccgacggaaaatggatcgccttcatcaccgagcggttcgcctccgacctctccctggtcggctcgggcggattccacctggctctcctcgatcctgagacgggggagatccgggagctgccggcctttcaagccggcaagcatatctcgccgcagtggtcggccgacgggcggcagctgtatttcgtctccgaccgggacggcgtctccaacctctaccggttggaccggaacacgggccggttctatcagattacgaatctctataccggcgtctccggcatcaccgccctgagccccgccctgacggtcgcctcccaaaccgacgacatcctgtacagcgtctacgacgacggcatctacagcatctaccggatcaacgccggccgggacgcggccgggacgccggtcggcccggaggcggtcgaccgctcctcggcgatcctccctcccaaggcccgggcgggctcggagctgacgggccttctccgcaactcgctgttcggactgccgatggatgactccgcgttcacctccgccccgtacgaatccaagatcaccctggattacatcacgccgccccaggtcggcatcggcatggaccggttcggctcctacgccggcggcggcatcgccatgaccttcagcgacatgctcggccagcacaacgtgacgggcatcgcccagctgtccaaccggctcatcgactcggccgtcatcggcctctacaccaacagcaaaagccggacgaatttcggtttcctgggccagcggatgccgtacagctacgggagatactggatcgattacggcgatatcggcggggagccggcctatttcatcaatgagctcatctaccggcagatctattatcagttgggcggattcgccacgtacccgttcagtccggcccagcgggtcgaattccagggcggctacagctacattcagttctccaactcgctgtaccggacgggatattcctattataccgggcgccgcctctccttcgaggatttcgatctcccggcggccgacgggctccatatgccgttcgtcagcgccgccctggtctatgacacgtctctgttcggggcgaccgcgccgatcatcggccagagctatcgtttcgaagtctccccgacgttcgggacgcttaattacacgaccttgctggccgatttccgcaagtatgtcgttcccttcaagcccttcaccctggccttccgggtccttcactacggccgctacggggccggcagcgccgacgaccgcctctacccgatgtatctcgggtacgggacgcttgtccggggatacgagtacaacagcttcacggccgaggaagtcgatatgaaaagcgggacgttcgactacgaccggctgttcgggtcgcgcatcgccgtggccaacctcgagcttcgtttcccgctgttcggcgttctggggctgggcaaggggtactatggagtcttccccattgatttcatcgcctttttcgacagcgccgtggcttgggacaaggagcacaaggcctggttcctcggcggcgaccgcaagcccctgtccagctacgggatcggcttgcgggcgaacatctttggatatttcatcgtcggctgcgattacgtcaagccgcttgaccgtcccggccaaggctggcatttcgctttcagcttctggcagggattttaaggcttcggaatcgacgcatttctgctaaaatggcttcttcccgatggaggaggccatgcgaaaaacgcttttatccagggccggctcggccgccggactcctgctcgcgatgtcgttggcgctcgcggccgaacggccgcggattcccgaaccgaagatttcctttgatccccggacctatgtctgttaccgggcggccggcccggtgacggtggacggaaacctggacgaagcggtctgggagaaagctccctggaccgagcccttcgtcgacatcgagggcggccggcgtccgaagccgcggtttcggacgatggccaagatgttatgggacgaccggtatttttatatcggggcttacctggaggaaccgaacgtctgggcgacgctcgccgcccacgactcgatcatctaccaggagaatgatttcgaggtcttcatcgatcccgacggcgacacccacgattactacgagctggagatcaacgccctcaacaccgtctgggacctgtttctcgtcaatccctaccgggacggccggccggccaacatccattcctgggagatccccggcctgcagaccggcgtcctggtcaacggaacgttgaacaatccggcggacaaggaccggagctggttcgtcgagatggcccttccctgggccgtgctcaaggaagccgcccagccggcggccgcgcctaagccgggcgaccagtggcgggtcaatttctcccgggtggaataccggacgacgacaaccggcggaacaatcgtcaaggccgtcgatccggccaccgggaatccttatcccgaggacaactgggtttggtcgccgatggggctggtcaacattcactatcccgaattgtggggattcgtccagttttcggaaaaaaccgccggcaaggggaaggaggccttcgtcgcccggcccgaggaaaaagccaagtgggccctgcgccgaatctattaccgggaatgggcttacttcgccgagaaaggcgtgttcacggcggacctgaaggctctcggcttgaccgaaagggagctcaaggtttcgggtttcgtttctccgcctgttctccaggcgaccgagcggcttttcgaggcgtccttcaccaggccggacggcgcggtctggcgcatcgggccggacgggcgcgtccggaaggattcatgaaattcgattttgacgccgtcctggaccggcgggggaccggttctttgaaatgggacttcccggtcctgaagctgaacgcccccggggctcttcccctgtgggtggccgacatggatttcgccgccccgccggccgtttgtgaagccgtcgcccggcgggcggcccacggggcctttggttacccgtccgactcggcgtccgtccgcgaggcggcggccggctggctgcggacgcgcttcggctgggacgttcatccgggggaattctcctacgcgccgggcatcgtcacggccctttacgcctgcgtccgggcgttcaccaagcccggcgacggagtggtcatccagacgcccgtttatccgccgttttttccggcggtcgaagcgtcggggcgatggctggtgcgcaatcccctccgctttgaaaacggccgctggatgatggatttcgacgatctccgccggcgcgtcgacgaccgggtcaaaatgctcctcctctgcagcccccacaacccggtcggccgggtgtggacggaggaggagctgcggcggctggcggagatctgcctggaacggaacctgatcgtcgtatccgacgagatccatggggatctcgtctttcgcggcttccggcacattcccttcgcgaccctcggcccggacatcgccgcccggacgatcactcttatcgctccgagcaagacgttcaacgtcgccggcttggccgcctccctggcggtcgccggggaccgggccctccgcgagggcttccggaaggaattccgggatttcggctgggagcttcccaacgtgttcggattggttgccatggaggccgcttaccgggacggcggcccctggctcgaggcccttctcgtctacctggaggagggggccgacctgctccggaaattcttcgacgagcgcctcgcgcctctccggtttttcaagcccgaggggacctacctgggcttggtggacgggcggggcctcggcctggccccggcgcgatggaaggagttccttctgcgcgaggcgggagtatacttgaacgacggggcgatgttcggcccggagacggaggggttcgcccggcttaatttcgcctgtccgcattccgtcctgcgggaggcggccgggaggatcgggcgggccctgggaggcatccgatgaaaaaagcagcggcggcggcgatcatcctggtttttctcggggcggcctgcgcccgacggtccctgcccggcggcacggtccgggacgccggcttcgatgcggaccggttggcccgggtgtcgaccgtcatccaggaggcgatcgcccggaaggaattgcccggggcggtcctgctggtggcccgcaagggaaaaatcgttcttcatgaggcttacggcgacagccgccggctcccggaccgccggccgatggagaaggacatgattttcgacctggcctcgctcaccaagcccgtggccacggcggcctcggtgatgatcctcgtcgagagcgggcgcctcagcctctgggaccgggtcaaaacatacatcccctccttcgttccgtaccgggattggttcggtaaaaacggcgaggacgcccggatctggcatctcctgactcacacctccggcctccccgcctacgccgagcccgaagtcgcggccaaggcgtgcggccggccctgcccgccctcggccctggccgaatatatcgccgccctgcccaaggacaatccgccgggcgaaaaattcgtctacagctgcctgggatacatcaccctggctgagatcgtccgccgggtgtccggcctgtcgatcgaccgtttctccgccgagaacatcttcgagcccttgggcctgcgccggacgttttacaatcccgatccgaagatttccgcccaaatcgttccgacccagatcctggacggcaagccgcttctcggcatcgtccacgatcccctggcccggctgcagggcggggtctcaggaaacgccggcttgttttccacggccaaggatttagcggttttcggccagatgcttctcaacaaaggcgagttccgcggccggcggattttcagcccggcggccgtggagcgcatgacgtcgatctatccccggacggagttctccggacgcgggctcggctgggacctcggctcggattacgcctccaacggaggcgatctgttcgggccgcggtcgttcgggcatacgggctacaccggcacgtcgctttggatcgatcccgacaccaagacgatcgtcgtcctgctgaccaacagcgtccatcccgaggacaaggggacgatcgttccgctccgcgcccgggtggccaacatcgtcgccggggcgatcgcggactgattattttttccggatgaccggccgggggatcaccaggaagtcgactccgccggccgtccggccgggctcgagcttgatcttgaagggaagggggacggccgtgaccgccccggtcggcaaggtctccggatcgaccgagagctcgtattccccggggaggatgttcatgaaccggtaggcgccgccggcgtcggtgtaggtgttgaggatcaagtccttccagacggctccgtcgatgggggtcaggatgaccaggatgtcggccagccccttgtccgcgggatccatggtcccgttccggtcggaatcctcgatgaaccggcctttgagcgaggcccccgagatcaggggaaaggagacttcgcgggtgattcgagcctgggtcaagacgtccacccgggccgggctcagcaggtaatacgtcgccgggatgaggttttcctcgatctgaacctggtgcgggccctcggccaccatcgggaagcggaagcgtccgtcctccccggtcatcgcccgcgatccgtcctcgagacggagggacaccccggccaatcccttttcgcccgggctcatgaggccgtcgccgttcgtgtcctcgaacacgtatccttcgatcgacccgatgccgaggacggccccgacggtcttgcggcccatgatcttaggctcttggccccaggagaagcgcttgtcgaggcggagggtgaattggtagtccgacgagcggatgtccctccggttcaacggctcggacgcccggatgtcggcccgcgcctggaggctccggccgaggccgacccggacgccgacgtaggcgacgatctgagagacgatctggacggccccgtaccgctcatagaaaagctcggcgtaaaggtcgaaatcaggggaaaaaacctggttccaacccgtccgcacgtagaggttccggtcgatcaggccggcctcggcgttccgcttatggtcgtattgcccctcgacccataaaaacgatccccggggcatcctctttcggaagccgagataaatgacgggcaggccgcttgagggaaggccggggccctcgcggacgctctgcagcttgacccggagataggggaaaaagtcgcccatcgtccgggaggcctggaggaagattccgttggaggcgaaatccaccgagccgggaaagtcgtgttccgaaatccgctgctggaattcccattggagggacaggtcgaagagcgagcgggtgttgaggtaaaatccggaaatgaccgacagggagcggagggtgttcttggccggatcgccgccggtgttgtcggcgaagcggtcggcgaagccgaagaggaccaggttgcgcgaggcctggtagcggaccgaggcgaagaggccctgctcgtcgcggatggactgataatccggattgaggtcgcaaaaacgggatccggtgaagcggtagttcgcctcgatgttccattttcccgaccggaagaaggggccgaagcgcagggcgttggccgatccggccggcccggaggacccgggcgtgaggctcgtttgaaattcccccaggattttcgccccttcggcgacgggggcctcggcgtcaagcaggatcagggtgtttttttcggggccggccggatcggccggatcccggcgggtgtggatgatcccggccccggcgagcccgccggccggccgcttccatcgtccccggatcccgtaaaaaggctggtccttgatctcgtacgtgcttcccaggagcccggtcaaccgggccagcgtccccccgaaaaccgagagatcgaaggccggcccggagatcgaggcattcaatccccggaagtaaaaatacggatgatactgattgacgaaccgggattcgagattggaattgacgaaaaagccgtcgccgagaccggcggacagctccgcgttcttgatcttgaatccccgccagccggcgaacagccgggcgggcgtgaagacgccgccggccgccaggccgtcggcccagagcgacacggtcccgtaattggtgatcgcctggacgaggccgaagtgaaagacggtctccgaggcgtcgtccgcgccgccgaaaggattgcggaagagatgactccggttgccgatcgaaagatcggctgatccccggtcggcccgggcggcgggggcgagcccggccaggaggacaaggacgccggcgagcgaaacggttcggcgcatcgcgggccggaggtccctcttcacgttttctcgctcactcgatgaaaacggcttttttcaggacggtctttttcccggtgagccggtagaggacgcattcggcctcgtagcggccggccgccaagccggaggcgagcggaatccggtagatgccttcggacaggggaggcacgggattgtcggcgaattcagtttcccaagcttttgtgccccgttcgtcccggaggacgaacgtccccgcggtcggggcgaaaaaacggcctgtatttttccgatgaaggacgagaaaagcctgtccgtcccggcgctcgaccgtgatctcctcgctcgtttcatcgtcccggggcttcccgacggtgatgacggccaaggcggtcaggcttccttggagatgaagcccttcgccgtcctcgtccgatacggattgaacggcgatcacggcggggtactgtcccggttcggcgccttgggggacggcggcgatgacggggatgtccagggattggcgggccgggatccggaaatccccggcgatgacgcccagccaatccttggaggataaagaggcgtcttcggccgccggaatgtccgggccggccggaccgtggatccaggcggtgacccgagcccggacgcggatgtcgtccggcgaatcattgccgacggtcagcgtccgttcctccgagtttccggcggcgagggtgaattccaagtgaaccggagagagcgacagcgacatctgtccccgaagcgcggacgcggcggccgagcagaggagaaaaacgacggcggttttcagtttgctcatatcagacccgggagagggtgaaggtcacggattgtctataggatccggcccagtaggaccaactgttttggaagacgaaattcataaccgcggtgatgttgacgttgccgtctccctctgccgcgacctggtcgacgttggccgccagcctcccgttccggaacggcggcgcgggggatgccgtccaggtgatgttggaaatgtcgatcgaggttaaggacaagatgttgatgaggttgccgtcggcccggagggtgagctgccaacgcccgggccgtcctcctcccgtcagtttgaggcggaccgtgagcgtgtcgttggccgggacgaggggcgtcgcatcgggatcggccgcggggaaggagagcgtggagcggctgagagagagctcgatgttctggccgaacagcggagcggccgctccggccaggaaaagaaacatcgcggccggaaaaatcgtggctttcgcgggcttcaacatgacggcctcaactcgcgccgacgctgagcgtcacggtcaggcggtaggtccccggggggtaattgggatcgtcccggaagaaaaaggtgaccgtccccacgtacacccccgaggcgttccatgtccccaggagggtggccgtccccgacgagagagttcctgaagcggcgaatcccgtgccgctcgccttccaggtgatggccgatgccgggatcgtggttccggtcgccggatcgatgagcgttccggaggcttggatccggaggttgatcgtctgggggaagatgagaaagcgggatgtcgtggccttcacggtgacggaaatagggttttcgttctgggggatgtccggccttgtctgcggattggcggtccgggtgaacgtcacggaggcggcgctcatctcgagcttgtagcgcgagatgacctcggccgcgagattcaggatttccgtcagcggaagagactgggcgagaagcccgccgccggccagggccaggatcagggcgaagacggcgatcggttttttcattggatcacctcgatgtttttttccatttccaggagctccggccggccgatgtcgagatcgcagacgacgcggtaggatcccgggtcgagcggccggggaagagggcaggcgatgttcttgcggctttcgggcaggagaacgtcgtcggggatttccaggtcgaagagcttttctccggaggcggcgaacgcccggatcgttccccgggtccggaagtgcgtccggccggtgttttccaccgacaggaggaaggccggccggccgtttttttctccgagggtgaaatcgaccagatcgccctcgacggccgggcggccggcgatcacgtagacggcggccgcgatcttgccggtgaagagcatccggttgccggcgcgggccgcggaggcgtcgggcacggtttcgaacgagatcgccgagtgatatccgcccggagacgtgccggggggaacggcgatcgtgtagcggacggatttcgtctcgcccggattcatccggaaatcctggggattgatgacgatccagtccttgctggaatacgtcgttggcgtctcgccgatgaaggcggccgtcccgtcgtcgcggatcgtccagttttccccgtagaccttgatccggatgggcccggcgtcgttgttgcggatcaggaagacctcggtcaggcttccgcccggcttgatccggtgctcggcccggatgggggagatcccgaaatagatttggccttgggcggggagcgcggccgccagaagaaccgccgcgagccaaaagagcgttccgttcctgaagccgatccttgcgccgctcatcctcatcccccgtctattctatgtgaaaaacggagcccgggcaatcgttccgcgccgggcaaaaaaagagggcggggggattcgccccgccctcggatcatggtctttatcgatcttgattaacccggtcagaccgccgacagcgtgtacgtggcggacgcggtgtagtcgcccggggcctgggtcgtgtaatcgcggaggaaggagtaggtgaaggagccctcatgccagtgaaggatggaacccgaccacgagccggccgtgatattgccggatgtcgacatcgcgccgtcgacataaccggtgccggtcgccttccaggaaatcgcgccgatcccgatggtgtcggagctggaagtcaggtcgccgttggcttttaccgtcagattcagcgtttttccaattccggtgacggcgaaagcccggaccaaaacggcgccctcgttagcttcgagcgaaacggaggcgggggaggccgcggccgtcggggcaacgtcggtgaaagagatcgacgcggcgcccaagctcaggtcataccaggcggaaaggttcacggtcatgtcgaggtttttcgtggcctgggcgaacaagccgacggacgccagcaggaccatgctcaggatcgtcagggtttttttcatatcagcctcctgttgaatttcgactctcttcctcgctatgagaaaagaatctgtttcgttacacctctaattatagcatgttatatgccaataatttaaatataataaatacaataagatgcgaaaaagggggtgcaatatgatcaaagtattattgaaaaataatgacgtaaattgtcaacaaaaagcaataattgtcacttatgaattggataatcgatattatcttgggctgagtggagtgataaacgagggcgggcggattttaggtcgacatcaagctgtaaacgatgcgctgaacgtatttccggcctgtttcattcgcttggggcgagaaatattgaaccgttccctcatgaaagcccggtcccatccaacgggccaggacggcggagccggccggagtgaaccggccgctcaggaatccttctcctgatccggcccaggtcacgtcggagagcgggagcgtttcgcccgaggggccgaccaggtcgccgaaaacttgaaccttcagctcgacggcctggttatgagcgacgacggccaaggccttgatccgggcggggatcccgtccgggctcatcgtcgtcgtcacgccggccccggcgacgcccgatgattccatgtgaacgtccggggtttgaacctcgaggacaaaccattcccggagattgaccgagaaagacaccgcgcccgacgtccccgtttccggggagaccgcgtaagccgcccctgtcatcatagcgaggaagagagtcaaggaggccgctttgcgtcgggcggagcctttatttggtttcatttttgatatcgacttcgtatatagcaatagtcatgccagagataaaaacatattaagtagctgaaataaaaagaaatatagaaattttaaattaaccgaagtgtccgttatcgtacatattaaatttgattaaaacgatataaaacgttaatatataaataaataattgcaattttgtcgacatgtacgataatgttacattaattaccttaaaaacgctataatgattacaatattcttgataatccgctttgttcactaaatgaaaccgccacccgcccggccgattataaggatctgattaattcttggctgtcattttcgaggaggcgggacggttgccgggaaaagcggggcctccccttggagattcgccgaatcccggtcctcatgggctcgaacgcgtccatgagagcgaagaatcccccccggcggtcttgcttcgcgaagcgccggaatcagccgaggtttttcgcgcgggcggcgccgtatgttccggccggaggagtcaaatcaggataagctgtattttttcagcttgcggtataaagccggccgggtcaggccgagcattttcgcggccttgaccttgttatgtccggccgccttgagaatctcgccgatgtgcttcttctcgatatcctcaagagtcatttcggcgaagggataaggcctcgcctcgcgctcgtcgttttccgcccgttccgaggcgatgacgaccggttccgggaggtccttgatgtcgacgaacgcttcggtgctcagcatgaccgcccgttcgatcaggttttccagctcccggacgtttcccgggtaatcataattggccaggatccttttggcccgctgggagatgccccggacgtccttcttgaatttccggctgctcgtttccaggaaatgattggccagcatgagaatgtcgtcccgccgttcccggagcgccggcaggttgatctcggccaggttgatccggtggaagagatcctcgcggaacaatccctcggagatcaaggcccgaaggttcttgttcgtggcgcagatcacccggacgtcgatctcgataaaagcgttcgagcccagcggccggaaccggtgctcctccagaacccggagaagcttcgtctggatgatcgggggaatgtctccgatttcgtccaggaacagggtcccgccgtcgctgtcctcgaatatgccgggcttcgccttgtcggctccggtgaacgccccccgctcgtagctgaaaagctcggactcgaaaaggctttccgggatggaggtgcagtcgcagacgacgagcttccgctcccgccgggggctcagacggtggagagcccgggcgaccatctctttcccggtccccgtggctccctggatgaggacgggcgaggaaaacttggccagccgctcgatcagcgagaacagctcgagcatgaccgcgctccggccgaccatgccctcgaacacgtatttttcggccagctgtttctccagccggtaggtttgcctccggaggtcggccttctcccggatccggtcgagaatggccaggatgtcctcgccgtcgaacggctcgaccacgtaatcggcggctccgagattcacggcctcgacggtcttgttcacgggaaggggaggaccggccaggatgacttcgatcaagggatcgaaattccggatctcccgcagcggccgaaggtcgtccgtttcctccggagacaggcggaggatgatgatccggatcccgcggcggcggatgacggacttgatgttgtcccggttggaggaatagaagatcgtgaaccctttcgggacgacggtcttttcgagaagagtgaaggtttccggcgtatcggagacgacgagaatattcatcggccgtccgtcccggcccgcggatttgttttcctcccgctcatggcgccactatatcgccggcccgcgcgtggtgtcaagaaaacggggggacggtcaatcttccggaaggccgggaggccgtttggtgatgacgttgtagcgaagccagacgagaccgccggacagcgtctcgttggccgtcagctccaggcggatgacgtcctcggccgacgtcaggtcgtcggcccggaaaatcgtccggggagagattccgccgaccagccggggatggacaaggaggctgatttcgtccaccaagccccggcggaggagaaccccgttcagagttccgcccgaatccacccggatcgttttggcgttgtaacgcccggcgatcgcggccagggccgctccgagatcgacccgggtccgcccggccaggaaataaggaatgccctggcgcttgaaccgctcgatctgggccggcggcgccgtcgaggacgagagggcgagaacgtcgcgccagaacggaagcgtccgcagggacgtccagttcttgatgcggtcgcggctgtccgggacggccaggatcgggcgcgcatcggccggatcgatctcggccggttcggggatttcctccggctcgcgggcgagcgcttcgcccagcgggctttggagcatcgtcccgctgccggccagggtgacgtcctcgtcgaaccggccggccagctcgtaataggtctccaggttcgcctcgaaccaatccatccggccgtcggcgctcacggcgttgtgcagaatgatgcggggtttcatcgtctctccttttcatccgtccgcgcccgctcgatgaggatctggagggtctcgagctcgtcggcatcgaaccagatccggccgcaggagccgcatttgtcgacggggacgacgtattgatagttgaacggccggggaatcatcgggcagccgcaggaagggcagatcaggcgggttttccggggatcggcggatttcctccgggcggcgggattgagaaggcgctcccgctcgaaagcttcggcttttttaacgagatcggccgaaaacccgatctcccggcgggcgatgatccggttcatgaaccggggatcgatcgatttgccgccgcagcggcggcagaggccggccggtacgccctcataaagggtgtcgcctagcggaatccggcagcgggggcagaggccgaggcggcgcatcaccacgggccggccctggcgtctccgacggagggcgtcccggatttccggaaaatcgccggcccggccgtccaagccgtcggccaggtttcggacgaggacggacggagaaaatccgtccgcctcgatcaattcctcgagagccgccgggccggtttcgccgcggcccggccggatcatcatccagtcccttcgttccggcggcgcttccgtctccgtcccggccgtcggcggcgcggccggggccgcgatcgtccgggcttttttccgcgcctcggcggcgtctctcacctggccggccacggcctcgggcgtccggcgggccatggcggccagaagccggatccgctcctcgaaggccggatgggtgcttgaccagcggggcgctttcgctccgtcctccggcggcgccgacggcgcgatcaggaaaaggggggcgaaggcctggctgaaatcgccgatgaagacgtttcgggcttgggccttgtaaacggcccgggccagggccatcgggctgcgcccgaattcgacggccgcggcatcggccaaaagctcccgttcccgcgagacaaagacctcgagaaaacggatgaccgccgcccccgcggcggaggcggcgtacagcaagccggcggccgcgcccgtccggtttcttcggccgaggaccggggcggcctcctcgacctcgggctcgcaggcgtcccggagccgctcgaaaaaagaggaaaggccgcagaccagggtcaggagcgtcgtgtcgccccgggcgatgtggcccatttcgtgggcgacgaccgcctcgacttcatcccgggcgcagtcggccaacaggccttcggtgaccaggacggccggccgcccgcccgggaggatcaaggcgagcgagttgagggaaaacgtcgggagaatcaggggatcgaccgccggcaacccggccgcgaggcggacgccggccacggcgtcggcgaacatccggtggtagcggtcggccggatcgggaggcttggcggaaagccttttgatcaagtaagccggcccgtttttccgggcgtcgagataatgaaaagcggcgacggccgcggccaggaggacgtcgagaacgatgaatttcgtccagaatcccgagccggcgaaaacgggccggacggcgaagaagccggccgtcagcccggcggcgaggaggagaagcccgacggccaggaaataaaagaggaagagcagggcggcgacggcgaggctgcggatcttctgccgtttcctcagctcatagaaatccagagggggggtcatcgccgccatcgtaaacgaagccgtctccggccgcaagtctttccggcgctttgaagaaacgtccgggctgtgataatctgttttttcttccatgaggacgacttttttttcctccgcatccctcccgaaggagactcccatgccccgtttccgcttcggccgccggattcttttcctcctggcgctgagcctgctttcggccggcctcttttacggacaggcggcctccaagccgctgaccttctccgatgtgatgaaattcaaccggatcgtcgatccggtgatttccgccgacggccggtgggtcgcctgcgccctccagcccgaccgcggcgacggggaagtgcaggtccggtcgacggacggggcgcaatccttttccctcaagcgcggagagcggcccgtgttcagcaaggacagccgccggctcggggccatcgtaaaaatccgggccgtcgacatggacaagccggccaaggaccggccgaaaaccgggatggccttcctggatttgacgaccggcaagatggaagcctttgagggcgtcgaggaattcgccttctccgacgacggccgctggctggcgatcggcttcttccggccggaggaaaaacccgccccggccgggccgacggccgagggggaggcgaaaaaggaagccccgccggcctgggacgccggccggccggtcctcctgaggaacctggaatcgggcgaggaattcaagctcgaggacgtcctgtccttttcctttgacccgaaatccaccgtcctggccgtcgttttatcggccgccgacggccggaaaaacggcctggccgtccgggatctcaagagaagcgggatccccgagaccgtcctttatcttaaggagaaggcgtcggtttccgccccggtttgggcgaaggattccacgaagatggctctgacggccgcggtgaaaaaggacaaggaggatcccggacgggcgtcgctcgtcctctgggaatacgtattcggctcggatacggccgacgaggtcgcgccggcggccccggccggctggatccttcccgtgaagtcgcccctggagtggtcggccgacgggaaacgcctgttcctcgggcttcggcccgaatccgagctcccgaaacccgccgccccggccggggaggacgccgctccgcccgcggccgaggtcttcgatatccccgcgatcttggaaaagcgggccgtcgacgtctggcatggaaacgacctcctgatcattccccaacagaaaaaggagtgggagcggaacaaggaccggacgtacacggccgtcttttatcccgacaagaaacggaccattctcttggcctcgcccgacatggcgggattccggatccccgataatccggacgtcgccctggggtgggacgggcgcccctatcaaaaggagatcacctgggacggcgaatacgccgacgtttacctggtgagcctttcaagcggcgaacgccgcaaaatcctgactcgtttcggatcccggccgttcctttcgccgggcgggaagtacgtcgcctacttccaggacaagcactggtttcttctcgaggtcaaaaccggcctcatccggaacctgacccaagatctgccggtcgctttctacgaggaggacgacgaccaccccgcccccccgccggcttatggaaacccggtctggatggaaaacgacgcggcggtttttctccccgacaggcacgacatctgggcgttccccaccggccccaagggatcgccggacattgtgacggccggcgagggacgcaaggagaaccggtcgttccggatcattcttcccgacccggagcgaaaattcatccggaaaagcgagcgccttctccttgcctccacccacctgagagacaagaaccgcggcttttacgaagccatcgccggaacgtcgggagtcacccggctcttggaagaccgcaagaacttcaccttcaaagcccgggcgaaagacagcgggacgatcctgttcacccgcgaggattaccgggagtttcccgatctctggacgaccgacgccgccttcggtccggcccgcaagatctccgaggcgaatccccagatcagcgaattcgcctggggggaggccgagctggtggagtggacgagcgacgacggccggccgctccagggcgtcttgatcaagcccggcggctacgagcccggacgccgctatcccgtcctggtctattattacgagatttcgtccgaccggctgtacgacttcaacgagatcgtggtcaatcaccggccttgcttcccggtttatgccggccacggctacgccgtcttcctgccggacatccggttcaccgtcggccggcccgggatgtcggccgtccattgcctcgttccgggcgtccggaagctcatcgacatgggcctcgccgatccgaaggccgtcggcctccacggccattcctggggcgggtatgaaacggccttcgtcgtcacccggaccgatctcttcgccgccgcctgcgccggcgccccggtgggcaacatgaccagcgcctacagcggcatccgctgggagtccgggatggcccgtcaattccaatacgagcgcgaacagagccggatcggggcgtctctctgggatgcgcgcgatctgtacatcgagaattccccggtctttttcgccgaccggatcaagacgccgctgctcctgatgcacggcgacgaggacggggccgttccctggtaccaatccatcgagctttacctcgctctccgccgcttggggaaggactgcttcttcctccagtaccggggcgaaccccaccatcccaagacctacgccaacaagctcgattattcgatcaaaatgatggagttcttcgatcattatctgaagggagcgccggcggccgactggatcaagaccggcgttccttacaacggaaaataacatcaaggaggaggatcatgagaatcggaacgcgctgcgcggccgccctgctggccgccttcgtctccctcgggttcgggatcgacatccgcgacacgcggatgatgactcagccggccgtcgggaaaagcggcctcgccttccattacgccaatgacctctgggcggccgatctcgacggaaaaaacgtccggcggctgacgtccgacctgggcatcgaatccaatccggcgttctcgcccgacggcggattgatcgccttcagcgcccagtacgacggcaacaccgacgtctacatcgtcccggccgccggcggcgtgccccggcggctgacctggcacccgggcgcggacatcgtccagggcttcactccggacgggaaggcggtcctgttcacgtccgcccggcaggttttcaccggccggtaccagcagttgttcaccgttcccgtcgaaggcggattcccggaaaagctccggattccgaacgccttccgggcggtctactcgcccgacgggaaaaagatggcgaccaaccccctgtcggactccttcctccagtggaagcattaccgcggggggacgaattcgaccatctggatcatcaacctcgacgacttgtcttacgaaaaaattccccagcccgagggccgctgcaacgatcccggcccgatgtggatcggggacatgatctactttcggtccgaccgggacggggagttcaacatctacagctacgacccccggagccgggaaatcaaggccttgacccgccatgaagatttccccgttctcagcgcctcggccggagacggccggatcatctacgagcaggccgggtttcttcatctccttgaccccgtttccggggcctcgacccgccttcaaatcgggattgcgaccgacgcggccgagctcagggagcggacggccaagggggccaagtggatccgcaacggcgagctctcgccctccggggcccgggccgtcttcgagttccggggcgagatcgtgaccgttcccgccgagaaaggggatccccgcaacctaacccggacgccgggggctcatgaacggtctcccgtctggtctcccgacggaaagtcgatcgcctatttctcggatgcctccggggaatacgccctcgaggtccgtccccaagacggaaaagggacgtcccggagctatgccctcgccggctccggcttctacgaaacgccggtctggtcgcccgacggccggcggatcgctttccatgacaatgcccgggcgatttacgttctcgacctggagaacggcgacatcaagaaaatcggggccgattatcagctcggggggcggaaaagcccttcggcctggtcgcccgacggaaaatggctggcctataccctgggcaccgcctcttattttcagcgggtcttcgtctattccgtcgcccaggacaagtctttccccgtgtccgacggtttgagcgaggcctaccggccggttttcgacgcctccggcaagttcctttactttttcgcctcgaccgatgccggtccgatcaatcaatggttcgacctgtccaagttcgacgcccggctgacgagctcgatttacatcgtgtccctggccaaggacacggccaatcccctcgcccgggaaagcgacgaggagacgggcttgcccgccaaacccgtccccggtgtcgcaacgaaggaggcggccgctcccgccgcgcccgcgggcccggcccctgcggccgaggtcaagatcgattttgacgggatcggccggcggatcgtcgccgtgcccgtcccgcccggaagctacgatatcctgaaagcgggcgaggccggccagatctattatcttgaaagcccgccggacatcggctcgcccgcggccgcgcgcggcggcctgcttcaccggtatgatttcaaatcccgcaaggacgaggtcctcttgaccggcgtctttcagtacacgctctccttcgactgcaagaaaatcctgtactccggaccgtcggagaccttcttcctcaccgctctccagcccaagccggccgccggccagggacagcttcaggtcggggagatcggcgtcccggtcgttccggaagaggaatgggcccagatcttcgccgaggcctggaggatcaaccgggattacttctatgccgacaacatgcacggggccgactgggaggccatgcggaaaaaatacgaagtgtttttgccggacttgtcctgccgggccgatctcaaccggctgatccagtggatgtgctcggagctcggcgtcggccaccaccgggtcggcggcggggattttttggccgcgaaccgggccgttccgggcggactcctcggggcggattacgccgttgaaaacggccggtaccggatcaagagaatttatgggggattgaactggaatcccgacctgcgatcgcccctgaccgagcccggcctgaacgtggccgagggggattacctcctggccgtcgacggccgggagctgcgggctccggcggataatctcttcgccttgttcgagaacaaagccggcaagttcgtcgagctgaaggtcgggccgcttcccgacggccggggagccaggaccgtccgggcggtgccgatcgaaaacgagctggccctccgcaaccgcgactgggtggaaggcaacctgaagaaggtggagaaagccaccggcggccgggtcgcctatgtctatgtccccaacacgtcgtaccagggattcgcttatttcaagaggtatttctatccccaggccgacaaggaggcggtcatcgtcgatgagcggttcaacggcggcggcttgatcgccgattattacatcgatcatctgcgccggccggagatcagctattggaacatgcggcacggcgccgacatgaaagcgccgggggcttcgatccaaggccccaaggtcatgttgatcgatgaaaccgccgggtcggggggagacctcctgccgtggatgttccgcaagtttaaaatcggcccgctggtcgggaaacgcacctggggcggcctggtcgggacgctcggcttccccgtcctgatggacggcggctatgtcaccgcgcccaacctggccatctggacggaggacggctggatcgtcgaaaacgagggcgtgccgccggatgtcgaggttgaacaggatccggccgcggtcgccgccggcggcgatccgcagctcgagcgggcgatcgccatcgtgatggaggagctggccaaatcgccggccaagaagccgatccggccgccgtatccgatccgcggcaaccggaagtaaaatggaaatcaggcggagcggggctggatttcggccccgctccgccgaaaaccgaagacgctgtagcgggagaaagaatgttccgcggctccggggacgtgcgcgccaggactttttggcggtggatcgacctgaggcgatgaatggcgcttctgccccgctccgccgaaatcccaagacgcggcggcgggagaaaatatcgcggggttataacggcctccgctcacgcgtccggatcttgacggcttttctcgatcggcctggcttggcggcgaagaactcgcgtcccggaagaccttttaacggttcaaggcgcgggacgctcaaacatcttcgctcggccggcttcttccgagccggcttcccaagcaagcatcgagaaaagcctaatccggacgatgttcgctccggccgtcataacctccgcgcttcggccccgctccggggacgtgtgcgccaggacctttctacggcggacccgggcgagccgatgaatggcgcttctgccccgctccgcggcatttgcgaagaggcgacaaatgccccgctccggggacgtgcgcccgctttacgggaggcagagagtcgaggattcggcctgggcttctgccccgctccgccgaaaaccgaagacgctgtagcgggagaaagaatgttccgcggctccggggacgtgcgcgccaggactttttggcggtggatcgacctgaggcgatgaatggcgcttcagccccgctccgccgaaaaccgaagacgcggcggtggaagaaagaatgttccgcggctccggggacgtgcgcccgctttacgggaggcagagagtcgaggattcggcctgggcttctgccccgctccgccgaaaaccgaagacgcggcggtggaagaaagaatgttccgcggctccggggacgtgcgcgccaggactttttggcgctcggcttggatcaagcgttgatggcgcttcagcccgtgtcgcggattttttgaagcaaaaaggcggcccgggtgaacgctccgcaggcgttctcgaggtcgcccttggaggcgaatgattcggcctcggccgcgatctcccgggcggaggaggccagccaggagtcgatttttgcctcgggaacgaccgcggcctcggttttcaggctcttaacgatttcccggagggcgacgacgccgcgggccgcggtcttgccgttgggaacggccaggtagatccgttccagaagccggtagagggcccgggacccggcgtaatcattcttggcgaaagcgtcgtcggcgttgcgttcctcgaactgggccagccggaaaaggaagttgttgtcggccgaccagcctcggaggccggttttcaccaggatcatggaatcccgggaccggcgggcggattctcgttcggagatgacggccatcaactgctgcatttcgccgccgatttcaggagcgccggccgaggccggatcccccgcccggctccgctcaaatttctcctgggcttgtttccaggcttccacgctcggaccgctttccggcaggtatcggcgcatttccttgagcgtcttttccacggccttcacgttttcgggatccttggaaccgagaatgccgagaagcgcccggccggtacggacggactcctcctcggcgccttcgagggtcgggacgatcgaggagtgccgggccgatggggccggattccgttttccggtcaggaatacgacagcggcgatcgccgcggctaaaacggccaaggccgccgaaacggcgaccgcccgcttgatccgccgggggcggaggtgcgcgcttgagccgcgggtcgcggtcttggagatctccaggacggccgaggacaatcctcgctcgacctccagaagggcttcggacgtctccgccgcggtctgatagcggcggcccggatccttttccaggcatttcaggatcaccgagatcagcgtatccggcacgagcggattcgattcccggacgtcacgggccttttcgtttttctgtttcaaggcgacggccaaaggtgtttcgcccttaaacgggacatgcccggtgaccatctcgtaaaggatgatgcccagggcgtaaatgtcgacccggccgtcgacgtccttgaggtcgacctgttcgggggacatgtattccggagttccgagcatgagtccggatcccgtcaacccctcggtttcggagattcgggccagcccgaaatccatgattttcgccttgccctcgcggtcgatcatcacgttttggggcttgaggtctcgatggacgacccccaagcggtgggcttcctccaggccctcggcgatctgccggccgatgtccagggccttggccgtcgtcaggtgatcggagcggcggatgaaggctttcaggtcctcgccttcgacatattccatggtcaaataatgggccagcccggattcacccaagtcgtacatccggcagacgcggggatgggcgatccggcgggcgaacttgagctcgttgcggaagcgttcgacggctttttcgttgaagctgatttccggcttcaaaagcttgagggcgacgtcttccttcagctggcggtcataggcccggtaaacccggcccatgccgccccggccgatctcctcgatgatttcgtagcggccggcgaagaggattccgcgctccaggcggtcgatcgaggcgatcatcgtcctggtgaggccgtccgaatcggagggcgcttcctggggcaggggagtcgcgcagcgggagcagaaccggctgtcgggctggttatcggcctggcaggaagggcatttgagaagcatatccatcacttaccatgcgacttacaggttgtcaacgtccttgttcccggcctctgctgatatatacgtaaaacacccccgttacgttgccgaattccggccgcggccggaggtggaactcggatcgcctttatgataataaggatcattcaggaggacccgatgatgaagcccgccctggtgatcctggccgccggaatcggaagccgttacggcagcctgaaacaggtcgatcccgtcggcccttcaggcgagacgctgatggattattcgctgttcgacgccctccggtcgggattcggccggtgcgttttcatcatccagaagagcatggaacaggatttccgggacgtcatcctcaagaagctcgagggccggatggaagcggattgcgccttccaggcgatcgacgacctgccgtcgggatttaccgttccccctgagcggaccaagccttgggggacgtcccatgccgttctggcggccgcgtccaagatccgcgagccgttcggcgtcatcaacgccgacgatttttacggccgggatgcctttcagaaaatggccgcctttctctccgacgtcggggccgccgaatcccgctacgccgtcgtcgggtacgacctcgacgcgaccctgtcggattacggggccgtcgcccggggcgtctgcgaggtgaatccggccgggttcctgaccggcatcgtcgagcggacccggatcatccggagcaagttcgggatcgttttcgaggatccctccggccgccacatctccctgggcgagggacggaccgtgtcgatgaatttctggggattcaccccgacctatttccagttcgcccggacggagttcgtccggttcctggaggagcggcggaacgatccgaaagccgagttcttcatccccctcgtcgtcaaccggatgatcgaggacggcctggccgattgcctggttctcccgacgaccgcccgttggttcggcgtgacctacaaggcggaccggccggccgtgatggcctccctcgagagtctgatcgccgccggggaatacccgcggagcctttggggctagcggctaaggccgccaaggccggtagggaacaaccggaaggtcttctttcccggcgtaccggcggatctcgtaaagccctccggcctcggggatcagcttgaatttcccgtaccggatgaagccgtagtcggactggggctccagaaggcagggaacgagatgagccgccggctggacgcaggagacatagaaatcgcccttccggaccgggaggcgggcggctttggccgcgacatcgatccgttccggggggtcgtaatcgaaccgggccgggatgatcgactcgacctcatagacttcggcctcgacgagaacgtcccgggcgaacatcccgacctcgactccgagggcccgcagcgtctcggcgatctccgggcggccgccctcgaaaagataaccggccgggcgggaaacgccgagagtcgactcgacaagagggaaccagttcttgacgatctcgtcgacgacggcggcgccgcctggttccagcggcgggaggagatcggcgaaagtcaccgcctcgcccgcttttttatcgacccggagaacgccgcggacgggcggcccttcccggtcgaaccgcttgaggcggagctcgggaacggcgggatcgcggacgtacttcatccggaggcggacgtcgtctccgggcacccgcccggcggcccgttcgagcagacgcgccctccggctccggaccagttccaggatttccggggcatggccggccgccgattcgaggaaggcccgcaggccgtcgtattgccagtccgtccgcggctggagggtttccaggtcatggcgggacgcgccctcctggatgaacgagagggtttcgaaaatccccaggctgttgcggccgtcgttgaggtcggtcgtcgagtagcgcttcatctcctcgcgggccgccgggcgttccgccgcccgggccgagccggacgaggtgtcgaccccgaggtcctccgtgaccaggtattcatggaacgtgaccttccgtttttccagggcccggccggtctcagccaggagggtattgcgggagaagtcctggagacccgcatcgatgttcgcgttcgagacgcagccgatcgagatccggtaatagtcatctcccttttcgtggacgtcgatcgtcacctcgggcatccagtcccggaagacgcggtggatggcccgaaccccctccgtttccagcttgacatgatcgcggttcatgtccaggccgagctcgttgccccggacgttccggagattgccgcagggattggtttggggcatgaccaggacgttgaggcgctcgaggaggggggacagctcgcccgcggccaggtcccgcaccagccggagagccgcttccttggccgattgctcgttgccgtgctgggcggcggtgatgagaaccgtcggtttcgtccggtcgagctccgccggcgcggccgcgggcttttcggccaggacggccaggaagagatccatcgccccgcaggcttccgtgggcaaggatctcccgacggccgagacgcggagggcgggcgcccgggcggccagctcgcttaaaaaagcggcgacggattcgttccgcgtgtactcccggtatcccgcggcttcggccggagtcgggatgaaattcccgtcgccggcgaaggcggccagcccggccccgacgaacaagaccggcgtccaggctcgtctccggatggtctttcccctcatgacttttcctccccgttgatttccgcttccgttgaatcacagagccggcttcatgcgggcgggcttccgaatccgcccggccgcggaagccgtcggctcaaacgcgcccgcctggaaaaaacgcggcccgggacgcgccggtcaataattctcggctttgatttcgtagaaagccaggggatggagacaagccgggcacttggccggggcttcgacgccttcgtggacgtagccgcagttgcggcacatccagcggaccggagcgtccttcttgaagactttccctccggtcacgttggccaggagcttgcggtagcggttttcgtgttcccgttcgaccttggcgatcatccggaaagaagtcgcgacctcggggaatccctcggcgtcggcgacgccggcgaaatccttgtaaatcaccgaccactcctcgagctcgccgtcagccgcggccttgaggttggcggccgtgtccccgatgatcccggccgggtaggcggccatgatctccaccgctccgccctccagggctttgaagaagactttggcatgctccttctcgttttccgcggtctccaggaagatcgcggcgatctgctcataaccctcttttttcgcagccgaggcgaaatacgtgtagcggttgcgggcctgggactcgccggcgaaggcggtcaacaggtttttctcggtctttgtccctttgatggatttcggcatgacgttctccttgtttgttcaagccttccacaggccgtgaaggttgcagtattcgcgggccgtgattttttccgcttcgaggcggaagaaggcttcaggcgcctccccgggcttcaggaatttccggcaggcccggccgtcggcgatgagctcgatccacatgatgtaatgcttttcctccatgggatgggggacggatccgaccttgaccttgtacccgtcggcggttttctcgatcaccgggacatgcttttctttggacgcgtcgaccgtgttttccgtcatcagctccatcggccggccgcagcagaccaactcgccgccgccggcggtcaacacttcgacgatgttgccgcagacggggcagtgaaagatttgaaaacgttccttggctttagccatgactcttcctcctttttttcagttgggttttatgggatgccggcgcgccggcggaccggccgggggtgctcaggcaatcacggcagacgcccttgaaatagccgtggacctcgtcgatccggtggccgtggatctcgccggcccggctgttgggacaggaaatctcgatgtccaggatgcggccgcacgccgtgcactgaaaatgatggtggagggccggagcgccgtcgtagcggacttcggccgggtcgatcatcagcgggcggaccagcccctcggcggcgaaccgctccagggtggaatacagggtggtcttggacagggtcggaatcgtccggacgagatgggcgtgaagatcccggatcgtcggatgagaccggttatcgaggacggccccgaggatcgtcaaccgctgaaacgtcggcttgatccctcgttccgccaagatgtcgcgcaaacgggacgtatttgaaaccattacaaactggattatcgtcgatttccggccggttgtcaaggcgccggccggcgcgttgacaaagattttttttgtggatagcatgatgtcaaatccgcggagaggaggagtcccatgaagagaacccgggtccttccgatcatggccgccgccggcctcattctcgtcttcagcgcttcggccgccgccccggagacctggatcgtcgacattctcgccaatccggcccgctattggaacaccgaggtgaccgtcgtcggccaggtccaggccgtgatccccaatccggccggaacgacccggggaacgtacacgatgctggacgaaagctgccccaatccgctgacgatccggaccaacgacctcccccccgtcagccgtaatttccgggtgaggggagtcctcatccaggatccggcccaggccaacgttcctctcatgaaggagatttcccggtcctcgcccgggatgaccaatacgaccctctacctgttgatcgccgcgggcgcggcctttctctttctcttgatcgtcttcattattctcctgacgaagcccaagccgcgtccggccgccgaggaaaccatccggccggcggccccggtcgatccatctaaaacgacccggatcgctcctcccccggcggcgcccgcggccgcgccgaggggggccaagacccggctgtttctcaatttgggagccgacatcatcgtcgaaaagggtccggacaaggggaaggagttccccctccaccagcaggtgacgacgatcggccgtcccgggagccggaaaaacgagatcgaaatcaatgacgacaccgtctccaaggagcaggcctcgatctattacgacaacgcgaagaaagaattcaccatcgccgacgaaagcgcgacgaatccgacccgggtcgacggccgggcgatcagcggcccgacgccgttgaaaaacggggccgtgatcgagctgggtcgcaccgtcctgatattcaagaagagctgaggcgttccgaaacgaggcccggtgtatccgagaatcgaagcgttcgggcaaagcgacgccggctgtgtccgggaagtcaacgaggacaatttcctttgcttggacctgtccacggcgccggccgggtcggaaccggcggcgtttctcttggccgtggccgacggcatcgggggccacgccggcggagcggtcgccagcgccatggccgtccagatcctgagggaggagatcgagcgcgtggacggcgtcgatccccggtcgtatctggacgatgtcttccggaaagccaaccggctcatcttcgaacgggcttcccgggagccggtttacgccgggatggggaccacgctggtggccgcgatcgggaaaggggagcgcctcttcttggccaacgtcggcgacagccgggcttatctcttccgcgacggggatctccgccagctgaccgaagaccattcctgggccggggaacagcggcgccgccgtcttctcagcgaacaggaaatccggcaatcgccgttccgctcgatgatcacccggtcgctgggatatcaacaaaacgtgatcgtggacacgttcgacgtggaagcctgtggggacgatgttttccttttctgcacggacggcctctacggcctggtaatggaaaaacggatgtcccgggttttaagaaaacacccggaccccaaggcggcctgtgccgccttgatcgccgaggccaaggccgccggcggggacgacaacatcacggtcgtcgtcgcttcgttcaaggaaccgggcgacgctccggccgtccggccctacgacactgtccggattcctccgtttccggaggagaagccgtgaagatcggcggcatcccggccgctgtttcgtgaatgaccatgaatccctcccggcctccgggatccgctggaccctcgcccaggtcgtcgccttcgccttcctcccgacggaagccgcttcttctcgccgtcgggctcatgatggggcttgtcgccgtccttgccgcgatcctccttcgttcgtcccggaaacaagccccggtcgccgcccgggcgggcggatcgctcaaagtggagatttccgcaaagggaatcctcggaagcgacgcgaataacgctccgccgcttccagccgggacgttccggccggagacgggaaaagcgaccgaccgatcgccggccggagccgttccgtccgttccggccgagatggttccttcgacaccagcgtcagccgttcaggttccgcttcaggcgactccggcccggaagctcgctcaggcctcggaagccctgaaccgggggggggtatcgcgacgccctggacgcggccaaaacggtcgccctggacgcggtcatccgcttggctacggggggaatcgaggacttggtcggattaatacgtcctgagctataaaatcaagcacccggcggggttcttccgggatcatgccgcgccggacgtctatcagcgccttcggcccgacctggaaatgatgacaagcgcctcccttgacatccaaatcgtgatttccaacctgaagctcgatttccaggcggcccgctatccggcgtacgcgacccgggccgtgttcgcccaggtcatgacggggatatcggcggccgtttttcctggatcctggaacgacgcggcggcgaggggacgatcacgtccgtcaaggtcgagtaggcgccggccccccatcgcctcgaactcgctcccggcattcgcagggagccagggcggcccaagcttcatccgccgtcgtttccggcggccggaaatcacggacgatccccccgtcgtcgatttcgacgacccggtcgcagccggcggcgatatgtcggtcgtgggtgacgatcaaaaacgtcgtcccgctttcccggttgatctcccgcaacaacgccttgatggcctcgctcgattcggtgtcgagatttccggtcggctcgtcggccaggatgagacgcggttcattgatgagggcccgggcgacggccacccgctgttgctgtccgccggacagggcgtttgatttatggttcatccggtcgccgacgccgacgcgctcgaggaggcggcgggcccggacggaggccgcggcggtcgtccgcccgtgagccgcccggaagggcaggagaacgttttccaaggcggtgaactcggggaggagatgatggaactggaagacgaacccgatcgtccggccgcggaaagccgccaggccgtcgtcatcgagagcgaagatgtcccggccgtcgacccgcatctctcccgaggtcggccggtcgagcgtcccgatgatgttgaggagcgtcgactttccggacccggaccggccgatgagggccgcgtattcgcccgccgccagggaaaggctcacgccccggagggcggtcgtccgggccgtcgtcccgtagattttaacgatgtcgcggagggcgaggaactcagccattgcggatcacctcgatcggactgagacgggaggcccgccgggccggaatgaaggccgccagcgttccggccgcggtcgccgcggcgacggagacggcggccgcgccgaacgagacggagaaagggaaggcggagggggagccgccgctgatgccctggaaaaggaaaatgagcccggccccggccaggacgcctagaaccgagccgagaaaacccaggacggcgccctggatgacgaagatccttccgacatggcgggtcatcgtcccgatcgccttaaggatcccgatctgacgggatttctggatcaccgaaacggccaaaacgccggcgatgcccagggtgacggacaacaggacgaacagttgaatcagggtggaagacgagctctggctccgaagggcggaaaggagcgaggcgttggtctcttcccagctccgccaacggaccgaggggaaaaccgcccgaagctcggccgcccgccgctcggcttcgaacacgtccttcgtctggagctcgatttcggacaagccccggtcgagcccgatgagattctgagcccgggccagggagaggagaatccaagtttcgttgagaacttggttttccaggtcgaagatcccgccgacccggaagaggtcctcgccgccgccggccgcggacaggcgaaggaccgagccggcctcgaggcgaagcttggcggccaggtcctttccgatcaggaccgtgtccgggccgacttcgtaccggccggcggtcagtctgcgccggatatcgtaaagccggtccgcggtctcgagatccgcgccccggagaatcaccgggaggattttttgcccttgccagacatatcccgatccccgggcgacggggaggatgaccgtgaaggcgccgagcttttcaatctggcttccgatgacggccccgtcccgaatcaccttgacgccgccttcgttggtcacgatgcgaacgatcgttttttcccgcgggtcggacggcagaacggcgacgggctcggcgtcgggcgtcgttccgatgatgtgcggcgcatggccgaccgtctttcggatgagatcggcctgcaatccggagatgagggcgttgagaaagacctggacggcgatgccgaggacgatgccgcccaggatcaggaacgtttgggcccggctttcccgaaggaagcgaaaagcgacgaaaacgtcgaacatggcctattcggggagcggtttgagcttgatcttcagcccgtctttcagcccttgcggaagcagaacggattgaccgcttttcaatccttcccggcattcgaataagccgctgcccaggtcgcggaccgagacgggaacctttttggctctcccgttttcctcgatgtagacggaggccttctctccttcgcggaggatgaaccgctgctcgagaagcaggacgccggtcgcccggccggtcgtgatctgggccgatacggatgattcgggcaacagatccggctcgaaccggtccagggcgatgacgatgggaaaagagccgcgctgggcgtcgacgatggctcccagccgttcgactttcccggtgaagacgcggccgggatacgccggcgaagtgacggaggccggttgccccggagcgatccggccggcgttggtttcgtcgacctggatttcgatggacgtccggggcgcttccgggatgaacagggcgacgcgctggccggcctggacgaattcgcccgcgtgggcgtcgtgggaaacgaccatgccggccgccggagcggtgagaatcgtgtcgtcgaggtcgagctcggctttcttgaggtcgttttccgtcttggaaatcgccaagtccgcctggacggtctgcacttctttcagcgaccggagttggttttcggccgcggccaaggcggaagcggccaaatcccggtccctccggctttgttcgtactgaagaagggagacggacttttgagcgaaaagttcggtttggcggctgaaaaaatcggcggcgtaggcgttgttggctttggcctggcggaccttttcctcggcgtcggccaggtcgacggagagaagcttgtctttcttgagccgggcttcggccaaggcggtctgggcctgggccagggcttgttccagcggacgggtgtcctggcgcatgagcacggaatgggccgcgattcggctgccgtcccggatgaattcggcggcgatcctccccggccggacgaaggaaaggggaacggatttttccccgacgacccggcccgaggccaggacggtttccagggcgtcttgggtcgcgaccgtcgtcgaccaagcgggcgtggatttgaaaatccgcggaagaatgacgagggcggcgacggccgcggccgccgcaagccagaggagaaccttgctgagggcggggccggtgggcttcatcggaacatacctttcttaatggaggcgcaattcccgtcggaaagacggcatcttaaccgaatccgaagcgggaatcaaccgacgatttcgtccgccggcggggaaaggcgaaggccgtgttataatccgggccgtgatcaaggccaagcccggagatttcgtcgtcgaggagagggccgatctcccgctcgagccgggaggccgctacgccgtctaccggctccataaaagcggctggaacacctcggatcttgtcggccatttggcccgccggttcggatttcctcccgggcggatcgcttacgggggaaaaaaagacaagcacggcctgacgtcccagttcatcaccatcgaggacgcggccgaccggagcctcgagggaaaggacttccggctcgaggcggccggccggatgaaccggccgatggggccggacttgatccgggccaacgatttcaccgtcaccctccgggacctggccggcgccgagtccttggagccggctgtcgggcggatcaagacggaagggtttcccaactggttcgacgaccagcggttccggagctacgatcccgagcggggttttttcgccgagaagatcctccgccggcactggaacggggctctccaggtctacctgacctcggtcactccgggacttgccggccgggagcggacccggcggctcgagttgttccgcgtctggcgggactggaaggcctgccggtcgatggccgaaggacccttcgagcgggaagtgttcgacattctccggaaagaaccggccgccttcggcgaagccctgcaccgcatcccggaggaggaaacggccatgcagtacgccgttttccaggctcatctctggaacgaaaccctccggaaaatcttccggagccgcggcctcccggtcgttgaaatcgccggccgcgaaggcccctatctcttctggcggaagctcggcaaggccgaccgggccgctctccatgccctccgcatccctacggccgcggcgaaaatggagtttcccgacccggaggcggaggcgccgttcgccgccgtgctggcggataaaggcttggcccggtccgatttccggacgcgggagctgcggcgggtccgcttccagtcatttctccggacggcggccgttgtccccgaaggcttcacggtcctcgagtccggcgccgacgagctccatccgggccgggaaaaaatcattttccggttctccctgccccggggatcctatgcgacaatgctcatcaaaacgatcaccctcgcgggaaatccgccgcggcggagaaccgccggatgaccgggttcgaggacgattatggaggaggcgcttgatggattacgcgacattgttccgaggctttcccggcgcggtcacggtgtgcgaccgagagggcgtcattttagcgatgaacgaccgggcgatcgagacgttcgccggcggcggcggagaccgccttctcggaacgagcgtgttttcatgccaccccgagcccgcccggacgaagctgcgggcgcttctggccgagggccggacgaatgtctacacgatcgagaaaaacggcgtccggaaattgatctaccaagcgccgtggaaggaaaacggcgcttatgccggattcctcgagctttcgctcgtcctcccggcggcgatgccccatttcgtccgggggagtcaagaagacctgccgtgaacggcccggcgacgcgtcttttccgggagtaaggcgttcccgcgggccggagatttgatttttcccttctccggatttacattcctgttaaatcatcgggaacggggagacgttcatccgtttgaaggagggattccgtgcctgaaaaatccgtttgtttctgcgcgtatccatcagctttcatttacaatcccgcggacctctcggacgaaaagaaccgggcgaaacacctgttctggggagacacggtcgtccgcgaaggcgggcctcaaaacggctgggtccgggtttcgagccgcgacgtctccggctggatgcgcgaatccgacgtgcagtccgatccgcttctggacatcatctttctcgacgtcggccagggcgacagctgcctggtcgtcaccccggcggacgaaaaaatcatcgtcgatgccggcaaagaagacaacctcctccgctatctccgatggcgatacaagaactacgagacggcggagatgcgggcgatgggcggccggatcaaagccctggtcatctcccatccggacgacgatcactatggggggcttcgcggcattctcgacgatccgaaattcggttcgctcatcgatttcgaagccgtctatcacaacggccttttcccgcgggcggggagcggattggactccctgggcgcccggaccaaggttggaacgatcggctatctcgaggagccgatcgtgacccaggccgatcttgacgatttcttcgcccatgcggccggctggcaaagcctggaatacccctccctggtccatcgcctccggatgaaaaacccggcgacgaccgtccggatgattcatcacggtgcgcccgggatcgcgaatctcacggctgttccgggactatcggtcacggtcttgggtcccgtgcttgaaccgggcggttcgcgcggacgtctccggacgttctctggaagcgtcccgatgaccaaaaacggccattccgtcgtgctccgcatccactatgggagcgtctcgatcctcctaggcggcgacttgaacatcccgtctgagaaattcctgcttgatttctataaagacaagccggggatcttccggtccgacgtcctcaaagcctatcaccacggcagcggcgacttcgccgaggagttcatcgaggccgtttgcccctatgtctcgatcatctccagcggggacaacgaatcctactcccatccccgggccgatacgatgggcttcctggggaaagccggccgcggccgccggccgctgatcttctcgaccgagctggcccggtcctcccgggacatcgtgaaaaatcctttcgttctcaagaaggaattcgccgatctgaaagcgactctccatcgggcggatgtcggcgcgcgggagagggacaaggccgaaacccggctggccgagcttgaaaacaagctgatcaaccggagcgtctcggtctacggggcggtcaatctcaggaccgacggccgcaacctcttgatgtgccagaaaaaagaggcgcccaatcggcagcgggaggaatgggatatctaccttctcgaaccggatgcgacgaccggcggtctccgcttcatcccgaggaattgaagcccgccggcttccgtaatggttccgccggccgtgtttgaaacggatcgtcgccggcatcgtctcgaggcgggaaagattctcggcccccttgccgaggggcgatcgtctgaggcggccgtcccccatccttcgatatttttttcttgacaaccacctttggatcgtctatcatcgccgggaaatgaacgaccatatcacgcggatcatcttcccggccctcttccgggccgttctccgcgtgtcgttctggtgggcggatctccccgccctgtaacaccacccccttaccctttttccgcgcgtcgggagccggcgggcgtttcgccgcgccgtcgttccggcgttcctgaaaaccggtcaaattccccttgtcgggaagacgtctgaaaggagaacagacatgtcgaaaacgatttcccccgagcggttcgcggcccggaacgccgccttcctgcccgaacatttctataatatcaaggccgaccttccggcctgtccgcccccgcctcttcatcccgggacgaaagctccccttcggccttcggacctggaggctgttttttcccggggattcatcgcccaggaaatcacccgggagcggttcattccgattccgaaggaggtccgggaaaaactcgccgtttaccgcccgacccccctgatctatgcctccggcctccgccgggccctggacacgcccgcccatgttttctacaagtacgagggcgtcggccctgtcggaagccacaagagcaacaccgccttgatgcaggcttatttggccgcggcggagggggttgagacgctcgtcaccgagaccggggccggccagtggggctcggccttggcccaggccggctctttattcggcgtggacgtcagggtgttcatggtccggtcctcgttccggcagaagcccggccgccggacggtgatggagatgttcggggcgaaggtcgaggaaagccccggcccatcgacgaatttcggccgagcgctttatgagaaggacccggaccatcccggcagcctggggatcgcgatctccgaggccatcgaggtcgccgtcggcgggaaaaattcgaaatacgccctcggctccgtcctggatgccgttttaatgcatcagacggtcatcggcctggaggcggcggcccagctgtccgcggccggggcggaaccggatgtcgtcatcggctgcgtcggcggaggatcgaatttcggcggcctggcttttcctttcgtccgcggttctctcgccggcgagaggaagacgcggtatgtcgccgtcgagcccgaagcctgcccttcgctgacccgcggcgatctgcgctacgataacggcgacacggccggtctgacgccgctcctgttcatgcacaccctgggccgggatttcgtccccgcgccgatccatgccggcggactgcggtaccacggcatggcccctctcgtcagccacctggtcggccagggtatggttgaatcccggtccgttccccaggccgaggcttttgacgccgggaccctctttttcaaaaccgaggggatccttcccgctccggaatcggcccacgccgtcgccgcggcgatcaccgaggcggcggaggcccgggcttccggacaggagagggtcattctcttcaacttgagcggccacggttttctcgacctggcggcctatgccaaaaacgggcgcaactcttcctcgtaaaggagggagaaaagggacgacggtccctgcgccgttcgttgacgcggtcgccgggcggatgttaatatttcccgccggatacggatccggggaggaggatggcatctcatgacgaaccgtttgaaagaagataaaaaatcgggcgcggccgcgcttcggccggagaacgcggcccgcgcctcgatcgcctctttgaaagcctgcgccgaccccaagcgggccgaggggcagcgccgttatttcaaggaacaggtcgagttcctgggactgacgacgccgaagatgcgggaaatcgaggccgaagtctggcaaaaggtccgggggacgtggggttttcccgaggcggtcgccttcgccgaaacgatgctcaaggaacggttttacgagatccgcgccctcgggcttctgatcctcctccggttccgcaaggaattcccggcctcgtttccggaacgggtccgcggctggctgcgggccgaccggctggacaactgggccctggtcgacgtgttctgtcccgatgccttgggtccgattctggaaaaggaccccaagttcgtgacggaaatcaaaacatggacggctgactcgaaccggtgggtgaagcgggcctcggtcgtgtcgttcatcaagatcgcccgccgcggaacgcacttggacgcggtttatgagatcgccgtcaggctgtttccggtccaagacgatttgatacacaaggcgaccggctggcttctccgggaggccggcaaggccgacgcgccgcgtcttcgagcgtttctcctgaagcacgggccggcgatcccccggacctccctccgttacgcgatcgagcgttttcccgaaacggagcggaaagcccttctcgccaagacgaaaatggtgaagccgtgaacgagaaaatcaagatcagctgtctcggctgcggagggacgaaccagatccctgaggaggcggtcggaaaaacggccgtctgcggccggtgcaagacgccgcttcccgttccgggggaggttcttgagccgaccgaggagcaactggccgttctgatccagaaggccgctcttcccgttctgatcgatttctattcggaaacctgcgcgccctgccgggtgatgcatccggtggtcgaagccctggccaagcgccgggccgggaacctgatggtcgtccgggtgaatacggcggtcaatccccaggcggccggcgcgtttcaaatccaggccgtcccgacgttcatcgtgatgcggcgcggccatgaagccggccggacgatgggggcgatgccggagacggatttctccctctgggtggcgtcgctttcctgataggggagggcggccggcgtcagcggctggtcgtttcaggatagccggcgaagcggccgacgaggctcgcccgcgtctctccgatgcgttcgatcactttctcgaactccggcgaaatcctgagaatggcctcaaaagcccgctcggcgatttcccggttggccgccggcgaatagacctcgaagcgggaccccgcttcgcccgagaagtcggcgtccatgttcaggaaacgcgccgaagccgggtcgccgccgccgaacccgcccagggcgacgtgtttcaccttgggagtcgccgcggtcttgaaccaggcttccccgttctgcaaatcgcagacgaacgaccactgcgttccgccgcgctccaaggccgctaaaatgtcgaaggcataatcgacggcctctttcctctctccgcttgaacgccggccgtaagtctcgatcatctctccggcttggacgaagcgcggaatctcctccgcggcggagcctgttcttgattcccgggcggcgagataggcttcgcgcctcttcatttcgtattcgtacggctcgttgcacaaaaccggaaccggcatggaatcgccgcgatggacgacgacccggccgtccagaaactcaatggccgccgcacccccggagcggtcggccgccaggaagtgccatccccagccatccaggttcagggctgaggccgaggcctccacctggtcgaccgagtcgcaggtgtcgagcaggtgctggatccacaggctgacgaacatcgcgggcttgtccgggtcggcgggaaacttggacggcggataggagatctcgccgacgaagagcccagcctcgttcattccgccgtctgggaaatcccggccgaaggcgttgaacgtgagcgagtcgtacttcgatgtccaagtcagcggcgggccggaagcgggccggccggtcatcagcgccgcataggagactgaaaccttggttacccccttgcggttgatgaacaccgcgccggggaaacgagtgcgctcatccaggttgtgtccgatgacgcgcatcctttgtttccaaacaatcgacgccgattaatcgaacggtttcatcgccgtcgagaaggatcgtgtcgccgtcgataaccttgatgcaaaaacgtgatgattgtttttggattgaagcggcggataaaaatgcgcatgcgagtattattagaatcgatttcatctctttgcccgtcatgattccctccgcatcatcaaaataatgcccaagttatctacaagaaggcggattgcaaacactgcaaggcgtcaacccttgagcacatgcctcgccgagagtggtttggatcttactctgacttaagtattggcaatttccccgatggtattttgttcccgtagcggttttatagcagatgaaattctgccaatcgacggtaatcatgcaggtcgctgtcaccgtaaatgatccgtttaccgcggtaagcgtatagacggtcgtgctgttcggggaaacaatcgtcgaaccggttgccgaaacctgcccgattcccggatcgattgtccttgtaacggcattcgacacatcccacgataacgttgaggatgattcgagcgtgatcacattcggagtggcggcgaaaccgttgattaccggcggttggttaacggtgaccaggcacgatttggagacggctccgtttgcatttgaggcagtaagcgtataagtgacggtggcgttcggagaaaccgctatcgatcccgtcgaatcaaccgtgcctatcccttgatcgatcacgacattttgagcattggaaacgctccatgatagggtcgatgcggagccgagatcgatcgtttccggggaagctgaaaaactattgatatccgatatcaggatacgcccaatccgggggatttgtcttgtgtgcgttcagtccgatttgaaagctgccggggcattccggcgcgaagaatagaaaacgaaaagccggatgagtttatccggccggagagaaagtccggatcgacgaggaaccgattcccgggatttgtccgaatcgacgatccgcggatcattcctccggcgaattgactttcgacgaaaacagcgtggaaatgacgtcgattccgatgtaagcctgcaaatccgaaaagctcggaatgtccgatttcggcgagtaacaggtgatcctgataaagggcgtgattttgttgattctggccgagatcgtcaactcgcccccgacaaaggtctttttatcccaacccaggacggctttgtccgatagaaactccggcgtttgtccgagattcccgatgatccccctgatccccagcccgacgtccacgatgattttgagcgtgttgttgtcgccgaagttcctttcattagtgcaaaaccgcaggcttggaacgaaaaaaaagacctggcccttgtgggagacggccgcgccggcgatcgtcgcctcccaatccgtgaatgaaatccctccccggaacgacagccccaggctcgttttcgccccgttcttcaaaatatattcgcctgtcgctaaaaaggaggagccgttcgacgagggattcagcaaaaacgatccgaattgttcgggcaggccgatgactttattgtctcccgagatgttgtagaggaatgaaagcgagaatgtatcggacatcccgtagtagaagccgaatatgcctcccgcgtttccggttttttcttccttttccggcttgaggccggatgtcgctccggccgggaaggcgatgatttcttccggttccgggacggccgccagaagaggtattgaccgcgccgcgttcagtgattccgtcagcttttgcagaacggccggatccgcgtttgccgccctggcctgctcaatgagcttttcgattagctcggccgcgtctgacggccttctttgcggcggcttctttttgaccgcgaacgcgtcatttgagaggcttacgttttgggagaatccggttgatgataatgccagtgaggcaaggaaaaaacacaggacgagctttttgacaagcatgattccctcccggtaaattccctgaatttaatcgtaacttaaattcaaatcggccgattgtcaagaatcgcatcgctgcgatcgtccgggagggaatcgacgaaaaaacggcgaaaaacccccttccggggataaggggaaggaatgccgaagaggggactcgaacccctacgagcggttaaatgctcactagcccctcaagctagcgtgtctgccaattccaccacttcggcgcatatgcggggcggttattgtttcggaacttcagtcgccggcgtttgctgtccgggcgttttttccgccggggccgccgccggcgcttccgtcttggccggggcggtcacgcccttgacggccgagggagcttcgcgtccggagaaaatccagagacccagcgacgtgagcatgaaaacgaccgcgcaaatcgtcgtgatcttcgacatgaggctctgcgtgctccgcggcccgaacgcggtctggcttccgccgccgccgaacgcgccggccaggtcggccgccttcccggattggagaaggatggccacgatcaggacgaggcacacaatcacgtggataatcgtcaataaagccgtcacgttaattcacttccttgtaagcccggatcgattccttgacgatctccccgaacgaagccgcctccagcgaggcgcctccgacgagaaacccgtcgatgtccggtttccgcaaaagttcgcgggcgttggccggtttcaccgacccgccgtaaagaattataacatacccggaagccgcttttccaattttttctgcgagccggccgcggacggcccggtggacttcctgggcctgttcgggggtggccgtccggcccgttccgatggcccaaaccggctcgtaggcgaaaatcaacctcccgatcgtctcctccgtaagtcccgccaagccgccgtccaattggagccggatgacgtccagggtccgcccctcgtcccgctcggccagggtttcgccgatgcagacgatcggccgcaggccggaccggacggccgcggcgatccgtttccggaccgtctcgtccgtctcgccgaagtaccggcgccgctccgagtggccgatgatgacgtatcggcagccggcgtcggccagcatcggccccgagatttcgcccgtataggcgccggcgtcctcccagtggaggctctggccgcccagatgaacggcgatcccggcggcccggcgggcggcctcggccaaggctgtgtacggcgggcagaccacaacgtccgcttcctccgttccggccagggaagcccaggcctcgaaccaggcgcgcgtctcgccggcggtcatgttcatcttccagttggccgcgacgaacggacgctttttcatcgccgcgtcttcatccttccagggcgtcgaggcccggaagcgttcccttggcgatgaattcgaggctcgctccgccgcccgtggagatgtggccgatccggtcgccgacgccggccttagccacggccgcgatcgaatcgccgccgccgatgatcgaaaccgccggggaggcggccacggcctgggcgatctgcatcgttccctcggcgaaagcaggattctcgaaaacgccgagcggaccgttccaaaagacggtcttggcccggccgatgatcgccgagtaggtcgcgatggttttggggccgatgtcgacgcccaggaggacgtcggggaagggatattcgcccgtcatccggtcgatgacgccggaatcgatcgagggcgccagggcgtggtcggacggaaggcggagacggacgccgcgatcggcggcctttttcatgatcccgagggcgagatcgaacttatcgggctcgaccagcgatttcccgacgcccttgccctgggcggcgagaaacgtgtaggccatcgccccgccgatcaggacgtcgtcggccttgtcgagcagggattcgatgaccgggatcttgtcctccgtcttcgccccgcccagaacggccgtgaagggcttgaccggatgaaggaccttgccgaggaattcgacttcctttttcaacaggtagccggcggctttcgccgggacgagcccggcgaccccgacgaccgaggcatgggccctgtggctcgagccgaacgcgtcgttgacgaacacgtcgacgccccgggcgaactcccgggcaagctcgggatcgttcttcgtttccccgggctggaagcggacgttttccagcagcaggacgccgccgtcccggagaccggccttgaggcggtcgacgtcgggtccgatgacgtcgggggccatctccaccttccggtcgaggagctcggccaggcggacggcggccgggcggaggctggccgccgggtcgaattttttagggcgcccgaggtgggaggcgaggatcagcttcgccccgtgctcgctgaggaaacgaatcgtcggcagcgacgcccggatgcgggtgtcgttccggatctctccgctctcgctcagggggacgttgaaatccacccggacgaaaacggttttgccgcggacgtcgagatcttcgataagcttcatccttcactcaccttgcgatgtatttgaccaggtcgatgaggcggcaggagtaaccccactcgttatcgtaccaggccagaatcttgacgagatggccatcgatgaccttggtcgacaagccgtcgacgatcgccgaatgcggattgtggaggaaatcgacggagacgagcggctcgtcggtgtagtccaggatgcccttgaggggcccggcggcggccgtcttgaaggcctcgttgacgacctcggccggggcgggcttttggacgacggcgacgaaatcgaccagggagacgtccggggtcggggtgcggatggcgatgccgtcgaccttccccttcagctccggcaggacgatgcccacggccttggccgcgccggtcgtcgtcggaatttgggcgacagccgccgcccgggcccggcggaggtccttgtgcggcgcgtcgaggattttctggtcgttggtgtaggagtggatcgtggtcatgaagcccttctcgaccccggccagctcgtgcaagaccttgaccacgggggccaggcagttggtcgtgcaggaggcgttcgagaggatgtgatgcttggtcggatcgtagatccgctcgttgacccccatcacaatggtcacgtcgggatcggtcgccggagcggagacgatgaccttccgggcccctcccttctcgatgtgcttgacgacgtcgggccgcttggtgaacttgcccgtggattcgacgacgatctcggcgccgagatccttccagggaagctcgccgggatccttggccgccaggaccttgatcggatgtccgtcgacgatgatcgtgtcggaggtcgactggacgtccccgggaaaaatcccgagcacggagtcgtatttcaggagatgggccagcgtcctggcgtcggtgatgtcgttgacggcgacgaattcgatcccggaaccgcccgaggccctgagcatgttccggccgatccggccgaagccgttgattccaactttaatcggcatggcggttgccctcctcaaagaaccggattatcgatttctgattattgaaaagtatcacaggtgaagccggaaatgcaacgcgaccccgcgaggccggaatgtcgacgggagagccgcgggccggcggatatggtaaaatcggcccgaggaaattccatgaaaatactgaccgccgggcagatgagggagatcgaccgccgggcgttcgaggagttcggcatcccgggtgtcctcctgatggaaaacgccggccgccgcgtggccgaggaagtccggtctcttcgcgggaatttggcggaggagcggatcgtgatcgtctgcggccggggcaacaacggcggagacggcttcgtcgcggcccgccacctgttcaacctcggggcgcggccgaggatttttctcctggccgggaagaacgaggtcaagggcgatgccgccctgaacctggacatcgtcctccggctcggcctcgaaatcgtcgaggtgacggcggccgccgggcggtcccgcctgaatctgaagcgggctctccgggaggcgaccgtcatcatcgacgccatcttcgggacggggctgtccaagccggccgccgggcttgcggcggcggtcatcggggacatcaacgaatctccggccgagacgatcgccgtcgacctgccctcgggcctctcgtccgacacgttcgccgtcatcggaccggccgtccgggccgatgcgaccgtcgccctcggagcgccgaaaatcgcccacgtcttcccgccggccgaggactacgccggccggctcgtcgtcgcggagatttccctgccgcccgttcttctcgcctcgcccgaattgaagctggaaatggccgggccggagaacgccgttccctttttccggccgcggccgagaagcgggcacaaggggacgttcggccatgttctcatcttggccgggtcgcgggggaagacgggggcggccgttctcgcgggcaaggcggcttaccgctcgggcgcgggcttggtgacgatcgcgacgcccgaaagctgcgtccccgcggtcgcccggacgatgtccgagctgatgaccgagccgcttccggaaacggaagaggggacgatcgccggagcggcccggccgcgcctggaacgcctgctctcgggcaaggacgccctcgtcgtcggacccgggctttcgacccatcccgaaacggccgccttggtccgatcgctcctgccgggcgtccgcatcccgacagtcattgacgccgacggcttgaacatccttgtcgggaagctggggtttttaaaaaaaacggcccggcctccggtgttgacgccgcatcccggcgaattcggacgtctgctcggccggtccgttcccgaggtcctgaacgaccggctggccctggcttcgcggttcgccgcggagcaccgtgtcctccttgtcctcaagggataccggacgctggtcgccggcccggacgggcgcgtttccgtcaacccgaccgggaatcccggcatggccacgggcggttcgggcgacgttctcagcggccttctcggagcgtttctggccgcggaaaagaacgccttcggagcggccgtggcctccgtttatctgcacggggcggccggcgacatcgccgccgccgagctcggccagcgggcgatggtcgccggggacatcctcaaggccctttcccgggccatgaaagcgctggaagacgcggccggcggccggaaggggaggttgttccagccgtgacgaaaccggccccggcggaggaccaggtcctgacgacgcgcacggagcgggggacgtatctcgcggcccggcgcttggccgccgccttccggggcgacgaagtcgttttcctgaccggggagctcggggcggggaaaaccgttttcgcccggggaatcgcggccggcttggggatgaagaatccgcggctggtctgcagccccagctataccctgatcaatatttaccagggacgggttccgatcctccacttggacctctaccggctgggcggccaggccgagatccgcgacctgggcttcgaggatcacatcggcgaggcggtcatcctcatcgagtggggcgagcggatcgacttccccctggacggcatccgcgtccatatcggcgtcgagccggacggaacgcggacaatccgggtcaagcgtccggcgtgcggccgaaatcgagcggttgatcggtcgaggttttcagctcgcggcgaccgctgatcgtccggctcgccccgccgccggggaaaccgtttgacttcgccgccgcggatttgtctaataagggcgtctgtatttcaacgtccgaggcattcatgacacctgaacagctcaagcagcgcatcctcgaggtcaaggatttccctaaacccggcgtcgggttcaaggacatcatgccgctcgttttggatccggaatcgtatcattatacgatcgaccggctttccgcctgggcccggaacttaaagccggacgtcatcgtcggcatcgaatcccgcggatatctctttgccgccccggtcgcccgcgacctccgcctgggcctgtcggtcatccgcaaaaagggcaagctgccccgcaagacggtctgcgtccaggcgcccaacgaatacgccgtcgagttcttcgagaagcacgccgacgccctcgccgccggccagcgggtcgtcgtgatcgacgacgtgatcgccaccggctcatcgtcgatcagcgccctccgcctggtcaagatgctcaaggccaagccggtcggtttcggggcggtcatcgagctggccttcctcggcggcatcccggcgatcaggaaagcccatccggacgtcgatctttttcatctcgtccggtacgagtgatcgcctttcccggtccgccggggggcttttctttgttttcggactgacaacgctttttccggacgacggatcatccggtccggggaacggtcatttcgtctctccgcccgaaaagagcacccgcgcgatatcgcccttgaagatgccggccggcggcgatggatcttccccccgcgaaagaccggcgtgatccgcggatcctaatatccttcagacttcagagaaaaccgggagggctttggatcggctgattccgaagaagcgaccgaaagaacgccgggccttccgcctcgatctgaaaaaggaacccggcggcctccgcgcggagtttgccgccttcgccggccctcggccggattgtacgggatcgtcgataaaccggaatcctagcgcccgcgccgggaagcgggcgcggtttttccgttcatcacccttttttccagctcgttccagatgtcggcccggtgtccgcggcggtcgaaaagccggcaggcgtcgaccgtggcgacttcggctttttcctggaacatcgtgatcaagaattcgggcgcgcggcggatcccctcgccgatgttgatcaacacgcggtcgccgttgcggaggagtccgcgcttcaaggcctcgaagaacccgccgaggccgatggccgcggccggcccgatccggacggagcgttcgaacgccaccaggcgggcgatgagcggagtggcgtcctcgtcgaaggagaggatctcccctccgctttcccgcacgagcggggccaggacgggataggtcttgggaaagcccgcggccagggtggcgatgccggtccggggattgtggtagatcgggtatgttttttcccagccctcggggtatttctttttcttcgcttccgcccaagccgcggccatgggggcgcagcggctggactgggaaagaatgaagcggggcatccggccgcccagcccgaccggggcgaggtcccggcagcccttggcgatagccatcgggccggtccccccgctcagggcttggatatacacggtcgggaacttgccgagcagacggatccattcgagcatcatcgtcttcttcgcctcgatccgcatcggatcgaaattgcccccggccaggggcatcttatgtttccgggcgaaggccatggcgatttccttggtcagggtgtagtcgcctttcacccggaagacgttctgcccgaagcagccgatttcggccgcctgggtcagggatgcgttcttcgggatgaaggcgtagaaggagattccggcggccgtcaggtaccgggcgtaggccacggccgtgttgccggtgctggaggcgacgaagttctggatgccgttttccttgagaacgctggagacgatcgagccggagaggtccttgaacgtcccggtcgcgtagttgtcgtcttgccggtgggcgtagacttggcagcggatctggaagcgccggcgggcgtactcctcgaggaattcccaccggtcgatcgggacgaggccctcgccggcggtgacgatgttttttcggtcgttgaccggaaggacgtcgaaatagcgccacatgcccggaaggccgttggccggccggcggaagaggtcgcgaaccttggcgggcgtggtccggtaaacgacgtcggcccggtcgctgccgcattcggggcagcgctgcccggcctcgaaccaagggccgaatccgtcgatttcggctccgcagaggacgcaacgcaggacgaatttcttccgcaaggagcccgcccccgctatttttcgcttttgagatggctgtggagtccgcattcgagttttcctttcccggcccaccggccggaccgttcgtcgcttcccggttcggatttagaggtgcagcacggcgggaaacacccgatggaggcgtatccctgctcgtacaacggattcgtcggaagacggtgtttttcgatgtaagcccagacgcgttcccggttccaggcgaggagcgggtggatccgcaggccgccgctctcgtcgatcatcaccggccggagattccggcgggtttccgcctggtcgcggcggagagccgagacccaggccttcaatccgagctcccgctggaggccgcggagcggatcgactttgttgaggcggcagcagaggtcgggatcccgttcgaagaggcgggggccgtggaggctgagctgctcgaccttgctcatttccgggacgatggtgtggacattcagcttccactcccgcgtcaggcgggccttgaactcgagcgtttccgggaaatggtagccggtatcgatgaaatagatcggaaaatcgaaggcgatcttcctcagcatgtggatgaggacgaccccggacgcctggaaagacgaggtcatcgccgtctggtagggaagcgcgcggaccatccagccgagaatgtcctccgcctcggccgcggcgaagcgttcgttgagcttttgtatctcctgcaacaaggggcctctcttcacttcaagaggcagcgagtataccccttctgtcaattttttggaaatcggcttcctcaatcttcaaatgaatcgaaggcctgagggaggcctccccgcgttgttcatacggccgcttcgatcaggacgggagcgagaatccggaggatctccgccggggccattccggccagttgtccgcgcttgccggcgttgatccaaacgcggggggattcggtcagcgtccgttccatgtagaccggaaggtttttcctggcgccgaagggggagatgccgccgacctggtatccagtgtggcgttcggcggcggccggcgggcagggcgcgaccgacttgactcccaggatgcgggccagtcgcttggccgagacttcccggtcgccgtgcatcagaacgaaaaaaggagtccggccgtcggtttcgaatacgagcgtcttgatgacgtcgtgctcctcgacggccagggcgcgggcggccgcggccgtcccgccgtgttcttcgtagcgatagagcctgatctcgaaatccgcggcgaggtccttgagaacgcggacggccggcgtcatggacgtcattttatttttttcacccggcgggcgattttccggcggatcttatcgtacgagggcggcgggccggtccggacgggctttccgtcgatgaacaaaccgtcggcgatgccccattcgagatacgccgcccggtcggacgtgtccacctcggtgaaggcaacccggtcgccgaattccgcggccgcccggcgggcccgctcgccgaccatgttcatcgccgtgcaccagccgttccggaacacggcgaccgacgtccggccggggaccgcggcgggtctctttttctcctggatccaccgcggggcgacggcatccggggtgaaaggcttccagagaaggagggcgacctcgttcttgtcgaccttgcgatagccgtgctttttgaaccaggaggcccgcatgaagacgggaaggccgacgccccaggcgaccatgcccttggcctccttcgcccgggcgtcttcctcggcggccgccaggagggcgctgccgaggccttttttccgctggtccccgatgccttttcccttgtaagcgtggacccagatgcagtggatgaaataaagatcgcggccttcggcgaaggcgtgctcgatcgggacatactgaatcatgcccgccggccggccgtcgacgagggcgatcttgacccggagacccttctccttcatccgccggaaccacgtctcccgatgatggccggcttccttcggttcgtccgaccagccctccaggcagacgaagtaatcgttctcgaaccgctcatccagatcgatgatttccatggccgcctccccgcgcggcgtgattataacccaatattaatgaggagacacaatccccatggacctcatttttttcgtataaattcttagttcggatcaggcggaaaaggaaacataaagcggaaaggaaaatttattagggtgaattggcacggggtctcccttattcctctttcatttggagataattccttattttcacgcgcttgatgaccttcagcccgtcctggccttcgtcaatgaaatacacggaatcgtttttgatgagcgaaggcgtcgcggggaattccgtccggtagagatagcggccgtgccggctgaaaatatccgccttttcggccttgttttcatcccaaaccgacttcactcttatggcgtaaattcggcctttgtcatcactcatcaacttcttgaaaaaggggcgatgggaaggaaagacgcaattcttgcccaagaatttcttttcttttgaagaaatggaccggggcttttcatcccggtccatcacggatttcacgttgccgtcgaaatcatagagtatcaattgatatcgagtgttttctccataacataacatcgtattgccgatcgggcaaaaaaaggaattcgccgaataggggtgaatcattccccccatgactccgcccgtttggcttcctgagatcttcaccccgcgtcatccatcgttttcaggcgaagaatgaccgccccgctcgaatccgctttcacgaaagtctttttcatctccagattgatcatgtcccaagaaaaagcgtagatgaaaccttcgccggttacgtagaaggcgttggaatcaaagggaatttggaaatccaatttgatctgatgccgaaatgttccctccttgtcaaaaacgtgcagcaagccgccttgatcattgacaaagagatcgtcgtgttcgtcgacgaaaagactccggggttccatcaattccccggggccctggcctttacggccgaatgattttaagaaaattccgcggcggtcatacttcaggatactatttttatccaggacgaataaattttccgccgcatccgcggccaggtccctaatgaaagaaaaacgataatcgtcgttctcgttcgattcgcgaatgacggcttcctcttccagctcaagcgccagggttccatgagcggcccgattttccgcgattttacaggcctcatgggcaatcatggccgcgcctgaagcggtgagccagaggaatagactaaaaatccaagcgatcgcgtttcgccgcgtccccattttccggaggcgattctccataaaatcctgccgcgattagaatttaaataaaatgctcctttctttaatggttccaattccatagattgcttttccgccggcgatcaagaagtctctcggagtgacggtttcttttcccgttttcaaatatatcttttttgataatttatgattttcattgaataataaaatggaattatcccattcatcacgggagccggaaccggccgtattcgggatataaaaaatccttccggcttcatcaaccgcgaatccactgcagaaagatatgcaagttccagatgaaacggaatcatctttaaacgtttccggcgtatcaattccctccgcgtcgattctcccggcgatcgcgtcgatgacggggattccgaatttccgtagatccaagacggccgtccggccgccgttttttccgctccaggagatcaagggctggttgataaaggcgtaataaatattttcgtcgcgcgcaatcatccgtatcctgttgaacgtgttatatccaatcatagaattgcacttgataatcgggccgatcttcttgacgagtcttccttcatggtcatagacggaaatgagcttgccgtcattcctcgttttgttggatttatcaatgacattcacgtaaatggcctcgcggtcgacgcaaagagaggtggggggccaggcattgtcaatcttgaaagacgatttgaattcgccgtcgaggttgaaaatctttacttgacggcccgcatcattcaggacatatagagaatcgttttccaccagtatcgccgttggagagaaaaaggcgtcggcctcctgtccgattcctccgatatcggccgcgagccggcccgtcttatcgaatttttggatcctgtcatggccgaacttcaggtaatagatattgccctgttgatcaatggccatattctgaaataaattgaagaagggcatgatcttataatccggaataacggcattcaactcgagaagaggggtgatttctataatctccatgggtatcgacggattccgggagcaccctttataagaggcgcaacaaacaacaatcaacaatataatcgactatataattttcattaaaaacctcaaggaatccggccttttcaaggttggaaccgcgaggctgcttttatagaaaaccccggcgaacatcgggttgcctttcgggggccgcgatgagatgattcgctgatcgtgtttatgcgcaatcataaactttcctttgacatgttgtcttccttttattgaacgacccggaagatgtcgatgataacctgattcgcttcttcatcgaccatcggatctcccttgtggacgcaatacagaagatcggctttccccgccagcagcaagccgtcttgataaacaatcttatccaaggaaaaaccgtttccgatattgtaaaagagcagggcgaatttctttagatgcggttggcacgttcgcgcttgaatcaccagatatccgccctgaagcacggccattcgggtgaccgcggaaaaggatgtataccagctctccatgtccttaaagaattcaagatcgtctttatagttttttacgagaaaaaaatccttgggcatggaaacataaaaatcgggccgcttcaattcgatggttttcgttgaggcgatatgatccaatgagatcgcgtagagcttcatttcgtgctgggacaggaaatatacataacgtccgtcgacggcgaagtgtttccggatttcatgataacgagagggttcgggatattgaatcccgcaataatccccttctattttttcagttttgtcgttatagatccgcagcaacgcccctttgcgcacgcttttcatcttttccaagatgattattccccccaagaaaaaccggttgtcggcgaaaaacgcgtccttgagataatacgagccagggtcggatttcaaccacttctggctatgataatcgtaacgattattattccttcggaagagtttgatcttgtttttatggacaaacaccgccaggtcgccatggtattcgcacattccgtaagtgccgttgatctcattgggcccttggccccatcgggcaaaagttacgaatttattttcgttgaccatcgatatcccggaacgatggaccaagatgagattatcatgttcgtccaatagagaccggtagacttctccgttaaaatcggcatcgtgcttccactgtttgaggagttgaagatcctggggatacgtcaagcatccgaaaccgaagaaaaacatcaatccgtatagtcccctcgtcaaaaagctctttctcatgaatcgcccttgaaaaatcaatctcaacgcaatgttgggttaaaattcgactttataaatatctccctccctcatatatcaaaataataaagttgagataacgggaagtcaagatagatgcatccctccactccggagggggcctttttctcgagaggagcggagtcggaggcaagcaatcgcggagaggttgcgccgcgtgtacgaggagggtcggcccaagaccgggcacttcgtaccagtcctcctctttccgggacggaattcttccccacagcgataacctattgatcgggccgccgttaatgatcttcagcttgtgacagccagctgcgtattctccccatcaaaaccgggagattgtcgtagctcgtttcatgtctcgtctcgatttcagcgatgaactcggctgctttgctttcctcgacgggggaacctgcgattgccattctttccagaatgaccttatcataaccatcccggagaagatcgggaattccagaaaccatcttgtgcttttcgagcggtccgaagaaaacgaatccggtaaaaacatcgtggtatgtatagtcatgcttgaaaaacgggaaataatcgaaatgatccgccccgaagacgttctccttgaaatcgaaccccagatcaggattgccggcaatcctaaaagcggcgtcccacttgccgtcgcaaatcggcgctgtgaccgctttcctgtcgtctgagccgggaagaagggctacgctgttgatcatcacgtttgccactcttccagggaaagcctcgaaaatgtatcgccctgcgttattcgccttctcgcccttcgcgttcttgacgcggtcgttaaaagcgtggcggtagttcatgatgacaagggccttcttgcgcgactgagttgatctgaggatttctttgaattcctcgataatctgctcggccatgacctgatcccgctgaacgagagagtttgagaacgatgcatatttctcccggttcatgccttcccacgagaacggcatgtcagagaagctgatcttgatctttaaatccgcctgtagtgatctgttgagcgcgtacagacgtttcaaaaaatcaaaaaaattttgcgtttcccaaacgggcatccaaaacaggttccgaaagagatgcatgaccttgcgatctgcttcggcgtcgctcaggccgtcggtggacatgaaatcatgtagatacgcattgttcgtactggtaccgatttcggtgaaaacgtggccgaccttgtcggtaaatttcttgtccttgattagattatagatgagatcatattgagtcgtttcgggatgaaatctttcgcacaagatgacaatgtcgtacttctcgaacagatccaatatgtaatcaaccggaccgcgcttctgagtcttcaagaaagcgacgtacggcgcgacctctttgttgtattgtcccgggtcgtgccctgtggacgccgataatgcgggcacaagaagaagcaaaacaacgcaaaaccccgctctattcattctcgccatgttcgcctcctccggctcaatcgtcatatatcgatacgcgtgccgacctggaaaggttctagggagactaaagaaatttccctttcgcgccctccggcaagatgagggcggaacgcccgtggccgagatcaagatggagatctcggaagtcaccctcgagagggtcgagttacgtcgccgggattacaacgccgaacagccgcatagtccgctcggcgacgcgattctcgaggagttggcggctcgagaggaagttcgaaaagcgccgcccagcctgaatccggaagcgatcaacaacggacttgcatatccgaaaagttactgacaaaatgggcgaggaagggggagcaggtcaacgcctcgattcatcactctacaggcggtacaatgaacggaggcaggttgatcaaatcgcaaaaagagaaacgggaggggggctccttatgcggttcctcgaaggagggcggccgatgaaacgattgatcgtcgtcttcttaacagcggccatgatccctgcactcgtcttggggacgcgcctggagaggattgaccattggaaacacgagcaaatgtattggggaccgatatcggggtcgtttttggattccgcgggggatcttattttgatgttcagaaaaagcggaccggtggccgtgagtcaagacaaaacgacggcgatcgctcccttcggccaaagcccggatgaagcgacgcaggtctttacggtatgcgaataccggggagacttggctctgtttgaggacgtaaacaagatcaaaatatttcgccggacgggcaagacatatcatggggaaaaaacgatttggctgaagagggacccgttcctgtttcttttgaagacggcgctattcgtaaacggtcgatttttccttgccggggtgaaaatgctgaacggtccggtctccgcggagaaggtggacatcgccaatctgcatgccattgaggaagattcatcatcgccggggaggagcatcattctcgagcgcggcatcaagttcgatcgtcgatacgagatcgagcggtttcttatcccttatgggaatgacgttctctatatcaaacaaagcgagccgaggattctcttcatatctcagaaaactctcggcgtggaaaagacgctcgagctgaaggttccggatttctataaatccctgccaagggacttctatgcgttgaaaaattatcaagggagtttaagcgcgtatttattagacttggacacgtgggcgaagtcctattcggcgatcacgaaagcggtcctttatgaaaataatttccttcttattcagatgagaacgtgccgggagagcccgggcaggtttgcgctccttctctatgatttggaaaaagacggctctccggaggagatcgtttatatggatgacctgctgcttgccgaacgggacggccggttgtattgctatcaaaatggaaatccggatcttgacgaggaagcggatgagaccgcgatcaatatctataagctcatcaagaaatgaaaccgattttcgggcatccggccatggatgtgtcgtgatcgccgcccatgattccccggacgaggttcgaaggtcagcctaagtgagacaagacgctccgagcgagcgtctttcattccatggagccgttgcttttcccgatgtgccgtgatatgaaaacaatgctgagaatgagggttaagcaaaagaatttccagtcgaatagcagcttgagagactcgttttcttgaagccggggcgacgggttgctctagctcggccgacgacaaagggggcggagatgcggcgtttgaaaacagcgtgggggatcgtgcttgtcctggtcgttttgatcgccgggggatacgttcttttcctgagaaaaccgccgtccggatccggaaactgggaggacgcggagggggtttccggcctcgcgccggctgtttcgggatcgcctaaaacttcggccgaaccggcgcctcttcccgtcaaagccgtgaccgcgctgcgccgcgatttgatcatcacgctcaaatcccccggcgaagcctataccgagaggaaagccgtcttgaaggcggaagccgggggggtgatcaagagccttcccgcccgggagggcttgcgcgtccggaaaggcgacgtcttagccgagatcgacgatgccgaataccgtctgagcctggataagctcgaagccttgcggctgaaatatctttcggagcttcacctggaaaagcagttcgccgcggccgatgatgaagcctctccggaggcacaggccggcctgacgaaggctcaagcggatcatgaggcggccctggccgcgttccaagcgggaaaaatcaccgccgccgacttggaaaaagcaagcagggactatgagctggctctcatcgccgccggccggaagaaagaggaaatcatcgccacgacaaaggggctgaccggcgccgaaatcgacgtcaaaaccgcccggctgatcctcgaaaaaaccgtgatccgggcgcccttttccggaatcctgaccgacttcaaggtttccccgggggaacgaatcgaaagcggccgggagatctgcacgatcgtggatctcagccggatgaaggtcaaggccagggtgctggagagcgacatcggaaaaatgatgcccgggcgcggcgtcgatctccggttcagcgcttacccgggccgggtgttcaagggcctggtcgaatccgtcggtccgatcgtcgatgccgaggacaaaacgtgtccggtgttcatcgccgtggaggggtcgggagacgagatcaagcccgggatgcacgccgaggtcgagatcgcggccgaaatccatcggaaccgcctcctcgtcccgcaggacgccattctcgtccggggcggccggaaactggtgttcgtcgtggaacagggtttggccaagtggcgatacgtcgagatcggcctggaaaacgagcacgacgccgaaatccttcccgggaacgacgcggcttcgggaatttccgaaggagacacggtcatcgtcgagggccatttcaccctggcccatgactcgagagtcgtcgtccggtagacccgctttcaaacgaagggaaacccccatgacgcgcttcaacatcatcggttccacgcccgtccgttcgcggctcgcggccgccggtttgcttctcctggcctcggtcatcgctcccgctgcgcccgggcggcgggttccggaggaacggacattgagcttgaccctccggcaatgcctcgacacggccctccgggagaacctcgctttatccatcgagaggttgaacccggccatggacgcgctcgccctcaaggaggtccgggagaggtacctgccgcaattcgagctgacctatcaaaacggcgacacgaacacccccggaacatggggcgtggaagggtcggacatcgccagctcgttcgattccgtgaacctcggcctggtccagtcgttcccctggggaacgtccctgagcctcggcgtctcgagcgccatgaccgacacgacgcgatccttttctctcatcaatccctcgtatttcagcagcgtccggctcgacgtgaggcagccgctgctgcggggattcggatccaaggcggcgaacgtcgaggggatcaaggccgcccgggccgtggagatggccgacgcctccgtccgggcggcggccgctcagacggccttcgaagtcgaggcggcttactggaacctggtcctggcccgggaaaatctcaaggttcaggaatcgtcgctggcgtcgagccggcagatcctggaccggaaccgggaagcggcccggatcggaacggaatcgggaatcggggtcctcaacgccgaaaccgaggtcgcccgctatgaggatgccgttctcgcggcttcccgggccgttcaaagccaggaagacctcttgagaaagctcctgcgtcttccggccggaggggaagcggggatcatccccctggatcggccggagatcgagatccgggaggtttcggccgcggacgtcctgcgggcagccctggcgaaccggccggaaatggacatcgcgcggcgccggatcgataacagccggagcgatgtcgactatttccggaatcagtccctgcccaaggtcgacctcaatttttccttctggagtcccggcatctccggcgtccggtacgtctaccaggacgacaatccgttgagcggcgtcgtgatcggccggatcgccggcggccggggcgaatccttctccgacatcctcaaggggaaatatccgaattggagcgtgacgttgacgctggaggtgccgatcgcttcttttctttcgcggaccgggctggcccgggcgcgggcggccggcgagcaaaacgagctccggctcgaaaaggaaaagaacgacatcgaattcgaagtccgggacgtcatccgggaattggaggcgaaagcccggatgatcgcctcctccgcccggtaccgggagctgacggaaaaacgggtcgcctccgagacgcagcggtaccagcaagggctcgtcggaagcgaatggctgttcaattaccggcgggagctggccaacgccaagtccgctgaaatccaggccgtcatcgaatacaagatcgccctggcccgcctcgaccggatcacgggcgcctcgccggcggcgggcggggaacggaatccctcatgaagctcgcccgcttcgccgtcgaacgtccggtgacggtgtcgatgtttttcctgggcgtcattctcttgggattcgtctccctccgggagctgagcgtcgacctcctgccggacatccgctatccccggctggccgtcgtgaccgcttacggcggagcggcccccgaggagatggaaaccctggtgacggccgccctggaatcggccgtcagccgggtccccggcctccgccgggttgaatccgtctccaaggaggggatctcccatctcagcctcgagttcgattggggcacgaacatggatttcgcgatgctccatgtccgggaacagctggacgcggcccgcgacggacttcccgagggcgtcgaggatccccggatcgtcaccctcgatccccagagcaagccgatcatgaccctggttctgaccggagatcgcgcccttctcgagctcaaggagatcgccgaggacttgatcaaaccccggctcgaacaggtcgaggggatcggttcggccgaagtcacgggaggcgtcgagcgggaaatcgcggtcgaagtcgaccccgcgaagctcgccctgtacgggctgacgatcgaggagatcgccggccggatcgacgctttcaaccgaaacctgcaaggcgggatgatccggaagggagcctttaaatatacgctccgggtggtcggtgaattcgaaacgatcgctgaaatcgccggcatcagcctccggatcacgaaaagcggcggggtcatccgtctcggagacgtggccgccgtccgggacgtcctcaaggaacggcacgggatcacccggtggaacggggaggagagcatcggcctccaggttcggaaggaagccggggccaacacggtcaaagcgacgaaagccgcccggaaggtcttgcgggagatccggaaggaaaaccccgggatcggaatccaggtcgctgccgagcaggccggcttcatcgaaacggcgatcggggcggtcaagaatgaaatcatccagggcgccctgctggcttttctcattctctttttgttccttcaggaatggaaaacgccgctcatcatcgacaccgttatcccgatctcggttatcgggacgttcagcctgatgtatttcagcggcctcaccctcaatctgatgtcgctcggcggcctggccttgggggtgggcatgctcgacgactgcgcggtcgtcgtttcggaaaacatcttccgccaccggaccctgggcaagggcctcaaggaggcggcggtgaccggaacggcggaggtcggcggggcgatcgtctcgaccgccctgacgacaatggtcgtctttctgcccgtcgtttacgtgcgcgggccggccggtcagttgttcaaggacaccgccttgaccgtcacgtacgccttgagcgcgtcgcttctcgtttccttgaccttgatcgggatgctccagtcccggcggttcaccccggccgaggccggggagggacgcccctggtcctggcggtgggggctgccgcccgtccggggaaggaatcggcgaaacgcggttctttggccgctgcgggccttgcggtggttgctgtacgcggtcttcaaggggatcggttttgtcttgaacggcttggcgacattcgccggccggcttcttaaacctgccgttcattttctcggccttcccttccggccggttctccgggccgttttcggcggattcaacgccgcctacggacgattttgccggttcaacgatcgggccctggtctggtgcctcgatcacaaggtccggaccttggccgcgacgctgctcctctttggagcggctttcctccttggatcaacccttcgccgggagctgatgcccccgctccagaccaaggctttcgagatcgtcctgaaaacgccggtcgattattcgctcgagcagaccgcggccatggccggaatgatcgaaacccggttgggccgggagccggccgtcgcttcggtgatgtcgcagatcggcatcgtttccgggctggaggccgccgacccggacgtttcgatgaattcagcccggatccatgtcgagatagacgcgcccgggcgtctcgaaggagtcctcgaaactctccgcgggatcatggtccaataccccgacctcagctatcgcgtggccaaggatcagtcgctcctcggagaattcctggccctggggacggccgagatcggccttcggatcaagggaaacgacctcgaccggctgaaaacgatcgccggaattttgaccgcccgccttcaggcgattcccgggctggccgacgtgaacaccaacctcggcgagggcaagcccgagttcaggatgtcggtccgcaaggacgccctccgcaagtacgccggcttctcgccggccgatctcggcggttttttggtcgacgcggtcaacggccggatcgccacccagtacaatgaaatggaaaagaaattcgatgtccgcgtccgggccgaaggggccgcccgccgcaacatcgaggcgcttctggccgagccgtatccccacgagcggaagctcattccgctccgcgagctcgtcgattatgagatcgtccggggcccgagggaaatccggcgggagaaccagcagagggaggtcctagtgaccgccggcttgaaaaacgccaagatcagcgaggtcatcccgaacatcgagcgggaaatcggggccctcgatctgccttccggataccgcgtcgtcttcagcggcgagcgcgaggaaatgtcccggtccttccggagccttctgttcgccctcggcctggccgtccttttgacctatatgatcatggccgcccaattcgagtcgtttctccatcccttcctcatcatgatcacgatcccgatgggcgcggccggggccttgttcgccctgtgggccgcgggccagacgatcaacgtcatctcggtcatcgggatggtcgtcctggtcggactggtcgtcgacaacgccatcgtcaagatcgattatacccggcagcttcgccgggaggggacgggattgcgggaggcggtcgtcgagtccagccggacccggctgcggcccatcctgatgtccaccttgagcacgctcttcggcctcgtccccatggccctcggcctggaagccggggccgagatgatgcggccgctggcgatcacggtgatcggggggttgacggtttcgacgtttttgacgctgatcctcatccccgtcctgtatgaagcggtcgaggcccggaaggaacggaaagggaaccggggagccgcgtgaaattcctcatcgatcgtcccgtcgcgacggcgatggctttttgcgcccttctcatcctgggggtctattcctatcttcaaacgccgctcgagctggagccgaaggaggattatccccaggtcacgatttcggtctcctggcccggcgtttcgcccgaggtcgtgcagacgcgggtgacggcccccctcgaggaagccgcctccgcggtcaaggccgtccggggcatctcctcgtcctcggagaccgggatgtcccgcgtcgtcgtcgatttcgattccaaggccgacatggaattcgtccagctggccctgcgcgaggagctctccaagcttcggccggtgcttccgcccgggctccggccggcggtcacgccgttcgttcccgaggatttccgggtgaatcccttcctccggtacacggtttcggggaccgcctccctccaggagctccgcgggttgatcaaggataggatcacgttcggcctcggttccgtccggggcgtctcccgggtcgtcctgaccgggggatccgatccggaattccggatcgttccggacagagccaagctggatgcctacggtcttcaaccgtacgagatcatccgggccgtctccggccggctggggatttatccctccggccgggtgcgggacgaaaaccgcgagctcctgttcaaatacggcgaccaaatccgggacaagaacgatctggccgagacgatcgtcggctccgccggcggtaacgtcctccgcgtccgcgacgtggccgcggtcgacacgacctgggcggatgtggattccatccaccggatcaacggccggccgaccgtgagcttcaccgtccacaaggaaaaggggacgaacacgatgcgggtggccagggatgtcaaggccaagctcgccctcatccggaaggacctgcctccggacctcgtttttcaggtcgtggacgacgagagccgggacatcaaaaaaagcctcggcgatctctaccgattagccggcttgatcaccatcgtcgtcttcctgatgatcttcctcatcctccggcggatcggaccgtcgcttctcatcctggcgtcgatcgccttttccgtcgtcatcaccttcaacctcatcgccgccttcgggatttccctcaacatgctgaccctcggggcgctggccctgggcttcggcatgttcgtcgacaattccatcgtcgtctttgagaacatcctccgcctgcgggaaaacggccttcccccgcgggaggcggccgtccgggggccgcgggaggtcttcaccgccgtcctgtcatccaccttgacgacgatcgccgtgtttttcagcttcccgtttttccaggggaggctcaagatctattacctgccgctggccttcgtcatcggctcggccctggccgcctccctgctggtctccttcaccctgatcccggccttgagcccgcgcttgttgaaacggcgccgggaggagaccgcccggcggccggaggggatcttcgggcggttcctgcgcgcctgtctccgccatccggtcgaggtgatgctcgtcgcggccgtcgttttcatcggttcctaccggtggttcaaggccgaggtccggacgggggagtggttttccttcacctcccggcaatatctctttgtttacctcggcctgccgccggggacggacatcgagcggacggacgcggcgatcaagccgttcgaggatttcgtcctggcccaggcgtgcgccaaggaaatgaacgtccaggtcagtcccacgagcgccacgcttcgcgtttcttttccgccggcgatcgaacgctccgcgattccgtaccggatgaaagaggagctgatccggacggcctcccaattcgccggcctggacgtctatgtttacggattcgatccccagatgtacggctccagcatgggaccgggatcgttcctcgactcgaaaatccggttcttcggatacaatctgaagaagctcaaggaaatcaccgccgaggtggaaaaaaccctgcggctgaatccccggatccaagaagtcatgatcacctcgaacaggcacggttggtggggaagggggagttcgatcgagaacatcctgaaaatcgatccggagcggttgcgggcctacgacgtggacccccgcttcttctacggatatcttcagaccttgctccagggccggttcggggcgcccctggtcatccggacggagggaaaagaaatggccgcggccgtgaaatttcccgacgccgacatcctcgacctccgcggggtgaaggacgccttgattcgaacaagagggggggaatatctccgcctcggcgaggtggccgacttgatcgaacggccgtcggccggatcgatcgaccgcgataaccggcgcttccagcaaaccgtttcctgggaattccgcgggccggtgaaggccggcgagcgcttccggacgagtttgttcgccggtcttcatctcccggccgggttcagcgcctctcttgacgacgaccggctcatgaccgtccaagaacgatcccaaatcctccaggcggccgtgatctcgctgctcgtgatcttcatgatcatcgccgccctctttgaatccctgacgcagccgttcatcatcatgctggccgtcccgctgggcttgatcggcgttttccttgcgttcatcctggccggcgcgaccttcgattcctcggcgtatatcggcgtcattctcctggccggcatcgtcgtcaacaacgccatcctgctcgtcgatcacatcaacttgaaacggaagcgggggcgtcccttgatcgaggcggccgtcgagggcgcccgggagcggatccggccgatccttatgacgaccggcacgaccgtgtttggaatcctgccgatgctcctcctgccggtcgaatcggggaaaatgcggatctggtcgtccctggccctctgcaccgccggcggcctggtgacgtccgccttgtttctcctgatcgtcgttcccatcgtctatgtccaagtcgatcacctgcggcgatgggcggcggcctggtggagccggatccggagccgtccgtcttgaaaagccggcccgttgcggctaagatgaatttccgccgccgcggcgggacaatatctcgtcgaaaggaccgccatgaatcctactgagaaaacgcttcgcggaaagctggccgcgcttccgcgccttcccctcattcatcttcccacgccgatacggaagctcgagcggctgtcggccgagctgggcgggccggagatctggatcaagagggacgacctgacgggcctggccttcggtggaaataaatcccgcaagctcgagtacatcatccccgacgccctggccaaaaaggccgacgtgctggtcacctggggggcgacccagtccaactgggccatgcaggcggccgcggccgcggctaaaagcggccttcatccggttttggttctgttcaaatcctacgatttaccggaagaagccgacgggaacattctcctcgaccgtctcctcggcgcggagatccggttccaagaggcggtccggggaaagctcgtcacccaggaaatcgcggtggcggccgccgaggaagtcgcggcggagttccggtcggccgggaaaaatccctatcttgtctccaacgggggatcggtgcctctgggcggcatggaccggccgctgggggcgatctcctatatcggcgcgttcctcgagatgctggaccaggcggaaagccagggcttccggccgaatgccgtcgtccactcaaccggctcgggcgggacgcaggccgggcttctttgcggggcccgctgggcctcgcccgaaacccgggtcgtcggcatctcggtgtctgactcggcggattccttcacggaaatcgttcggacggtcgccgaggcggtccagcggacgcttcagatggagacgggaccgcggccggaagattacatcgttttagacgaataccttaccgacggctacggcatcgtgaaccgggaggtgaccggggccatccggcgcctgttccggacggaaggcgtcgtcctggatcccgtctatacggccaaggcgttcatcgggatgctcgacctggtcaagaagggctgtttcaagaagaccgataagatcgtctttttccatacgggcgggacgccggcccttttccccaataagcacaagctgatcgacgccctcgactgaggaggacggagggggcgtcccctccgcgtgcctcctttacaggacggccggctcgaatgcccccggcgcccggaaatccacgttgacgttgctctggtcgaaggaataccaggccccggtgaccgcgtcgatgatgaccgggaccaagccgccgaggacgtctaaaacaatccaccccgcgccgacgtggttgttcagataaaccgacttggtctggtcctgatacttgaactcgatcaggtagactttcttggtgatcaggcggaaattgatcggcgtggtccccatcaatttcccgtccacccagacttcggcccccgtgggattggagccgaaattcacttcctcggtcgttcccttgaacagcgtcgcgcagcttgccagggataaaacaaggaagaccgcgagaaacaaggcgaatttcgttttcatgttcagcctccgttcacttgccgggattcttgagatatttcaggagctcgctgtcggtcgtcaagatcagccaggtgtccttgatcagcccggcccggtaggtgtcgagcgatttcatgaactggtagagctcgggatcgaggttgtaggccgcggcgtagatgcgggtcgcctcggcgtcggccttgcccttgatctcctgggccgtcttgtaggcttccgactggatgcgcttcagctcccgctccttctggccgcggatctcggcgctcttgccgtcgccctcggaccggtacatcgcggcgatcctccggcgctcggcgatcatccggtcgaagaccttccgctggacctcgtcgacgtaattgacccgcttgatgcggacgtccttgagatcgacgccgaactggggggtgattttcgaggcgttttccaagatgatcgccgccagcttgtcccggccggcctcgatcttggagatggcttcggacgcatcgaggacggcggcgtcctcggagatctcgaaggcccggttggacgaccggacgatctcgatcaaatcgaacttggcgatggtgtttcgcgtttcgccgtcgacgatatcatccagccgcgaccgggcgttccgctcgttgtcgacccgctggaagaagacgagcggatcggcgatccgccaccggcagtacgtgtcgacccagatgtatttcttgtccctggtcgggatctggttgggatcgccgttccaggagatccagcgtttctcgaaatagttggccttctggatgaaggggatcttgaggtgaaggccggggcggatgatcgttccgccgaccggctcgccgaattgggtgatgacgacctggttggtttcgctcacgatgtagacggcgccgccgagtagggccaggagaatcaaggcggcggcgagataaagaacgagcgtggtccgtttcatcttggggctcatttcttcacctcctcggacaagttgagaagaggcaggagatttttcattttgtcgtcggcgatgaccttgcggttgatcttggacatgatctcggtcatggtctccaggtagaggcgcttgcgggtgacggccggggccttggcgtattcacggtagatcgagacgaagcggctggcgtcgccctgggcattgttgacccgctcggaggcatagccctcggcggcccggacggcttgttcggcctcgcccgaggccttggggatttcctggttgtactcggcccaggcctcgttgatcttcctctccttctcctggagggcttcgttgacgtcgttgaaggccggcttgaccgggttgggcggattgacgtcctggaagatcagctggttgacgtcgatcccgatttcatacagatcgcagagcttctggagatcttctttcgcctcggccgcgatccgggcccggcccgtcgtgatcgtctcgtcgacggcgttgtcgccgatgacccggcggacgacggcttcgttcatgtcccggaacgtttgctcggtgtcccgcatcttgaacaggaacttatagggatccttgatcttgtattggacgatccactcggcgacgacgacattcaagtcgccggtcagcatgatcgcctcggcttcgacatcggccggggcgatgtattgggttcgagccccgccgccgccggccgaccggaatccgaactccagcttcagctgccgctggaccgggaccttggtcagggcttcgatgcccaagggcagcttgaagtgaagccccggatcggtcgtccggacgaacttgccgaacctcaggatcactcccatttcatccgggtcgacctggtagaacgatccggccaggagaatcgcgaggatgattccgccgaggacgtaaaaaatcagcttccgagggattttgggaagcttgggcatttgcccctcccatccctgaaatggattctggttggtcatgcgcctctcctcctttcctttcgccgtcttccatcatacggaaaacgacggcgaaagtgaacgcggaatcccgaatcgagccgggcgggctatttccaggcggccatcagctggggaaggtcggacaggtcggcctcggcgattcggagccggctttggtccacgtcgccgagggttttcagcccggatccggtgaggacgagcaccgaagcggcgtcggccgggatccggccctccttggacattctcaaaaaagcggccaggaccgtggccgaggccggatcgctgaggagtccctcgtcctcggcgagcaggcgctgggcccggagaatctcggtttcgccgacggcttccatcgccccgccgtgggcggccaggagcttgaggacgactcttcccgcgggcggctgcgggttggcgatggcgtgggcgatcgtttggggcttgcggacgggaacgatggccgcccggccccgggcgaaggcccgggcgatgggggcgcagccccgggcctggacgccgacgattcgcggaaggcggcggattcggccggcccgcttcaggtccagaaagccgcggaggagaccgatgaggtgcccgccggagctgaccggaacgaaaagaaaatcgggggctttgccgcccatctgctcataaatttcgaaggacgtgaccttgtatccttcgatgcgatacggatcgacggagttgatgaagtagaagctcaagacccggccgatctcgaagcttttcacgaaaaggcgggcgtaattgccgcggacccggatgacgttggctccatgcatcccggcggacaggattttttccaggggcgtgtcgtccttgatgaagacgaccgtccgcaagccggccttggccgcgtaggcggccgtcgagccggccatgttgcccgttgaaatcgtcccgaccgtctcgaagccgagggccttggccatatggatggcgacgatcgagccgcggtctttgaagctcccggtgggattcaccgcctcgttcttgacccagagcggcggcgtccggaaagcggaccggagacggttgagagggaagaggggggtccctccttctcccaacgagagatccggatcgaattccggaagaggaagaaagccgaggtagcgggcgacgcccatcggccggccgcggcggatcgccggcgatttcgggacaaaggccgagagaaggggatcgccgcaggcgcggcaaaacaggcttcggacgtcggccggatagggccggcggcagatcgggcagatgaacgcatccaggctcatgatcgttgcctcttacggacggcgaaggaataccttataatatttcggcctcagatggaaacgaaaattagccttagcggacaagacgcccggtggatgggggaagcgcttcgggaagcgcggagggccgcggccaagggcgaggttccggtcggggcggtgatcgtccgcgaggggagggcggtggcccggggagggaacaagccgatccggagcggcgatccgacggcccacgccgaaatcgtcgcgatccgggcggcggcccggaagacgggcaattaccggttgacggggtgtgaaatctacgtgaccgtcgagccgtgcgcgatgtgcctcggggcgatcctccaggcccggctcgcccggctggtctacggcgcggccgatcccaaggccggggcggtgaagtccattatccgttttcccatccgcaaaacgaatcacaagctcgatgtccggggcggcgtgggggaggaagagagcgccgccgtcttgagggatttcttccgcgcccgccgcaagaacggccccgcccgcaaacccgaacctgtttaaccatttcccaattcaaatccgaacctggttatccttttccgtatttcaatcggtacctgtttatccatttcccgattttcaggaatttgataccggcgtctgtttaattgtttccgaatttaacggcatcggattccggacttgatcttgatttcattttggcgttttcgcccatatccgctataatgagtcgcttcttgcggagaggtgaccgagtggttgaaggtgccgctctcgaaaagcggtgtgcccgtgagggtaccgcgggttcgaatcccgccctctccgttcccgcaggaggagcgtctacctgcagtccttccctagtcatagggaaggcaggatgggtagatacggatacaaagggtcttaaagacgctccggtcttaagactccgcaggaggagcgtctacctgcagtccttccctagtcatagggaaggcaggatgggcagatacggatacaaaggatcttaaagacgctccggtcttaagaccccgcaggaggagcgtctaccggcagtccttccctagtcatagggaaggcgggatgggcaggttcataaaggagggccgccgtccggccgtccttctctagtcttagaggaggacggaggagcagagaattgatgatcgagtcttggaaggcggcccggtcttaagagcattccggtttttccattatcccttttctggaaaatggtcttggatgcggtttcgttttataatgcccgggataaatacgaataaatccgaacgacgggggaatgcatgtccccgccccaggagatgacttcatgtccatcccgctgatcctgaccggatacggaaacgtcggcaaggctttcgtccgcctgctggccgagaaacacgaggattgccgggcccgctatgggttggatttcgacctgatcgcgatcgttcgaaaggccggcgcctgggtggcgaacaaggaaggtgaatttttctatctggccgatccgtctccggcgccgctcgaatccttccccggctggtttcccgggatgtccttttccgaggttttgatacgcccgcggcgaacgggggttcttgtagagtgtacgtcctccaattggaggacgggggagccgcaactcgagttcatccatgccgccttcaacctgggctggcatgtcgtcgcggccagcaagggcgcgctggtcgtcgattttaagaatctccaagccaaagcccgggcgaaaaaactttccctcaagttcagcggagcgacggccgccgccctcccgacgctcgatgtcgcgacgatttccctggccggggcgaaaatcctgggtttcgaaggtgttttaacagggacaaccaactatatcctgagccggctggagcaagggctttccttcgaggaagccctcaaggacgcccgggcccggggaatcgccgagaccgatccgtcgatggatatcgacggctgggataccgcctgcaaggtcctcctcctggccaacgcctcggcggggacggagtttgttctggacgatctcgaggtggaggggattcgggctgtcgcggccaaggacttggccgccgcccgggccgaagggaatgccctcaagctgttgggacgcctttacgaggagggcggtcgtttcaaagccgatgtcaaggttcaggccgttccctcatcgcatccgcttttccggctgaccgggacgaacaaggggatcgttttccggacggatacgatgggatcgatcgccgtcacggacgggaagtccgatccgcgcggcacggcggccgcggtcttgaaggatctcatcaacatttatcgcgaccgatagggaggacgggaccgcgccctcggtgtcgggatatcggtacctgtttaaccgtttccttgtttattccccccgaatctttaatgtccacgactccctcatataaatataagcaggacggacgtttgcggctctcgggacgccgaatctcaccggttgggaataaggaaatggtaaaccaggtttggatttcaaatcgggaaatggataaccaggttccaattaagagtcggatgaaatgtattttccggcggagatctacagttccggcttagatggcccgcaaattgaccttgagggggcatttctggtattttatttcttcttaatcgcgttttttccggagaggtgtccgagtggctgaaggagcgcgcttggaaagcgcgtgtgcgccgcaaggtgtaccgcgggttcgaatcccgccctctccgttcctgcaggaggagcgtctacctgcagtccttccctagtcatagggaaggcaggatgggtaggttcatataggaggaacgcctgcctgacgtcctccccgagtcataggggaggaaggagggtaggtacatgcaagaaggcagccggaggagtagagaattgatgattgagtcttgggaggcggcccggttttaaggatcatgacgagaaccgatgaacgttctatcgaaaagcaacaataatttgaagccgtttcggtcttctgaattcaatgtccgccgccgagcgggccaaaggagtttcacgtgaacacaaaacagtacatcgccgtcgaagacaagtacggcgcccacaattaccatccccttgacgtcgtcatcgacaaggccaagggcatctgggtttgggatgtggacggccgcaaatatctcgatttcctcagcgcctactcagccgtcaaccacggccacaaccacccccgcatcataagggccttggtcgcccaagcccgcgagctgagcctgacctcccgggctttccgcaacgaccagtggccgctgttggcccaggaactgtgccggatggccggctacgacatggttctgccgatgaattccggggccgaggctgtcgagacggcggtcaagaccgcccggaagtggggctatgagaagaaaggcatccccgaggacaaggccgagatcatcgtctgcgccaataacttccacggccggacggtcacggtcatcagcttctcgaccgagccactttaccggaagaatttcggacccttcaccccgggctttaccgtcattcctttcggcgacgcggccgccctcgaaaaggcgatcacgccccgcaccgccgccttcctcgtcgagcccatccaggccgaggccggcatcctgatccccccggacggatatttcaaggccgcccgggaaatttgcacaaagaacaacgtcctgttcatcgccgacgagatccagaccggcctgggccggacgggcaagctgttcgcttgggagcatgaaaaggccaagcccgacatgatcgtcatcggcaaatccctcggcggcggatgttatccgatctccgcctgcctgacgagcgcggccatcatgagcgtctatacgcccggcacccacggctcgacgttcggcggcaaccccctggcctgcgccgtcgcccgcgaatccctcagggtgatcaaggaggagaagctcgtcgccaacgcggtcaagatgggcaagtatttcatggccaagctgcggacgatcaagagcaaaaacatcaaggaagtccggggcaagggccttttgatcggcgtggagcttttccccgaggccggcggcgcccgccggtactgcgaggccctggccgccgacgggctcctctgcaaggaaacccacgacaacgtcatccgtttcgccccgcccctgatcatcggcacgaaggatctcgactgggcgttcgcccgcatcaagagcgtcttcgaccggctcgaaaactgatccgccggaccggcgttcccgggaatgtcccggggacgccggccgctttcccgccggccgaggaggagccatgaagcgttcgtgtgcttaccgttcgatgccctctgaaaatgtaatcgagcgccgcgatttcctcaagcgcggcgcggccgtcgcggccgcggccgcggcggtcgcctcgtccgggctgggaagccgatatctcttcgcccacgaatcaggtcaagcggcttcggccgtcaagacgccgccttcccggccgaaaaccaacatcgaggatgccctgaaaattccccgaaccaagttctcccttccgggactccgccccggccgggtggttgaggttcacgatccggcggcgatgccggcggggaaacccgatccggcggccgtccgggccatgttcgagaacgggctcgccgccctgaccggaaaaaatccggccgaaagctttgaactctttttttccaaggacgacatcgtcggtctcaaggtcaatccggtcggggcgggcttgatcagcacccggctggagctggttgatgccgtcgccgcctggctcgaggccggcggcatcacccggaaaaacatcgtcatctgggaccggttcgatttcatgctgaccgacgccggcttcacggccggtcggtttcccgggatgtcgatcgaggggcttcagacgatggacgagcaggcccaggagggaacgacggcggacaacagcaagtggttgaagcccgacggcacccacgtcagcgtcccgaatttcgatctcgaccggtattattgggccgatgtcgacggtcccaaggacctcggctatctcaatcagcatgtcttcaacggcaaatattcttacttcgggaagcttctgaccaagagactgaccaagatcatcaacctcccggttttcaagaacaccggcaacgcggcttcgatggccaccaagaacatcggctacggggcggtctgcaacaccaaccgcctccatgccccgctgttccttgacgtctgtgtcgaggtcctggcattccccgacgtccgggacaagatggtcctcaatgtcaccgacgggctcttgtgccagtacgacggcggcccggggccgaacgccaaattcacgtatatcgacaaccggatttacctggccacggaccccttcgccctggacatggtctgccacaacctcctggcggccaagcggaaagaaatgggcgtggcggtcaacgagaatccgcggttcaccgagtacctgcgctatgccgagcggctgggattgggtgtggtcgccgcgggcaaaatcagccacctgaagatttgagccgggctcagggccgggacgggtatctcagctccttgaacttcaaggtgaaggtcgtcccgtcgttgcggtcgacgtccaagacggcgtccagctgttcgacgagcaggttgatgatctgaaatccgaagccggcggagttgctccggtcgaagccctccggcagcccgacgccgtcatccgacacctgcaggatcaccgtatctccggcggcccgggcgagccggatctgaatgacgccctttcggccgcccgggaaggcgtgtttcaaggcgttggaaatcagctcgttgatgatcaggccgaagggaatggccgagttgatgtccagccgaacttcggcgatatccgtctccaggcggatctggcggggatcgaccacgtagatctggaacaggtgggtggacaggctctcgaggtatccggacaggtcgatttttgaaagatcgaccgaccggtagagcttctcgtggatcaggctcatcgaccggatgcgcgcctgtccccgcttgaggatctcgcgggtttccgaagacgcgtgctcggattccaggttgaacaggctggagatgatctgcatgttgttcttgacccggtggtggacctcttggaggaggagctccttttcccgcagagagacgagcagggcttcgttggccgccttgatccggtcctcggccagcttccgctcggtgatatcgagagtgaatccggccagataccggggcttgccttcgatatggatcggaaacttgatcgtcgtgtaatgccgcccgttcaattcctcgtcaacggtgatcgtccggccttcccgcaggatccgctggtcgtcggcgaccatgtttcgggccaagtcggacgggaaaagctcggacatggtcttgccgagcgccgcggtgacgggcatgccgagcatgattgaataattcgcgctcaagctgagggcccggatgttctcgtccttgaagaacatgtacaccgggctgtttttcatgaactggtcgaaaatcgactgattttccttcacggccgccaaagcggtttcccgctcggcttcgacccgcttgcgctcggtgatgtcggacaggaccacgtggacggccatgacgccgcggtcggggaagggaacggccgtgacttcaacgtcgcgcgtggagccgtccaggcggacgatctttttctcgagcgtcgggaaaacctctcccgcgtcgcggaggcggcggatccgttcacgaaaggcctcccggtgatcagggtggatcaggtcgtaaggggatctgtccagcagcaggtccggagcggcggctccaaacagccgcgtgcaggcggcgttcaccaggacgacccggtcttcgcggacgacgaagaccgccgccggggcgttgtcgaccagcgtccggtagcgggcttcgctttcccgccggtcttccgcgtcccgccgttcctcggtgatgtcccggccggagcaaaggacggcggtcacccggccctcgggatccttgatcccccggcaccaccagccgagaagccggatctccccgtcccggcggcgatgacggccctcgatgtgaaccgcctcgccagagccctcgaagaggggggacattttcgtctgcaggtcctcatcgcttgcgtaataccggccgatgttcttgccgatcacgtcttccccgaagaagtccaggcccggcatgttggcccagaagcagaccttcgccggatcaatttcgatgatgatctcgggaagagaggcgatcagggcttcctggcgcgaggacagctcgtggagagaccgggcggcggccaggcgctcccggaggaagcgcatcttctgccgccggggaatcatcgccgcggccagcccgacggcggtcagaatggagatgatgaccgccatttgtcccaggaaccgtttccgggccggggcgtagagctcatcggtgtcgatttgggcgaccaggaaccagggagagccgggaacgcggcggaggcaggcaatcaccggattccggcggtcgtcgattccccggatgaggccctcccgcccctcgacggcctgtccgaaaatcgtattgtcccggaggggaattctgacgggaaaggggttgttttgccggaagcggtcctcgtcgaggaaaaccgcatcgtcgccgtcccggcggacgagatgagtttcggccgttcggctggacgaggaccggcgggcgaggtagggatagaggtacatcctcggatccaggcggagagcgagcacgctttcgacgtccggacggatgccgttcttgaaaatcggaatcaggaggctgaggaacggccggccttcggattcgtccatgaaaaaatcgacgatctcgggctttcccgagaaaaaaatgtccgggagccgccgtttgacggcggccgagacgccgggaaggccggccgggaccgagagaaaagccgctccctcgcggtcgaggagctggatccggtcatagatgccgctggcctcgaatttttccacccaagcggcgagctgccggcgggaacgatcgtcgtcgggcgttttgagcactcgtccggccaggaccgagataaagacgttttcgtccaggaaaaacgcgtcggccaggcgttccgcccgccatcgggccaattgctcggtcttcaggtcggcgatcgaaaccagctcgtcttggactttgatttcgagtttttttaaataaaggaggtaggacgcgcgtcccacgtaaagaatcgcggccgcgaggacgaggtatcccaaggagagaagggcggccagccgtttcgttttcccgtccgaggaagcggccaagcgtttttccgggaacggcgtcccccgcgggtcgcggattttccgccgtccggcttcgttcacgtgctctcctcggcgcccgttcgatcaggggctgggaaaaaagaataaagaatattcgggtccggccggcatgtcaatatctcttgggggccgcccaacaatccccttgcggtctttcctcgatgcggttatcataaccgtctttatatcctcatgacgttgacaacgcgaaacggccataaatacggagcgccccgagccgtctcccttttcctcgccgtcctgtccttcgccgtctccctttcggccgccgacgggattcgggccgtccgcgtcgccgccgggcccgaaatcaacggccgtttggatgatcccgcttgggccgccgcgccggccgtgtccgcttttcgcatggtcgagccgacgccgaacgctgatccgtcggaaaggaccgagctgcggatcgtctatgacgagaacgcgctgtatatcggtgtcctgtgtttcgatggagagccgaaccggatcgtcggcaataccatggctcacgacaataccggggcgtcctcctcgggagggtggtccggcggcggttacgggcatggctccaccgccccgggtgacgatctggtcaggattcttctcgatccgttccaggacaaacgcacggcgtatgtctttttcgtcaatccccgaggggcccgaggcgagggactggtctatgccggaagcgccagcctgaactgggacgggatttggaccgcggccgcccgcatccgggaggacggctggagcgccgaattccgcattccctttaaaacgatctccttcaagccgggcctttcggtctgggggctcaacgtcgaacggtatatcccgcgcaagcaggagacgatccgactggccggcgtctcccgggacgccaatttctacaatccgcgggaggcggcgtccctggaaggcatcgagaacatccgccagggcaagggaatcaccttccggccctacggcctgaccggaatcgccaagagctttgccgccgggacgggcgcctccttccggctggacggcggattcgacgtttacaagagtttcacgcccaacctggtcggcgtgctcagctacaacatggatttcgccgagaccgaggccgacgagcgccgcctcaacctgacgcgatttccgatgtcctaccccgagaagcggatgtttttcctggagggatcggagacgttcagcttcagctcgagcatgagcttcactcccttcttcagccgggccgtcgggctggtcaacggcgtgccggtcccggttctcttcggggccaagctctacggcaagatcggagataccaacctggccctgctcgatgtccaaacccgggcggacgaaggccggcccggcctcaacttcctggccgcccggatgacccagaacattttcgcccaaagcaagatcggctggattttcaccaacggcagtccctcgggcgagaaaaattcattgttcggggcggacatcaccttcagctcatccacgtttcttggaaacaagaacatcatgctggccgcctggggagcttacaactggaccgagaggaaggacggccggcatcacggcttcggcttccgggccgactatcccaacgatctctggaacatccagacgacctacgcgtactacggagacgccttgaatcccggcatcgggttcatgatgcgccgcggcattcaaaccgccttcggacgtctttcgttccagccgaggccggccgcgggattcctcggggctctcgtccggcaattcttcttcaccgccagcgccgattattattgggacttggccgggaacctcgaaacgcgccggctgaccgcttcgccgttcgggttccagacagaaagcggcgagcggatcacgttcgaaatcgaatcgaaccgcgacgtcctgccctatgatttcgagatttccaggggaatcgtccttccggccggggcttatgatttcaccaagaccaggctcgaattctccacgtcggcccgccgctccgtggctgtctcggtccattacaatttcggcccgttctattcgggccgctacaacgacttcaacgccggcttgacggtcaaggtcgacgggttcgtcaacctctccttcagcaccaacctcgtccgcggtttcctggctcagggcgacttcagccagaacgtttacgaggtcaaggccgacttttttctctcccccgacctcggcttgatgaattacatccaatacgatgatgtttcccgcctgctgggatggagcagccgcctgcggtggaggatttccccgggaaacgaaatctacgtgatatacaacaagaactgggagcgacgctgggatccggcctcgcgttttttgccgtccgaggagcggggcgtcctgaagctttcgctctcgatccggccgtaaggccggacccgccttttccaaaggtccgcccgctggtacaatggtcccggccgccgccggaggttttcatgaaatccgtttgccgccgttttcttttcagggcgattcccttggctcttctggccggagccgccgcggcccaggacatccttccccccggcggatttgtccgcggctgggaagcggccggccgtccgcgctccttcatcgaaaaagacttgttcaaccatatcaacggcggggcggagcttttcctggaattcggcttcgcccggcttctcgtccagccctatgccggcgggggaaaggacgagctcgttctcgaggtgtacgaaatgaccgaaccggcggccgccctgggcatttacctgatgagcgccgggcgggaaacgccgtggccggagatcccggcccgcaattcgagcgaggaggcgcagatcgtcgcggtcaaggggaggtatttcctcaaggtcgaacattacgattcgggcccgggtcttcgtccggcgatgatcgccttggcccggaatgtcttgtcccgcatcccggacgttccgctggagaatccgttcgccgccctcgcggaagacggccgtgtcgccggaagcgagcgcttgatccggggtccggtcggcctccagccgtattattccttcggggaaggggatatcctcgggttggaggggaggacgttcgccttcctggccgattaccgggaaggcgatgatccgccgttcacccgtcttgtcgcggattacccctcgccggaggcggccgatggagtcctgcggaacctccgggcccatctcgatccctatctcaagatcatcgccgagtgtccgggcgggggattcgatttctccgatttccaagggaaatacggacgggtggagcgggcggaggcccgtctcgagattacgttcaagcgggcgtcgctcgaccggcggccgccggcttcttccttttcaggttcgacagggaaaggacgaaaaccgccgtcaagatgatcaatccgccggcgatcgtccgggcggaaggccgttccccaagcagcagggcggccaaagcgatcccgtaaaccggctccaaggcgctgatgatgctggccgtctgggccgaaaggcgccgcatcccggcgataaaaagcgtgtgggcgagggcggtgcacagaagcccgaggatcgccagcagggcgaagtcgcgtcccgtaagagccggcggcttgagcaaggcggcggggaggagaaaaagagccgccccggcgtcctggtagaacgcgacgacggggctggcgtaccggaatgacagcttccggttgatgatgctcagcagggcgaaggtcgccccggcgccgaggccggtcacaacgccttgaaaaacgcgctcggaccaggagaagcgcggaacgaggaggaacacgccggccaggcaggccagggacaggccgaggtgacgccggctgaggcgggtccggaaaaacaacggctcgaggaaggccgtgaagatcgggaagctcgaataagccagcagccccacggccacggtcgagacgcggatcgactcgaaaaagaggatccaatgaacagccaggatcaagccctgaaggagaaagagcccgccgtcgattttacggcggatcgaaaaccggcctccggaaaggcggatgatcaaggccagggccgcggcggcgaaaacgacccgtccgaggacgatgaagtgcggccgaagggtcagccacttgccgaaaagaccggccaacccgaacagcgcgacggccgcatggacggccaacaggcttcgggatcggctcacggcgccccgattataacaaaaatcccctttcccggaagacccggtttgtggtaaattaatccgtactcttcgggagattgatcctcccggcggtacacccggaaaacagcatgtccacaccgcattcgaccgtcttagcccgcaaataccggcccatgacctttgaggaaatggtcggtcaaagagccgtcgtccagactcttcaaaacgccgtccggaccggccgcgtcgctcaggcctacctcttttcggggacgaggggagtgggcaaaacgaccgccgcccgcatcctggccaaggccctcaactgcgaacagggtccgacgccgacgccctgcggcatctgcgaatcctgccgggccgtccaggaggaccgccagctggatgtcctggagatcgacggggcgtccaacacgggcatcgacaacatccgggacttgcgcgaccttgtccggtacaaagcgatgaagagccggtacaaggtcgtcatcatcgacgaggtccaccaaatctccaagccggcgttcaacgccctgctgaaaacgcttgaggagcccccggaaaagacgctgttcatttttgccaccaccgagctgcaaaaagtaccggcgaccatcatctcccgctgccagcatttcgagttcaagcgcgtctccccgaaagacttgttcaatcatcttcacgatgtcgcccggaaggaagggctggagctcactgaaaacggcttcgccctgctcgcccgggcggccgagggaagcgtccgcgacagcctgacgctgctcgaccaggcggtggccttctgcggccggaccatcgccgacgccgacctcgacctgatcctgggaacgatcaaccgcgatctcttgttcgaattctcctcggccgtgatcgccggcgccccggaccggatttttccgctcgtcgagaaagtcgtcgattccggctacgacctccggacgtttcataagcggttgatcgagcatttccgcgatctcttgatcgtccggacgatggataagccccaggacatcctccatctgggcgaagcggacctggccttcttccggacggaggcggagaaaaccggcggggaagagcttctccggttcctccaggccctccaggacggggaagccggcctccgatattcctcccagccgcagatcgctttcgaaacgatcctggtccgtctctgtcatttcgggaagctggtcgagctgaaggacgttttggccggtctcgaggggggaagcgccgggacggctcttcggccgtcgtccgcgaccgtccggccggcggcgatccggcctcaggcggcggtgccggcggctccggcggcgtatgcctccccggcgaagccgtcggccctggacgccgccaaggccttcatccagcggcgcgcggccgccgcggcggcgcccccggcttccgcgaaaacaccggctccggcgcggccggcgcgcccggccgcctcgagcgatccggccaccgagccgaaagcccgcgaggacgcgtcggccgccctgcgcgcggcccgccgcgagcgcgaaacaggccgggatgccgcgctcaagaatgaaaacgtccggatgttccaggaaaagctcaagggccgggtcatttccgtggaagatcccgagccgccgcgtccgaaagacgaggagtgaggaaagatgaagggtttcggcgacatccagaaaatgctgaagtcggccaaggaaatgcaggagcgcctccagcgggagacggcggagatgcggatcgagggctcggccggcggcggaatggtgacggtcgttctggacggacagaaaaacgtcctcgatatcgggctggatccggaagtcgtcaacaaggacgacatcgacatgctcaaggatctgatcctggcggcgttccgagacggctcggccaaggtcgacgcggccctggccgacaagctcggcggattgggcgcgggcctgaaaatccccgggatgttctgatgaacgaatacgcccctcctctcggacgcctcatcgaggagctgaagaggatccccggcatcggcagcaagagcgcccagcggatggcctttcaccttctggccggcaaccaggacgacgccgagcgcctggctgatgcaatccgcgacctgaagaaaaacctgctgtcctgctcgatctgcaacaatatcacccaggccgatccgtgttcctattgcaccgatccgaaccgcggcgacgagtgcttgtgcgtcgtcgaagagcccttccatatcgcggcgatcgagaaatccggcgtcttccatggacggtattacgtcctcctgggcgccctggccccgctcaaggggatcgggccggagagcctccgtcttgaaaagctcgagcagcgcttgaaaaacggccgttttaaggagatcatcatcgccaccaacccgacctcggaaggggaggcgacggcccacttccttgtgagggcccttcaggggtataatattaaattcacgcgcctggccatgggattgccggtcgggtcggacatcgatttcgccgaccaagtcaccgtccgcaaggccttggaagggcggacggatctttcggattaaacagcggatattccgcgagttataaacgaaaacgccgttttcgcgcggcggcaaaggagcttggttcatgaagaaaaacttcaaaacgatcgacggaaacacggccgcgacccatgtttcctacgcgtattccgaagtcgccgccatttatccgatcacgccctcctcgacgatgggcgagttggccgatgaatgggcggcccagggcaagaagaacatcttcggccagacggtggacgtggtcgaaatgcagtcggaagggggcgcctcgggcgcggtccacggggccctttcggccggcgccctgacgacgacgttcaccgcctcccaaggcttgatgctcatgctcccgaacatgcacaagatcgccggggagatgctccccacggtcttcctggtctcggcccgctccctggcctgccaggcgctctcgatcttcggcgatcacagcgacgtcatgtcggcccgcaacaccggcttcgccatgacctgcgccggctcggtccaggaagcccaggacctggccatcgtcgcccaccttttgactctccggacccggattccgtttcttcatttcttcgacggattccggacgtccaacgtcatcgaaaaagtcgacgtcgtcgattatgagaccctggccggcttgttcgagccgcaatacctcgacgatttccggaagcggtcgctcaatccggaacggccgacgatgaagaacggccaggaaaatccggacgtttatttccagggccgggaaacgatcaacaagttctatcaagaagccccggctctcgttcagcattacatggataaagtcggcaaggcgatcggccggcagtaccatctcttcgattatttcggagcccccgacgccgaggatgtcatcatcatgatgggttcgggcgcggaaacggccgaggaaacgatcaattacctcaacacccgcggctccaagctcgggctgatcaaggtccgcctctaccggcctttcgacgtggaagccctcaagaaagcgctgcccaagtcggtcaagcggatcgccgtcctcgaccggaccaaggaaccgggctccatcggcgagccgctttacctggacgttgtcgcggccctcgccggctccggcttaaaaatcataggcggccgctacggcttgtcctcgaaggatttcaccccggcccaggtcaaggccgtctatgaccacctggccggaaaagccttccacagcttcaccgtcgggatcacggacgacgtcacccatctttcggtccccgtcggcccggttctggacaccgagcttcccggcacggtccgctgcaagttctggggctacggctcggacggcaccgtcggcgccaacaagaattcgatcaagatcatcgccgacaacaccgacatgtacggccaggggtatttccagtacgactccaagaagtccggcggtgtgaccatctcccacctccgcttcggcaagcagcccatccagtcccagtactatctcaacaccgtcgatttcatcgcgctccacaagccgtcttacatcggccgtctcgacattctcgaggggatccgcgagggcggaacgttcctgatcaactccaactggaacgcctcggaggtcttcgagaacctgaccgcggacatgcagaagacgatcatcgacaagaagatcaaagtgtacactatcgacgcctacaagatcgccggcgagctcggcctgggcctccggatcaacacgatcatgcaggcctgcttcttcaagctctcgggcgtgctccccgaagccgaggctatcgccctgatcaagaaggcgatcgaaaagacgtacggccggaaaggcgcggacgtcgttaaaatgaactgggccgccgtggaccatgcctccgacggcctggcggccgtcccgattccggataagatcggctccaaggccgctccgatgatccagatcgtccccgacgacgcctccgcgttcgccaaggatgtcatcgatccggtcacccgcttcaagggcgacctgctccctgtctccaagatgccgtttgacggcgtcattcccacggccacgtcctgcctggaaaagcgcgggatcgcggtcgaggtcccggcctggatcccggaaaattgcatccagtgcaaccagtgttcgctcgtctgcccccacgccgccatccggccgaaacagatcgctccagccgatttgaaaggcgctccggcgacgttcaagacgatcaagtccaactccaagaacgaccgggatctcgcctaccgcctccaagtttacgttgaggattgcgtcggctgcgaaaactgcgtcgaggtctgtcccagcaaggtcaaagccctcaagatggtccccatcgaggacgcccggaaggcaggggaaaacgagaacctggccttcttcgagaaagctccctatgacgtcctggacggcaacaagcgcgacagcatcaagggcagccagctcctgcggccgctgttcgaattcagcggcgcctgctcgggctgcggcgagacgccctacatcaagctggccacccagcttttcggtgaccggatgatcatcggcaacgccaccggctgctcgtccatttacggcggcacgttcccgacctcgccctactgccagacggcggaagggaaggggccggcctggggcaactccctgttcgaggacaacgccgagtacggattcggcatgcggctggcggtggacgccaaccggaagctgttggccgcctcgatcgaggcggtcctggcggccggaacgacccccgccctggccgacgccctggccaagatgaaagcggcctggaaagacacgggcggcgaagccaaggcggccgcggcggccgttcgggcggccttgcccggcgcgctcaagagcgccgacggagccaagcctcacctggccaagatcgacgagctcaaggatttcctggttgaaaagagcgtctggtccttcggcggcgacggctgggcctacgacatcggctacggcggcttggaccacgtcctggccacgaaccggaacgtcaacatcctggttctcgacaccgaggtctattccaacaccggcggccaggcgtccaaggcgaccccgaccgggtcggtcgccaagttcgccgcttcgggcaagaagacgaccaagaaggatttgggcagaatggccatgacctacggctacgtttacgtggccgcggtggccatgggcgccaatatgaaccagtgcatcaaggccttccaggaagccgaggcgtacaacgggccgtcgatcatcatcgcctatgctccgtgcatcaaccacggaatcgacatgaagaagacccaggccgaggaaaagctggccgtcgatacgggctactggatcctctatcggtacaatccgctcctggccttggaagggaagaatccgctccagctcgactccagggagccgaaactggcctacggagacttcctgaagaacgaggtccgctaccggacgttgacgcagcagtatcccgagatcgccaaggagctgtttgcccgggcggccgaggaagccaagaggcgttacgcggtttataaaaagatggccgagtaaaaggacgccggcgaaggccggctcgaaccgcgcccgccccgccgttcccttgaccgggagcggcggggcgttttttttttgcgagcgggggatccggccctcccgaatcgtcttcttgacacgttctcccggccggaaatatgatttcgtcatcatgacccgctatatgaaacgacacgaacggaatctgctgaaggccatggcgtccgccccgggcaagccggctttagccgagcttctggcctttcacgataaacagatcgcttggcttcaacaagagcgcttggctcacctgatcacgacgttgtttttcggattgtttttcgtcttgtccctggggttcacgatgtggcggttttcgccggccatgctggccctcacggggatgctgctcgtcatggtaaccgcttacgtcttccattattaccggctggaaaacacggtccagcggtggtattcgatttccaacaggatccgggcgagcctgctggcccaagactagccggcggatctccgcgtccgcccggccgctcagcggctcaggatcttcgccagccgggcgactcccgtccgcaggtcttccgccgtcgcgtaggagaaattaagccggatttcgttccgtttttccgtccccgaggggtagaacttgcttccggggatgtaggcgacgccggccttggccgcctcgtggaaaagaacgtccgtatcatatgtctcggggcaggtcagccagatgaacaagccgccctcgggctccgtccagcggatggatggaggcatcgtctccttgagggcggaaatcatgacttcccgcttgtggcggtacatcgccgtgatcttctcgatgtggggttcgagaaggtcgcgttccaggaaccgggcgacgacccgctggaccacgccttcgggcgagacgatgaccttctgggcccacttggccatggccgcgatgagatcggccggcccggcggcgaagccgagacgcaacccgggcccgaggaccttggagaaggacttgcagatcgtgacggtgcgggcgtcgtcgaattcggcccgggcgatgtcccagatcgaatcgatccgccggcccatgaaccggagatcgcggtagggctggtcctcgaggatcaggacattcaattcccgggcgacccggatcagctcccggcgccgggccaggctcatcgtccggccgctgggattttgaaactcggggatcgtgtagatgaacttgacggtccggccttccttcctccgggcgaggatcgtctcccggacgcggtccacgagcaggccttcctcgtccatgcccacggcggccagctccgctccgcaggcctcgatcgcgacgagcgtgccgttgaacgacggcccctcgcagatgacgatgtcgccgggatcgatgaccgcccgggtgaagaaatagatgccgttggtcgcgccgtccgtaatcaggagctcttccttaaggacgccgggctccttctcgaaccggaggatctgctccttgagaaaatcgtccccttcgctcggtccgtactggagaacatcggccccttccttttcgatcacttccttgaaaagcgaggcgagctgttccttggggaaggaatcggggctgggcaggccgccggccagggagatcatcccctcgacccccttggtcgccttgatcatctcccggatgaacgaaacgcccatcgaccgggtggtttgggaaagcagggattccggaaaggacacgggcaagtctcctttgattggttttcgatttgaggaagtcgaaagaatattataaccgaattgcgccgccgggaaaacgccgggccgcaaatttgtgatagcaaagcgaaaatgtccccttccgaggggaggctgccacaaaggagatgatcactttgagccgatgtaaagctcgatggaggcaagggctgttaaccgccgcttcgtcgagatgccggcggaaaaggaaggccttcggatcgggcgggagactgtccgtcgctggccgcgcaaagacggttttcgtcccaagcgtcagcgtcgagccccccaagcgccgaatccgtcctccccgtcgactcccggatggggctgacgatgcaacgagatccgtcctgggagtattgccccggactcaagaggacgccctcggcttggacatcgaggcccggcgcgacggtgtctcggtagagacggagatcaggaaaaaggccgccgttcagcgctttttggttttggatttcgccttggctttaaccttggctttgggcttgacctttttcatcggctttttggccgctttgggcttcgccatggccttggctttggccgcggctttgggtttgacccttggcttcggcttgaccttaggtttcgccttggctttccccttgggtttcgctttgggtttgatctttccccggggcttggccgcgactccggtcttggccgaaggcacggctccagcctcggcccggattttttcaaggttcgccttggccggcgggaccttgtcgatgaaggcggagacgacgccacagggatagaggtcgcacagggcgcaattcgcgacgttcttttccaagccgcatttccggatttcgcactcgaagcagtagccgatgtgcggcccctccaagacggtgcagcccgcgcaatccaccatctccggagtgatctccgcgccgtattgcttcttccactcttcggccgttttctcccgaagcgccgcgtcccccgtttggtggacgacgtaagccgggcaaacggaacaatcaagcccgcaaatcgcgatgttcatggctggcctccctttccgcaagtatccgccgatccttcgctggcgtcaataggggatgcatcccctgattattgttcgggaccgaccgtgacccaggaggcccgggccggatccatgagccgacggatctcggcgttgacctcatccagggtcagggaatagagctcatcgcggaaatgagtaaaaaaatccgctcccagtcccatcgattcataccagcccagggtcgtcgcccgggctgccttggtctcgttggcccggaggaagccggaccacagaatggcccggccggcttccagctcctcggcggttaagccgcgctcctggaagtcccggagaacctcggccagggcttcccgggccgaggcggtttttggggcgtccgtctcgaggtaagcttcgaacagccccgccctccggaaaaagaaggcttgggcaaagacgttgtaggccagcttttgatcgacccgcagcgtccacaggcgcgagccgacgccccggccgagggcgttttcaatgagggagatccggacgtagtcccggcggctcatcgacggcaggataaagccgcaggagacgacgctctgttgttgcttttttatgacgatcctcggcgggtaggggggatccttgaggacgagagcggccggggggggcggcggggctcccgggcggagggaggcgaaatggcgctcgatcaaagcgccgagggcgtcgggcgccaggtcggagacggcgacaatggtgatgttgccggcgacgaacagccgctcgtagaaatcccgagcgtcccggactctcaaggctcggagcgattcctccgtcccgagcgtctcgccggcataggcggaatcgccgaagaatgtctcccgctggacgaggtgggattcgtaccgggcgtcgtcgatctgaatgcggcgctggtgctccatcgattcgacgagccggttcatccggatgtccgaaaagatcggccggttgaaaatcttagcgatcgtcgccagcatcggctcggcgaactccgttagaaattccaggtggatgacggcgtcgtcgtcgcgcgcgcccatcccgctcttgagggctttcaccgtgaagtcgcggctggtcgtctcgtcggggatgttgacggacagccgggcggtgagatgggcgattccagcccggccgccgggttcggctgaagccccgccgccgatgacgatttcgacgaccgtgatcgccgaggaggcgtccgtctgggtgatgaccgtgaggccgttgggcagaaccttcttcaggatgggagcctgcgctccggcgaatgcgggcccggcggcgaatccgccgagggcggcgaggagggcggccgccggaaaccggaaccaggggcgggcgggccgccggccggaggatgcgcgccttgggaaggatttcatttctttcgggggacgatggagacgatgacgaaggcgtcgcggttgaaagacgcgccggcggccttccggaggtcgcccgacgtcacggcggcgatcctctccaggtagtcgatttccgactccgtgccggcgaggagcatatgggcggccatcgaggacgccaggccgagaccgctttcccaagcctgctggccgagaaagcggattttattcttggcgctctccagcagatcgaaggcggccgcccggtcctcgatcagaacatcctgaggggaaaaattctccctgcggactcccttcagaaaggtgatcgtctcgcgcttggcgaccgagatcttggatggttccagggtgatataggccacgaaagctccggcccgcttcaaggcgatgtagcttaaatgcgccgagttgactcccgcccggcggctgttcttgagggcgacggtcatcatcgggtggatgccctgaccgaggatctgggtgaggacgtcggccgcgtactgtcccgggtcgttgtaatcagggccgaggacgccgacgaaaaggtaagcttcgctgatgtcgagctcccgctcgatctcaaccgtcttcgaaggagggcgggcgaattccggcggaggcggaggatcctccccccggggaacgtcggcgaagacctcccggacgcgggcttccatttcgtcgaccggcaggtttccgacaatggccaagacggtgttgttgggaacgaacagcctcttgtagaagcgctcgatatccccggccgtgagatcggccaagcatccggggtcgccgtagatgggccgtccatagggatggccggccaggagattttggaagacgagcgcctggcccaggcggaacggatcatcctcgatctgccggatctcctcgccgatgacttctttttcggcgttcagcccttcttcctcgattttcattcggaagaggatttccttctggtttttcaggccgaagaggaagtgctcggcgggcagggtgaggtcgaagaacgccgcgtcctggccggtgtgggcattgaagacggctccgcggctacggatatcccgggcgatctcgcttccggaacgaacgtccgttccccggaaaaggatgtagtgctcgagcagatggatcaagccggacgtttcgtcggtttcgtccttggaacccgcgttgactccggcgacgatgttcaccaggggaacggaattccgctcgagcaggaagacgcgcaggccgttgtccagggtgaattgtttttgcggggaggatgccggccggacgagcggggggaaaagcaggaccgtcgcggcgccggccagaaggaggagggccgccccttggatggccgccggccgccgttccgccttcctttcgatcatgtctccgctcgggtttattttatcctttccttgcggagagaaaaagcaatctttgtgtcagccggggcttgtcatccttccaaagtctcgcccgccggaggagcggattgttgaacgcccggccccgcggcgggcgttctcaaatccgcctttcattaaacccgtttttcgtttttatcttcagcggatcagacggcggttgtcttgactcgcgaatcgggcgggttggccggcggacggagccgcggaccgaaacggggaggttccagaatccgcggaaagcagggttttcgagcgcttggggagtgggaaaaaagaatttccgcccgccgtcggcgcccggggcggaagggagccgggaagattttttacaagggacgggttttttgtaaaattcctgccggggcgggcccgaagagaggggactttcaagaggaggcgccggcgcgtttccggagagggaggctcctgtgttaaaatcggcctgagatcgaggcgaaacgcatgaagcttgaccgcaaagcccgcatcctggtcatcgacgacgaggagaacatccgcaagtcgctgaagatgattttggaatacgacgggtacatcttttacgaggcggccgacggcgaatccggccttcaggcgatcgacgagattcccggcctcgacctcgtcctcctggacatccatcttccgggccgggacgggctggagatcctcaaggagatccgcaaccgccccttcccgcccgaggtggtcatgatctccggacaggggacggtccagacggcggtcgaggcgaccaagctcggcgcgttcgaattcctggaaaagccgctccaccgggaccgcatcctcctgaccctgcggaacgcgctggatcgcaacaagctggcccgggaaaacctggatctgcggcgcaaggcggagaaacggtacgagctcgtcggcaaccaccccctgatgaagaagctctggcgggacattcaggcggtcgctccgaccaacgccacggtcctcatcttcggggaaagcggcacgggcaaggagctgatcgcccgagccgtccacgcccggagcctccgggccaaggaagccttcattcaagtcaattgcgcggctatcccggaggagctcatcgaatcggagctcttcggccacgagaaaggggctttcaccggggcgaccgagaaaaagccgggcaagttcgagctggccgacggagggacgatcttcctggacgaggtcggcgacatgagccttaagacccaatccaaggtcctccgcgtcctggaggaaggcgaggtccagaaggtcggatcaaacaagatctccaaggtcgacgtgagggtgatcgcggccaccaacaaagacctcaaggccgagatcgagaagaatctcttccgcagcgacctgtatttccggctcaatgtcctgcccctgtcttcgcccccgctgcgcgagaagcgcgaggacattcccgtcctgatcgattatttcgcccggatgttcgccgaggagaacaacttcaaggtcaagacgttctcccccgaggcggtcgaggtgatgacccgctgctcctggaagggaaacgtccgggagcttaggaacgtggtcgagcggctgttgatcatgaccgagggcgaccggatcgagaagagcgacctgccggagcagatccgcggggagaagggcgtcgtccttcccgatgcgtccaaggtccagtcgctcaaggatttccgcgacttggccgagcgcgaattcctcctggccaagctcgaggccaacggctggaacatcagccggacggcccgggagattgacacgccgcgctcgaacctttataaaaagcttgagcagtacggaatcaagatcacggccggagtggacgagacggtcgctcccgaatccgtcaaggaagagggggaggaaagtccggactccgcagggcagggtggtcgctaacggcgaccccgggcgaccggagggaaagtgccacagaaaacacaccgcccgccagggcaagggtgaaatggcgaggtaagagctcaccgccccggtggtgacatcgggggcagggcaaaccccacccggagcaaggccaaacgtgccccccatgggatcgcccgtcccgggggcgggtcggccgctggatcccgcgggcaaccgcggggcgagaaaaatgaccgtccccggcgcttcggcgccgggaacagaatccggcttatgggccgctccggccgtgtctttcacacgcctccggcgtgtaaaaaaatacggccgtgagttctgccctacatgaccgcttcccttagcttgtcttcgttcccgtggtctctccgatttcaaatcgtgaacgtcacggcacacgcgccggcgattttctcattaaataatttgatatttcaataacgtataatgagattcggcttggtcgtcgatcttcagggacagcgcggataagacattcgtttttttatcgtaatataatgacataagcatatggggatatgtcacttgatccagctttttctccataatgaaattcccatccaatgaatatagttgaacgatgggattcaatagatcgatttcgcggtcataattcatatacacgatgccgatataacgatctgtaacaaataattttcgaattatggaataattaaaaaggatcttaaaatgctttttcaaattccgctctttttttgcctgaatcagttcctttgatgccaccggcgccgtatataatgacgttttattcccaaaccggtactgtttattcgtcttcgtgtccacccgtatgacgcttaacagcccttcccatacggcatagacgtgatctccgtgagaatcacaatacgagcgaacgcccatgcttgctttttccgccaattgaggctgacccgcgttgggagagatattgaataaatcctggagcgtcaataaaaacgaatgtttcttttgtcgcggataggagagatagatttcataccatttgccggcgggatccgctttcgaccccgaaaataaataatgatccgggaaaatcctggcgtcacagcaataaccgaagaattcttctcctaatttaatttcgagatcctcattgacatgataaacaaggatacgatatttctcagaattcgaaatcaatagcttattgtcggaataatcaaaaatcgtcgggtaagaaaattcatccggtccgttcccccgtcttccgaagattttgacgaatcgtccgtttttatcgaatattttgaaattgccggcccgcgtgtcgcagatgataaaggaaccgttgggcaggaccgcgattccatcatccgcttctatcaagcaatcttgctgagagacgggaattttatcgatgagacgaatatcttgcccgaaaacgaaagggccggcgatcatgagaggagataataaattgataagcgttttcttcatcgttcacgctctcatatgacgagatgaagagggagcggacttgatatccgctcccccgggcactctaattaattattgtcgtagcgcctccagcaatcaacgaatcttatttcaaagcgtagatgatcagcgattgcaggtctttccccccgagaaaatagatatttccataggaatcgacggcgacgggatgccagggaacgcgggccccatcggcatccctgatattaacgtttgtcggaacatattgatttccttttttctcgaccacgcggaaaccctccgcgccctgaaaccaaatattccccgagtgcagtaaaaaatgatctctttcggcccaatccgtttctcccaaacggtttcctgccaaatcgaaatatcggatcagcttcatttcaggcaaggcttgaaaaacaattcggttcgtcgaatcaaattgcggggaagaggcgaaataatccccgtttctttcgaggatggcttctaccgtcaatccttgattcccgaagggggaaaaggaattcacatggtttccgtcgaaatcgaggaggtgaagagagtcgtttctaaagccttcttcactcgcgatgccgttgaccaagatgagatccctcggcctgagaatcctcagatgggcgataaaagagaatcgttcgcccaggttgatttccttcaacttctccccggtggatccgttgtaccaagccaacggaagacggaacttgccttcttccagtcttcccgaaaaaacgcaaacagagttgccgtagccgtcgatatcgaacttgataatctctccttcattccggcggggagctcttaaaacgacctttcccgcccgatcgagtttgaggaacgagtcgtttccccgctgcgtgatgaatacgtttcccgcggaatccgaggcggcgaaaacgagatgagcctgatgaggtttgagaaagaagccgaggtcgatttctcgttcgagaatcaagttttgggaatgagcgaaacaaaggaccatcggcaaaaacgaaacgaataaaaatcgtttattcatttcccgtctccttgcttcaattgataattcgaaagcggagaatatccgtggcaaaaccctgttatgcaccgctgcaaccaccattgattcccctcgttgtccgtacagacgatataaacggcttgataaaaacaagacgttttgcaaggccagcaattttcacatcgccaatcataggtgttacagggcgcgaaccaataacccacgcagtaagtatttgcacaagatgtctccccatttccatttttcacctgtatattcatatataagcaaatcatccgatttctcaagggaaataagccgataaaaaagataatatgatcgattatttttttatttgcatgtttttaattgaggaagatcccccccgtgatagataggcgtatttatttatcacccgcgacggcctgatcccaaactgggaacgaaaacggccgctgaaggaaagggggcggtagccgaggtcgagcgcgatttcttttattgacttgtccgacgaaagaattttccacaaggaataacaaaagcgattattgatgacaaaacggcataaagagacgccggtcaactctttgaatgttgatgaggtccaagacggacttcgatgaatgagcttggaaatgccggcaagatcatgattccgccatggattctcgacgacgtctttctgaatgagcaggactttatggagaggatccgagggatgaagccgcccttggccccatccataataacgcgatctttcgcaggtttccttcatctcccgctgccggggtgacaagacgctgtcgtcgaagaacgtgagaaaaaaacttttcgaaaagcccgcggctttcgaaaaaatcgccggcctcaggacgacaatgggggtgttcaacctctgaagagaaataaaagaacgaagacaattccgcgtcaaacaagaataatcacaaacatgaaagacaagcgaaaaaccgctttgagacgggaagcgatttctggattccacgactctcaacgaggcgggaaaggggatgagtctattgatgaaatccggcttgtcccgtttgctgataagaacgagaaccttgccgcggttgcgagcggaatttcttctcatcaaccgttccgcctccctctaaataaaagtataacaaacggaaatgcatcgatcaatttatatcattgaggaatcgagggatcgccgccctcgtgaccaatggttattataacggcctcacgttccaccgcgccgtccccggcttcctcatccagggaggccagcccgcggaccgacgagtacgcgggagacggcccgttcaggcgagacgagacgggccgggcatcgaacgcgtgcggaaccgtcggcgtctccacccgcggccgcgacgccggcgacgcccggatttccatcaacaccgtcgacaacgaccgcctgaaccgcgaataccgcgtcttcgcccgggtcgtttccgggatggacgtcgtcgacaggatcctcgagggagccgtcatcgcgcgggtggaactggttttcgacgggcccggaatccgtccggcggccgcctcggccgggccggcctccccgccgaatcaataatggagccggacgacgaccggcgtgtcgccggtttgggggagcaggacgaagaggctgccgtaatcatcgtcggcgatgatttcctcggacgggtggccgaggcgccgcatcaattccggcagcgtgttggaatggccgatcacgaggaccgtgtcgccggcatggcgggtccggagcctttccgccagccccgccgcgtcgccggcggcgtatgtctgaaccttcaatcctaatgcggcggccgccggctcggccgtcagccgggctctccggtattcgctggcatagacggccgtgatttccaggggagcgacgaggacggccagggcttcggcccgggcccggcccgcctccgacagggcggagtctttggaggagtcggctttctccgcgtgacggaccaggatgaccgcttgctgggcggcggccggcccggccgccgcggccgcgaggaccaggacaaagacggccgtccggaagccttttttcccacggaccgcccgggatagaagcggggcgcggtcgttcatgaaacgaatatatcggccgccggccccgcctgtcaacggcctgaatcggagcgtcaagtcggcgtgaaaactcccgctcatgcgcctcggcttcagggcttccgcgcatgatgccccgtcaccgcccggtgaaaacgtcttctggggtggagtgccgggttgtttcgaggggggcattatgaatcccgggcaacccgatttacaaccgccgtcgggatggggtaacatggaggccgcgcaatccgcgaaagaatccaaccgtccaggaggcccgctcatgaacgacatcgaaaaagccttgatgcatgcgctcttcgtccatctccaccacaatatcgacaaggccatcgatttcaaggccatcgatgccttgaataaaaaagtcggcaaactgttccccggctcgcttgtcgtcggcccgggcgacgacgccgccgccttcaagtttcccggcacgccgggcatgttcgtcggcaaaatggagagccattgctctccctgcgttccccggccgtacgacgcggcggccaccggggccggcggatccatgcgggacgtggtggccatgggcgcccggccgtttttcctgatgaacttcatcgggaccaaacccctggacgagaaggtcatcgtcggcccgtgcggcttcaaggggaaatgcacctgcgggcagtgccgggagatgaccagcggagagcgggtcaacttgatggtcaagggattgaaggacatgtgccgggccatggatgtcttcatcgtcggcggcgggttctccacgtcgttttcggatatcgtcccggccgtcgtcgtcgcggtgatgggacgcctcgtcacgtcccggccgctgaccaagccggcgaaggccgccggcagccagatcatcctgatcggccggacgggaagcgacggcaacgacaccctctaccgggccgggctggtccgggaaatgaagccggccgtcgcccagttccgggaggaacgcaaggtcatggaagcgtccctggccgcgttccgcacggggaagatccgggcgtgctccgatctcggcgcggccggcgtcggggccggcgtttgcgaatccgcgcggtacggcggtttcggggcccgggtggatctttccaaggtcccgctgaaggaaaagaacctctcgcccgaggaaatcctgatttgcgaaacccaggcgcggatggtcgtccaagtcgccaagaaggacgtcgatctcattttgaaaacggtccgggccaagggagtccgggccgagcatatcggcgagatcaacaacgacgacaaggaagtctttgaataccggggcaagaccgtggccgtgatcccgaaccgtccttcggccgcggacatgaagaaactccgcgcggtctgacgggacgcggggaggaagacgggctcggaggccggtcggccggccgcttgccgcttcgcctggggaaaaatccggatcgggccggagcgtcccggcctcccggcgctcaggtgacgagccgggcgccggccgacggaaggacgatccggggctcgaggcggcggccccgggcggcggcataagccgaagccagggaagcggcgatcgccggggaccgatccttttcgaccaggacgacggcgctgccgccgaatccccctccgctcaggcgggcgccgagaaccccctggatcttccccgccgcctcgaccaaggcgtcgagctcgggacaggaattttcgaaatatttccgggaactttcatgggattcgaacatgaggcggccgaaggcggccgcgtctccgcgcttgagggcttcggccccggtcaagacgcgttcgttttccccgacgggatgggcggctcttttccaaacatccggatccaggcggtcccggtatttcatcatgtccgcccgcgtcacgtcccggagggcggcgatcccggggccgaggatgcggcggaacgccgcggccgcctcctcgcaccgccggcgccgttcgttgtattccgagtcgaccagcgtgtgcttgacccccgtgtcggcgatcaggaaagccgtcccctgcggaagggaaacggtgtccgcttcgagcgaacggaaatccgtgaagacgagagcctgttcccggccgaagaggcttgagatctggtcgagaaggccgcagcgcacgccggcgaactcgtgttcggcccgctggccgattttcgccagggcaagcttctcggcgacgattccgtggaaagccgaaaaggccaggcccgaggagatttccagggcggccgagctggaaagcccggccgccaccgggatatcgccgcagaaggttccttggaatccccggggacggaacccgtatcgttcccggaggaacgccaggacgccgcgcgggtagttcgaccagcgctcccggtccgtccgtcccggattgacggcctgaaaacgaacgctctcgccgaagtcggccgcccgcagggtgcaggcatcctcgtcggccggcgagagaccgaaggcgatcccggcgtcgatggctgccgacaggacgaagccctcgttgtaatcggtgtggttgcccaggatctcgacccgcccgggggcgtacgcgacgaccgcgggttcgacgccgaaaacggcctggtgctctttgcggagacgctgaatcagatcatccattccatgactcccgacggattaaaagcccgcgaccgcgccgcgaaggaaggtcataacgccgcccggaaagaggccgagctggaggacggcgtaaagacagaagaacaaggcgaggtagacggggtaattttccgtgtcgacctcgatctcccgttctggctccttcatgaacatgacccggacgatccgcaggtagaccgcgaccgaaaccaggctggcggcgatgccgacgagggcgaggccgagacggccggcccggacggccgcgctgaagacgaagaacttcgccaaaaaaccgccggtcgggggaaacccggccagggagatgaggatcacggtgaagatccccgccgcccagggcgaccggcggccgagtccggcgtagtcgtccagctcgagcgtttcgcgcttcggcccggccagggcgatgaccgcggcgaaggccccgacccccatgaacaggtaattggccaggtagaacaacagcccggccggatcgccggagacgacggcgatcagcatgtatccggcgtgggcgatgccggaatacgccaggaggcgcttgagattccgctggcggagggcggcgaaattcccgaggatcatcgtcgcgacggcggccgcgctcaggaaggaggcgatcggcccggccccgatccccgcccgggcgaaggcgaagagaatccggaggaggacggcgaatccggccgctttcggggccgccgcaaaaaacgccgcggccggcgtgggcgcgccctcggtgacgtccggaaaatacatatggaacgggacgacggcgattttatagcccagcccgcagagaaccaggatcaatccggccgcggccagggcgggaaccgcccccgttccggcgagcccggcggccgcggcgtcgaggtcgagcgtgccggaggctccgaacagcagggccaagccgaagacgaaaaaggccgaggcgaaggatccggtcaggaaatacttggcggccgcctcggccgaaccgtcgtcccgccggttcagtccggtcaaggcataggcggagatggaaaacacctccaagccgaggaaaacgacgagcaggtggcgggtggccgtcatcaggatgaggccgcagacggccaggagaagaaggccgtaatattccgcccgggggatccggcggagaacgatgaagcgcatcccgagaaggatcgccaggacggccgccaaaagatagaggaacgcgaggaaaagcgccggctcatcccatcggagctgccccccgaacgcctcggccggccggccccagaggcgggcggcggcgaatccggccgcggccgcggccgcgacggagaccgcggcttggacggaattcgatcctccgccgcggcgcgtccccaggagcaaaacgagaaccgccccgccggcaaggaagagaaggggggcgagaacgaccggtccgctcatcgcgctttttcctcgccgccgccgcttccggagacgatcgccggaaaagcgggacggccgtccacccggacgtatgcggtccggcggttttgcagggcgtcggcataccggacggcggtcgcctcgatctttttcaggaaggtcccgggaaagagcccgatccaaaacatcaggaggataacggggaggaagacggccagatcgcgtccgccgatgtcccggagagcggccacgcgcccggaggcgacggggccgtgaaagactttccggtacatgcccaggaggtaagcggccgagagaatcaccgtcgtgacggccagggcggccaggattttatccgcggcgaacacgccgctcaggcaaaggatctctccggcgaagccgttgagtccgggaaggccgagggacgagagcgcggcgatgagaaacaaagcggcgaagacgggcatcttccgggcgacgccgccgaagtcggagacgccccgggcccgggtccgttcgtacaagacgccgacgccgaagaagagcagtcccgtgctcaggccgtggttgatcatttggaggatcgcgccttggaggctgaccgtgttccaagccgtcacggccagcaggataagccccatatggctgacgctggagtaagccacgagcgccttgatgtccttttggacgagggccatgaacccgccgtaaataatgccggccacggccagcccggaaaggaccggagcgaggcgggcgacggcctcggggaagaggggaaaacccaagcggagaaatccgtaggcgcccatcttgaggagaacggcggccaggagaacggaagccccggtcggagcttcgacgtgggcgtcgggaagccaggtgtggaacgggaacagggggaccttgacggcgaaagccaggccgaaggcgagaaagagccaggtctgggcggaaggggagaggaccatccggcccaagtcgaacatgtccagggaatatgtcccggttgcgcgggcgtaggctccgtgaaggacgaagatgccggccagcatcaggaggcttccggccatcgtgaagaggacgaatttcgtggtcgcgtagagccggcgttttccgccgaagacgccgatcaagaaatacatcgggatcagggccgcttcccagaagacgtagaagaggaagagattaagcgagagaaagacgccgatcatcccggtttccaggaggagcaggaataggagatattccttcaaccggtcgcggatcgacgagaccgaggcccagacgaccaggggcgtgagaaaagcggccagcaggacgagaaagaggctgaggccgtcgaccccgaggtggtagccgagcccatagcccagccaggggcttttctcgacgaactgaggcccggcctcgcgtccgtcgaaacggacggctagcaggcaggcgaggacgaagacggcaagcgtgacggccagggcggcggcgaacaggcgccgccgttcggcggccgggatgaagatgaggagaatcgccccggccagcgggaggaaggtgatcaggctcagcagcgggatgttcatgtcagaagaggaggactccgaggaaagcgacggccccgaggaggatggccagggcgtaatccttgacccatcccgtctggagaagggcgagggcttttccgagaaggccggcggctccgcccgccccgttcacggccgcgtcgatgacccccaggtcgaaccggcggtaaaccgccttcgacccgcggaggaggggattgaggagggccgtctcgtaaagcgcgtcgacgccgaagccccggaggagaagatggtggaagccgggaaagcgggctgaaacccggccggggagggccggattccggacgtagaaaagatacgcgaggaacaagccggcgagggccgagatggtcgaggcggccagcagcgcggcctcggcccccggtcccgcgtgcccggaggccggtgttccggcgactggggcgagaaaccggaaaaacaggttcgctcgttcgccgaacaaggccgggaggccgacatagccggcgacgatcgaacaaaaggctaggatgaggagaggccgggtcatgacggccggggattcgtggaggcgggattcgacctcggccgagaagcgcctgctcccgaaaaaagcgagaaagaccagccggaacatgtaaaatgccgtcagcccggcgccggccaggccgaggattccggcgaagacgtgtccgccggcgaaggcggtgaggaggatggcatccttggagaaaaatccggaaagaaaggggatgccggagatcgccagggcgccgacgagaaaggcgggataggtccggggcaggagttttcgaagcccgcccattttccgcagatcctgctcgccggacagggcgtggatgacgcttccggcggccaggaaaagaaggctcttgaaaaaggcgtgggtgaacaggtggaaaatgccggcggcgtaagcccccgcgccgcagccgagaaacatgtatcccagctgggagatcgtggaataagccaggacccgcttgatgtcgttttggacaagggcgaggactccggcgtagacggcggtcaaggccccgacaagcatgacgatcccggacgccgaggaagaggccgcgtaaagcgggttcaaccgggcgaccatgtacaccccggccgtgaccatggtcgcggcgtggatcagggcgctgaccggcgtcgggccttccatggcgtcgggcagccagacatagagggggatctgggcggattttcccgtcgccccgatgaacaggagaacggcggccgccgcggccgccgaaggggcgagcgctccggaggcgaccgcttcggaaaggccggcgaacgacaccgttccggccgccgaccaaaggacgaggattcccagaaggaagccggcgtccccgatccggttgacgagaaaggctttcttgccggcgtcggccgcggccggtttttcgaaccagtagccgatcaggagatatgaacagaggccgaccccctcccagccgacgaacatcaagaccaggttgtcggccaggacgagaaggagcatggcggacatgaagaggttcaaacaggcgaaataccgcccgaagtcgcgctcccgggacatgtagccggccgaatagacgtggatgagcaggccgacgccggtgacgaccagaaccatcacggcggccaagggatcgaagcggaaagccgcttcggcccggaagccgccggcttggatccaggtgaaaagccggtggatgcggactccggaaccggaaagggccgcggcgacggacagaacgaacgacgcggcgaccgacccgcaggccagcgtcgagaccgaccggcgggacagccgccggccgagcggaaagaggaccagggcgccgacggccggggcgagaggaatgaaaacgaaggccggcatccttcaacccctcagcttgtcgagttcgtccgtccggatggatttccggcggcggtaaaggtgaaggatgatggccaggccgacggccgcctcggccgcggccacggtcatgacgaaaaagacgatgacctgggcgtcgatccgggccgacccccgggccaagccgagaaacgcgaggttggcggcgttcagcatgatttcgacggccatgaactgggtcaggaggtcgcgcttgacgaaaaaggcgatgaccccgaggacgaacagaacgaggctcaagccgacgacggccgccgggctcaagactccggctcctcttttttccccagcacaacggccccgaccaaagcggccaggatcaaaacggacgtgatttcgaacggataggcgaattccgtgaaaagacggcggccgacgtccgcgggcgcgacgcccggaccggaggccggactccggttggaattcgccaggatcccccaggcggccgttcccaattcaaaaagaaggacgaggccgatggccgggcccaggattttcgcccgtttccgccgctcggggggagccggcgtccgcggatcgaccatcattacgacgaaaatgaaaagaaccatgatcgccccggcgtagacgagaatctggacggccgcggcgaagggggcgtcgagcaggccgaagatgccgcccaaggcggagaagcacaggacgagaaaaagggcgttgtgtcccgggttgcgggaaatgatcatcgccgcggcggctcccgcgctgacgacggccagaatccaaaacacaatatctgcggccatggcgggcgtaattataaaacaaaaccggcgggatacaagacccaatccctccgcttcttccgaatccattccgaacctggttctccatttcccgatatccgttttccttgatatcggaacctggtcaaccatttcctttcatcagcaactgaggagtactcgccgcctctcgagcgcccgcgggcgggcggggctggatttcagaccgcgcgatgcgaccgtttgacggaacggccgggccggggtacagtggagtcgccgcccttccgagatgcggctgaagcccgacaaggaggaggatcgatgatgatcctcgcggcccggcccggcgggatcgcgacgaaggcgtatcccgacctcgcggcatcatcgcgccgggaggaacgcgggatgcggccgaacaggctccggcggccgggccgggccggatccggcggcgccgggtcgtccgggccggatggaattcccccgggtggggtcgatcatcgccggagagaggaaacacgacatgcgcttgatgaaaagaaaaggccggatcgcggctgtgggattcgcctttttcacgctgctcttatccgccgcggtccttcaggccgcgacggttttcaacatcgtcctggaccgcggcggcgttcttctttcgggccgcctccgcgtctgcgagggagacgggccctttcccacagtcattctccttcacggcctgccgggaaacgaatcggatgttcttggcctgggcgccgccttggttaaaaacgggatcaacgtcctgaccttcaactacagcgggacgttcgagagccaaggggaatggagcttcgccgacaccttgaaggacatcgaggcggccttttatttcgtaaaccgtcccgacaacatcctccggttcaagatcgatgcccggcgcctgggcttgggcggctacgactacggcggcgggatggtcctggcttatgccgccggccgcccggaggtgggcgtcgttttctccatcgccggcacggatcacggggaattcctccgggaatacgcccggaatcccgagatgaggaaaatcgtcgacgagacatacgcggccatggccgccccggccggcccggtgaggttcgccgagggcgccgttccgcgggaatgggcggacataggcccggcggccttggacccgaatctcgatttcctccgaatcgccccggccctggccggcaaggacatcctgcttgtctgcgcttgggacgacgaaacgaacaaggtcgagcgcaacgcgctgcccctctaccgggccctgaaggaacgcaaggcgaaaagcgcttcgatcgccgccttccaggacgaccatgcgttccgaaaatcccgggccggcttggcccgggcggtcggcgattggctgaaaagcgtttttttcccgaccgtttaggattcggacgaagcgatcgccccggccgcggggcggacggaaaatcattttgacaaaaaatgaatctttgttataatgccgatgtctgcggggtagagcagcctggtagctcgtcgggctcataacccggaggtcgttggttcaaatccaacccccgctaccaaccgtccattttttcccttgaagatatacgaggccgcggcctctttctttcgggatcatcaagcccccgcttttcggttttggggaggaactccggctgtctcttccggcgtcttccgttctttccagaggctcggctcggctcggatcgataagctcgtctcgcgggcggccggagccgaaaaccgcgtttcttctcgagccgcctgaatacccgcggccggaacatcccggccggccttccgggatcaggccctgatcacccaaagcgtccggggccctctcagtccctggcaaagggagcggttttccgttgacttgccgctttccggcctgaatggcccagtccaatttcaatattgatatgacatacttccggcttgatattgactcgttttcccgcaggcgctatgattaaaacaaggttatgcagatcggggaagccggtattttgtctttttccccgcgaagaggagggcgcccgatcatgaaaacgatccgcctgcccgcggcggccttgtggttctttggaacggccgtcctcgcggcccaggacgccggtctggtcgccatcaccgtggtcaagggagacacgctcaacaacatctgccgggcctacctggtcgaacgggcggtttggccgaaaatcgccgttctcaaccgcctggcgaacccgaacctcatctttcccggacagaaaatcgacatccccctcgaatacatcggcggattcgaggatgaagggacggtgaccatcgctgtcggcgaggccgtccgaagagcgaaaaaagacaaggaatggacgcccctccgtcccggcgacgtcgttcattccggcgatgaactgaaaacgggcggggacggcgggcttttcatttccttcgccggcggcaataccctccaactgatgccggaggcccgtttgaccgtcctggtgacgaaaaagatcgacgatttgaacatctttcagcggatactcctcggagccggaaaagccgtcgcccggatcaaggacgtgaccggacggtcgtcccgcttcgaagtcaagacgccctcggccgtggccgcagcccgggggacggtcttccgcgtcggcctggacgaaacggagacgacgcgggccgaaacgctccagggccaaatcggcgtcgaagcccaagccgtcctggaaatcgtcggggaaggggaggggacgatcgtccacaaggaccaagccccccaaaagcctcgaaagctcccgccgcctcccgccgttcttgatattccggccgaagagcaatttcctccgctccgcttccggttctccaaggtcgaggaggccgccggttaccgcgtctttctcgcccgggacgtggaggggcgcgaaatcatccttcaggcggccgtccgtccggaagaagccgcggtgttcgacggcctcctgcacgaggggacctattatctcatcgcccaatccatcgacgccgacggactggaagggccgggatcggcgccggtgcccgtgcgcgtcgggattcccttgccccccgaaccatcgtcccccgtggagggcgccatgttcaccgcgacgttcatcgacgtcgtttggccggagccgccccggacgggccggtaccatctccaaatcgccgaggatgaggatttcaaccgcctcgtcgtcgaccggaccgacctggccgcggccgtgttccgcactccggcgctttcccccggattctaccggctccgggcgagcgccgtttacggtcaagggcgggagagtgcctttaccgcgccccgccgtttccagatcatcgcccttccggacgcgcccctcctgtccgagcccgatatcgacgggcgccgggtcttcttcacctgcacaaacaggggcccgggcatcgtctaccggttccagttggcccgggacgatcgttttctcggactggtcgaggaacgcctttctcccgatccggaaatcgccttcctcatgccggacgaggccggcctctatcgcgcccgggtcgcggccgtcgctccctcgggcgtggaaagtccgttttcggctgtccggacattccgcgttctcaagggaggcgtgttccggttcctctgcctgattccggcgatcgcccttctgctggtcctcctgatctagaaaatcccatggcgacgcaccggaggtcccggctcccgccgttcggatcgatcccgtttctttctcgacgccggctcatcccggtcatcgccggtcttcttcttttcttcggagcggattatctgggcgttttcgacagttgggacatccgggcgcatgacgcgttcttccgcgttcggagcagccggccgacgtcggaggcgatcgttctcgtggggatcgacgcccggagcctgggcgtcctggggcgctggcccctggatcgggacgtgtacgcccgccttctggacaagctggatgaagcggccgtggtcggcttcgatttgatcctggccgagccgtcggccggcgacgagcggttggcggaggccgtccgaaggaacggccgggtggtcctggcttgttatttcgacgaggcgctgaacctggttctcccggccggtccgctggccgggacgcaggtcggccacgtccatatcgagcgcgggatcgaccagatctcccgttctctgtttcacaccatatcccgccctggaggtccggttccttccttcagcgcggccgtttacgggatgttccgcggcgggcgcccctgggcggggcgcaaccccctgccggattttcggccggacggcgcggccggccgcctcttccagaccgatcattcccggatcaattattacggccccccgggcacgtttctccggatctccttggccgatgtcttgtcgggcggcgtcccggaatcgtttttcaaggggaagatcgttctcgtcggggcgacggccgcgggcctccaggaccgctcggccacgccgttcagcgggacgcggcaggaaatgccgggcgtggagatccaagccaacgccctgaacaatctcctggacgggacggaaatccgcgattttcccctccccgccgcatggctgggagcgttcttgaccgcccttttgggcttggcgcttttcatccggacgccggagcggacggcggcctggatctgggcggccggtttggccggaatcacggccgcctcgtatcttctgttcgcccggtttcacctttggctggggccggcgcttttttatttcatgacggcttatgtctttctggccgcgtatctcctgaagctcgccgccgccgcccgccagctcgacgtcaagtacgccagcttggccggccatttcgccggcggcggggacctcggccgccgcggcgggaaaaaaggattgatcggcctgttcacccgtaacgggatcaacgaaaaaatcagcggactcctggagatcgagaaatcctacgagggaacgctggaggcggcggtttggcggagaacgcgagagctggcggaagccttgtcgatggtcggacggatgagcaacgagctgatcgtccggcttgcccgggcggtcgaatcgcgcgacgcgggcaccggaaaccacgtcgcccgggtcgccctctattcccggatcatcgccgaggccctgggccggccgctggactatgtcgaggcgatcgccttcaccagctccatccatgatatcgggaaaatcggtatccccgacgatatcctgttgaaaaggggccttctcacggacgacgaaaaagagatcatgcggacgcacgcccggatcggctacgggatcctggccgcctccgagcatccgcgcatccgggaggcggcggccgtcgccctcgcccatcatgagcggtgggatggatcgggatacccggccggcctgaaaggggaggaaatcccgcccgaggcgagaatcgtcgctctctgtgattattacgacgccctgcggagcgagcggtcgtataaaagcggcttggaccacgatacggccgtccggaccatcctggaaggagggccggattgttccccggcccagttcgaccccgaggtcctccaggcgttccggaaatcagcggacaaattcgacgacgtgttccggaggcaccgggacgacgctcccccggccgttttttgacatccgccccggcggtctgatacatttgaaattcgaaaacgctagcggaaccgcccggatgaaggagtcctccatgttcgacgcgaagacctacacgcaaagacgccgcctcctgagaaaacgcctgggatccggtttggctctcttcctcggcaacgaggaaagcccgatgaatttcgccgacaacgcctaccccttccgccaggactcgaccttcctttattatttcggcctggacacgcccggcttggccgccgtcctggacgtcgacggacaaaaggagatcctcttcggcgacgacatcgacatcaacgccgtcatctggatgggcgacctgccgaaaatgaaagaccgggcggcctcggtcggcgtaaggttgacacggccggcggccgccctggccggcgtcctccaggaagcggcccggaagaaacggaaaatccattttcttccgtcgtaccgggccgagcatctccaaaagctcgaatccctcttgggcctcaagcccgcccgggtttcggccgccgtctcgatcgatttcatccgggcggtcgtcgcccagcgcgaggttaaaagcgaagcggaggtggccgaaatcgaagcggcccttttcacgacccgccgaatgtacgacgcagccatgcggatggcccagcccggcgtccgggagatggacatcgccggccggatggaagggatcgccgcggccggcggccggggcctcgccttcccgatcattctttcccgggacgggcagatccttcataaccattcccacatccaccggttgaaaaaaggcgatttgcttgtcgtcgacgccggagcctcgtcgccgtgttattacgcctccgacatcacccggacgatccccgtcggtggaaacttcacctcgcggcaacttgatgtttacgagatcgtccgggcggccaacgaaaacgccgtggccgccgtccgtccgggccgatccttcaaggacgtccacgaaacggcggccctgaccatcgcctccggcctgaaggagctcggattgatgaagggcgatgtcgaggccgccgtccgcgagggcgcccacgccctctttttcccccatggcgtcggccaccaattgggcctcgatgcccatgacatggaaaacctgggcgaggatttcgtcggctacgacgaggcgaccaagcggagcgggcaattcggccttaaaagcctccgcctggccaagcccgtcaggcccggcttcgtcgtcaccgtcgagcccggcgtttatttcatctccgccttgatcgatttatggcaggccgaaaaaaaacacgccgatttcattgcctacggcaagctggaatcctggcggcggttcggcggaatccgggtcgaggacgacgtcctcgtgaccgcggccggccggcggatcctggggaaagccatacccaagacgcccgtcgacttggccgccgcgatcaggctctgaaagggaagaggacgcttccggacggaaacgagcgcgcatggtcagctggttcgttctctgcacgaaaccccagaaggagttccaagtcgagcgcctttttcaggaagcgggctttccgttctattgcccgcgcttcaagtcgagcgggcgaatcaagccgtttttcccctgttacgtctttctccgcttcgaataccctgaacaattcaagctggtgaaatacacccggggcgtccgccgcgtcgtcggcaacgacgccggggccgtgcccctggaggatcgcttcatcgaggagctccaatcccgggagatcagcggcttgatcgagctggagaaatacggggtcgagccgtcccctggcgacgagatcgaggtcgccgacggaccgtggaagggcctgcgcggtgtttttaaaaagagcctttcggaccgggaccgggtgatgattcttttgaattacgtcagttaccaggggcagctgctcatcgaaaaatccaaattgaagaaggtcctgtcatgaatgtctcccttctcaatctcaaggcccagtacgccggcctcaagccggaaatcgaagccaaggtgcttgaggtcatcgcttcccagcaattcgtcctcggtcccgaggtcgaggctctggaaaaagaggtggccgccctcagcggaacggcccgcgccgtcggcgtctcctccggcacggacgccatcctcgtcgccctaatggccctggaggtcgggtccggcgacgcggtgctcacgacgccgttcacgtttttcgcgacggccgggacgatcgcccgtctcggcgcccggccggtgttcgccgacatcgacccggtgacgttcaacctcgaccccctccgggcccgggacgccttggccgcgttccggaaaagggagcccggcgtccgggtcaaggcggttttgccggttcacctctacggccaatgcgccgacatggatgcgttcctggccctcggccgggacgaaggcctggccgtcgtcgaggacgcggcccaggccatcggggccgattatccctccgggtccggcgtccggaaggccggcgcttgtggacaagccggcacgctctcgttctacccgaccaagaacctgggcggtttcggggacggcggaatggttctcacgaacgatcccggcctcggccgccggctgcgcaagctccgcacccacggcgaaacggaacgctatttttacgacgaagtcggaggtaatttccgtctcgacgccctccaagccgccgttctccgggtcaagctccgccatcttccggaatggcagaagaagcggcgggccctggccgcggcctacaaccgcaagtttgccgagacggggcttcaggccgagggggccgtcgtcccgccggcggccgtccatgaattttccggagcggcggattaccacacgttccaccagtacgtgatccgggcggccgaccgggacggtctgcgggactttcttcgagaaaacggagtcggaacggccgtgttctacccgctgccgctccatctccagaaatgcttcgcctcgctcggctaccgtccgggcgatcttccggtcgcggaaaaagcgtcgaaggaagtcctggctttacccatctatgccgagctgaggacggacgagcaggattatgtcgtcgacaagatccgcgaattttattcccgctgagctccagccgggcctttcatgaccgaaccggccgaaacccggcgccgggcgaagcttcccaaaggggcgccgtgaccgcgacgttcatcaccggcggcttcggccatctcggccggcacatcgtcaaggccgtctccgatctgaatccggacggcgggatccggcttcttgtccgcacgccccgcccgacgccttccggcctcgaggggctgccgggcgtccgaatgatccggggcgatctcaaccggccggagacttatgccgccggcttggagggggccgcctcggtcattcacgccgccgccttggtttccttcaagccgtcggccgccccggacctgtaccggtccaatgtcctggggacgcgccgcctgctcgaggcggcggccgccgccggctgccggaatttcatctacatcagctcgatcgcggccgtcggccggccggtgcctcccgctccggctgacgagagcctgattcccgatctggagcgaaagcggcggatcgatccctacggatacagcaagcgcctgggagagctcgagctcgagcgggcggccggccggatccggcggatcatcctcaatccctcggttttcatcggtcccggttcgcggcggctcgacgctgttctccgcggattgaagtatcttcccgcggtcccgatgatccccgcccggaacagcttcgtggatgtgcgcgacgtcgcccgggccgccgtctcggcgctttcggccggccgagacggcgagcgttatatcgtcaacgggtacgatgtcgacatgccggagttcacccgggtgcttttaaaagccatgggcttgatgcggccggtgaaagtcgtccccgggagcatcctccgggcgacggacgggttgatccgcgcgctcaccgccctgggcctcaaccccggcttgaggcccctggggacggtcaatgtcgaccgggcctacgcgaccgataaaatccgccgcgagatggggtgggctccggcctattctctggagcaatcccttcgggacacggccggcctcgggccgtcattcccttccggccctgtcggcttccagccgttttaaaaacggctcgccgaggctgttcccggaaaaaaagacgaccccgtcggctccggccttccggccgatctcgatctgtccggccatgccttcgggggtgttccggttgtgcgacgttccgatcccgatcccgagacagactcggcacccctccgtccggagggcgacggcctcccgggcgtaagtttcgaacaactccacctcgttggtgtaaagcatcgggcaaagcatgtcgaccaggcccgagcgggcccattccgcccagtcctgcccgatgaggactttggaagcggcggcgtccggaaagacggccgccgagatccggaccgttcggccgagggtttgcgtctcccgccggagctcctggatgaaaagcgtcacccggcggctgttccagcgcagccattcggcccacatcatgttcccggtgtccttggccttcagttcgaggggatcggccccggtttcggctttgaacaggtcccggcttcgcttgtcgaaaccgtagaacggctcggtcggctcgcagggatagcgaatgtaatcgagatggatccagtccgcctcggggtagttgcggagaagctccagcatcagtccccgctcataagcccgggcttccgggatcgccggattgaccgagccggcggtctcgccgttcagtccctggacgagccactccggccggcgcccggcttcgccgattccggcgctctcggggaagacgcagaaccaggggtggacggtcaagttccggcgccgcgcctcgcggaggaaaagcccgaaaaagtcataagcgtaggcgggatcgggaacgccggccgagctccggaaatagacatggccggagggggacttcaccatgatgaagacggagtcgatcccggctcggacgtaggcctcgaagaccgcgcccatcgcggttgcagccgcggtttcgtccggcccgaattggccgggatgaagccagacgccgcggatgaaatcgttttccggggcggcggccgggaacgccgacgggggagagatccaaggcgggaaaacgagcagggcgagaatcgcgccggccgagcgaagaatacgggtcatgagggacgctccccggcggcggacggaggattttcctccggcgccgtcgttattgagattctccggccccgaaaagggcgatcttgaggccgaacgtcagcgagacggcgtcgagcttcagcttctccagcgttccggattggacgagaccgccggcctcgtcggtgatcgaccatgtccccttggtccggctccgcgtgtaccgaaggccggcctccaaggaccagcggggcgtcaggaggtattcaatcccgatcccgagatggacgaccgggccgccgtcggctgattccttgatggagattccgagcgcctcccaagcggcccggaggttgtcgctcagcgagaatgaatgaaaggcccaacccgctcccgcttctccacccaggacccatccggagcccaagggcaggcgggcccgcagggaggcctcgagcggaaagacgcgcagggttccgtcgctgagcccctcgagcgagccggtcacgcgcgagggccgccagccgaggccgagctcgacggcgaaccggggactccagacccatccggccgagattccggcgccgaaccgggaggaatacggctgatccaggggggcggagtagatccccgccgcgccgaaatagaattcggccggggcggcggcggccgaaaccaggaccgcggccgcaaccaggaggaggcgttttttcatcgggattcctttttccgggccggcgggccgtagccgcctcccccgggcgtttcaatgcggatgacatcgccggcttggaccgtcacgtcgcttttcgagccgagaacggtccggcgacccttggaaatgagaatattccgcccccgccgtccgggcccgccgccggcgagaccgtagggagggaaaacccggcgctcggacatgatcgtcacccgggtgggaacgccgaattcgtattcgcggacgagcccgtctcccccgcggttggcgcccgcgcctccggaaccgggacggagggaataggcgcggattctcagggggagatatttttccagggattcgagaggggtgtttaaagaattcgtcatgtgggtatgaacccctgaaagcccgggccgctcgcggctcgctcccatcccccctccgagggtctcgtagtaggcgaagctccgtccccggacgggatcgatcccgccgagagcgatgttgttcatcgtcccctggctggccgcgggaatgcggccgggcatggccttggccagggcgccgagaaggacgtcgacgatccgctgggaggtttcgacgttccctgcggccgtggccgccggaaaacgggcgctgatgataagccccggcggagcgacgatctccaagggacggagaagcccggtgttgaccggaatgtcctcctcgatgagcgaccggaagacgtagaggacggccgaaatcgtgacggccgcgttggcgttcaccccgcccttgacttggggggaggaaccgcgaaaatcgattttggctcgtccgccgcggaccgtgatccggacggaaatccggaccggctcttccgtgattccgtcgttgtccaggaagtcggcgcaggcgtacgttcctggggagatcgtccggagtgtttttcgaaggaaggtttcggtatagtcctggattagtccggcatatcgctcgacctggtccaagccgaatttctcgaccgcctcgaggacacggcctcgtcccttctcgcaggcggcgatctgggccaacaggtccccccgccgttcctccggcgtgcggacgttggccaggatgaggttgaggacgtcctcgttcaatcggccgcgggaaacgagcttcaagggcgggaggatcaggccttcctggaaaatctccgtggccaggggcatgctgccgggggacatgccgccgacgtcggaatgatgggcccggttggccgtgaaaaaggccggacgaccgcgaacgaacaccggggagatggccgtgatgtccggcagatgagtgccgccccggtagggatcattgaccaggacgaggtcgccgtcctcgaacgtcaaagcgccgagggcggcttggaccgaaagcggcatggctcccaagtggaccgggatgtgcgagccttgcgccagggtctccccccgccggttgaagaccgcgcaggaataatccttccgctccttgatgttgggggagaggccggtccgtcccaaaaccgcgcccatctcctcggcgatcgagatgaagaggttccggaagatttcaagctcgatcgcgtcgccggattttctcattcttttttccggatgatcagattgtgatagccgtccacccgcagggcgaagcccggcgggagaaacgtcgtcgatccctcgtccacgaccagggcgggtccgtcaaaccggagtcccggcgaaagccgcgaccggtcgtaaaccgggcccttgtgcgcccggccgcggtaatgaatggcttggattttccgcgcggcgtctccggccgaagcccccggacggggcgggattttacgcagacggatcttgccggccgccccccgggctttcacccggagagtcacgatttccacgacaccccgggcgtgacggtaggcgtaggttttttcgtggaggcggtgaaactcctcggccagggacttgaagccgcccggagggaagggaacgttgatttcgtaggactgcccgagataccggagatcgaccgaccgctcgaagaacatggcttgaagcgcgaacccgtcctcggccaggtcgcgccggccccgcttctccatctcctggaagccgcgctcgaggacggccgggtcggctttctcgacggtcttgaggaccgagcgggagtaatccttgatggaatcggccaggagaagtccgaatgcggagagaacgccggcgttttggggggcgagaacggctttcatccggagggaggcggctaaatcggccgcgtgcatgccgcccgccccgccgaaggagagaagggcgaattcgcggggatcgaagccgcgctcgaggctgatcacccggatcgctttctccatgttggcgttggcgatgtcgacgatcccctgggccgtctcgagcgtcgttttccggatccggacggccaggcgtccgatcgccgcccggcttcgctccggctcgatgactatccggccgccgaggaaataatcgggatcgatgcgtcccaggacgagatcggcgtcggtgaccgtagggtcctcgccccggccgtaacaagccgggccggggtcggcgccggcgcttcgggggccgacgcgcagcgacccgccggaatcgatatgggcgatcgagccgccgcctgccccgaccgaatgaatgtcgattatcggaaggcggatcgggaaatccccgaccgtgttttcgttcgtccggcggatatccccgtcgaccagggagacatcggtcgacgtgccgcccatgtcgaagctgatgaattcgggaaatccggcggcccgggccagctcgagcgagccgacgacgcccccggccgggccggagagagcggtccggatgggctccttccgggctttccggggggagatgtagccctcgttggactgcatgataaacaaggaggccttgtccaaccctccttccagcgattccaggtaccggtccaggacgggcatcaggaaggcgttgaccgcggtcgtcgacgtgcgctcgtattcgcggtattccggaagcaggcgcgaggagacgcaaacgagaaggccgcgccgctcgagctcggcggcgaccgcctcctcgtttgtcccgtcggcgtaagcgttgatgaaggagacggccgcggcctcgacgcctcggcggacgagcgtccgggcgagggttcggacggcggacggcgggggggtccgttcgacggttccgtcggcggtcgtccgctcggcgatcccgaagcacaagtcccgttggacgaggggaatccgcggctcgcctttcaagctgtaaagaaggcggcgggtttggcggccgatcgagaggatgtcctcgaatcccttcgtcgtgacgagagcgatcttggagcctttccgctcgagaagggcgttggtggccaccgtcgttccgtggatgaggacgaggcccggcccggcctcgaggtattcccgcagaccctccaggatggcccgggagggatcgtccggcgtcgaggggagctttttcgtcgacaggcgtccgtttctgctgatgacgaagtcggtgaaggtcccgccggtgtcgacgccgatccggacgattctcatttcaatggcaagtgctgcaggtgcctcccttgcaggaggaacagccggaggattccttcagccggctcgatccgccgccgatcccgaagccggagacgagcttccggacgtcggagctcccgcaggaagcgcagaccacctcggcttcccggccgaggcggacgagggcttcaaaccgtttccggcacttcttgcattgaaactcatacagcggcataacggaaatattttaccttttagcggggcgtccgtccaggatcaggatccggttttcttgtaaaggttcaagcggccgcggccgaaaagattgtccggcccgatctcgccgagatccttggcccgctcctccaggatcgtccggagctggccgggagcgaacggcgtcttggccatcaggagacccaaggcgccggcgacgtgaggagcggcggccgaagtaccggaaaaagcccgcgggcccaggacagcggtcgagacccgggagaaggcggtcaagtcgggcttgatccggccgtcggccgtcggtccccgggaactccaggcttgaaggacatcggtttcaaagtcggtcgctccgacagcgaccgccccgggcgcgtcggccggaatgcccaggctcccgccgggaacggcgtattcaacggcctcggcgttgccctggacgatgagccggaggcggggagcgccggcggcgttccatttcaggatcgaaatcccgtagtatgtcgctttgccggttttccacaacgaggtctgttcgaggggcttttggccggcctcgcccgtctgccagtcgtcgcagaattcgagcagctcccacgccgcgccggtccagcgccagagcaggaggtcgaagtcccgggtcggagcgtcgtaggacgacccgttccattccccccaatcgtcccaggtcaaaacggcccgcgtttccccgccggccgcgaccgcccactgaaggatttcgtcgccggaggcgaaatcctggaaggaatcgttgttggcgtcggtgaaatccgcctgccagtggctcaaggcgtcgtctccggccgcgttgacccagaggatcccccgggccgcgcatcgtttcacgatctcgcagatcggcccggtgccgtcgcccgccccggctcccggccagaccagggaacacgagatgacgtcgacgttctcggcgatgaggtaatcgacggcggcgcccagctcgacgtcggtttggaaattgaccaggtacaggagggcgtccggggccatatcatggacgatctcggcgcaggcggtgccgtgaacgagcccggcttccgggtcctcgtcggcccggaaggagcggacgatgatcccggccggcagctcgccgccgatgagggcggcgtatccggagaatcccaagtcgagaacggcgattttgacgggattcgccgtcgaccggtaagacgggaggtcgaaccacgaataggcgccgctgcgggcgacgccttcggacaggacggccgcgggttgggggagggagggaagacggagccgggaaatcccgggagacatggccaggaaggcgatcgactccggcggcaggagagcttggatcagccgtcccgaggtccgttccaccgtcccgcccagctcttcgatccggcggacgaagaagcgggtatcgtccggagaggggagcctccggccgtcgtcgcggatttcgacgaccgtccggacggccgcggtttcggtttggatcagccgccggagcggcgagtcgattttcgacggggtgcttttcaacggaagggcgtaccccgacaggtccgccggcggaggagcggtctccccggaggaaggattcgggcgggccgcggcccacaagacaagggccgagccggcggcaaaaaccaaaatcgtcgaaatcccctttgcggcgcgccggatcttcatgtcaacggccattatcgttttccacggcgcggcttgtcaaccggcttgttccaaacgacggttttcgtgtatattaccccttactctttccatccggaaatcgaatcgcgggcccggtcccttcggaacgagcccgaaaaggaacaggcatgaaagcgtacacgcccgacaaaatccgcaatctcgccctcaccggccatggagcggccggcaagacctcgctggccgcggccatgcttttcaacgccggggtcaccaaccggctgaccaaggtcgacaagggaaacacgatcaccgacttcgagcccgaggaaatcgagcggaaaatctcgatcagctcggctctctgcgtcgtcgagcacggcgaggccaagatcaacgtcgtcgacacgcccggatattccaactttctctgggacacgcgggcctgccttcgggccgtggacgcggccgtcgtcctggtcgacgccgtggccggggtcgaggtcggcacggaaaaagtctgggatatgctcgaggaatacaagctcccccgggttttgatcgtcaacaagatggaccgggagaacgcccatttcggcccggccctcgaatccatccggcagttcttcggccgccaggccatccccatccagattcccctgggcgaggagaaaaatttccagggcgtcgtcgatcttctgtcgatgaaagcctatgttttcgagaaggacgaaagcggcaagttcaccgaggcccccgttccggccgagatcaaggacgaggccgacaagcggttccgcgagctcgtcgaaatgatcgccgaaggcgacgaaaaactgatggagacctacctggacaagggcgagctgtcgcccgaggagatcctcgccggattgaaagccggaatccccgcccggcagattttccccgtgttcgcggccgccggcggggccaatatcggcgttcagccgttctgcgaccgggtcgccgggcttttcccctcgcccctcgaccggccggagatcgaggtgacgatcaacggccgccccgggacgctgaaaccctccccggacgagccgttcgccgccctcgtcttcaaaaccatctccgacccgtacacgggccggatctcgatgatgcgcgtcttctccgggaagatgccttccgacggagcggccgtcaacccgggcaaggaaaccgatgaaaaattctccggattcttcttccttcagggaaaggagcaggcgccggccggagcggccgtcgccggcgacatcctggccacggccaagctgaaagcgacgatgaccggcgacaccctggccgccaaggggagcggcctcatgatcccgccgatcaccttcgccgagccggcgatctcgttcgccatcgagcccaagacccgggccgacgaagaccgcatctcccaggcgtcccagcgcctggtcgaggaggatccgaccatccgcttcgagcgcgatcccgacaccaaccagctcctgatctccggaggcggcgaactgcacgtccggatcgtcaccgataagctgaaaaaacgctataacgtcgatatcgacctcaagccgcccaaggtctcttataaagagacgatcaaaggccgggcggatgtccagggccggcacaagaagcagaccggagggcgcggccagttcggcgacgtctggatcaagatggagccgctgccgcggggcaaggacttcgagttcgaggacaagatcttcggcggagcgatcccccgcaatttcatcccctcggtcgagaaaggcctgatcgaggccaagaaaaagggcgtcctggccggattcccggtcgtggatttcaaggtcatcctctatgacggctcctaccacgaggtcgattcctcggatatcgcctttaaaatcgccgcctccaaggccttcaagctggccatgcagcaggctaagccgacgattctcgagccggtgatgaacgtcgaggtttacacgcccgaagcctacatgggcgacatcatgggcaacctcaacggacgccgcggccgggtcagcggaatggagcagaagggccagatgcggattctcaaggccacggttcccatgtccgaaatgctagatttcgagccgacgctgacgtcgatcaccggcggccggggctccttcctcatggaatattcccacatggaggaagtgccggcccacctccagcagaaaatcatcgccgaggcggtcaaggaaggccggatcaaaacggaagaagaataacgaccgtggcggccggctgaattttgaggctggccgcggaattgaccgggccggtctcccgggctatcatgaccgcggttccccgaaagacggagggagacggccatgatgaaaagcatactgccgcggctggcgagggtgacggcgattctcttggcggccccgctgttcggacaggagatcgatccttcctttcttctccatatcggtgatccccggttcaaggacctgaccgtcgaagtgaaagccggggagatcgtttccctggaaacgggagccccggtatctttcgagacgatgatcgaggagatgcgggccgttcccttcgtcttcctgggagaaactcacgattccctgcccatgcatgagctccaagcccgaatcctccgggccctgagcgaccgcgatcccgccttggccgtcggcttggagatgtatccggtcgctttccaggagccgctttcgcggtggagcgccggcctcctcgacgaggacgccttcctgcgggaaggccgttggtacacgacctggaaccagaacttcgcctattaccggccgatcttcgccttgataaaggaacgccgcctccctctttacgccctcaacgccccgcgcgagatcatcactcggatccggcgggccggttgggatgcgctttcggatgaagagaaggcgatcgtcccgaagcccgacctggccaacgaggatcaccggaggctgatgcggacgatattttcgtcggaagaaatgcccgaggccatgaagggggccgggatggagatgatgttcgagggcttataccgggggcaggcggcctgggattcggtcatggccgccaacgcggtcaaggcccgcggcggcggggaacggaaggtcgtcgtcctcgtcggctccggccatctccttttcaatctcggtctcaaccggcggaccgtggagatgagcggccttccggggaaaaccgtcgtggccgtggaaattccccggggcaaatcatcgctgacggtctcccggacgctggccgattacatcgtcggcctcgaggcggaggagcgccgggcgtatccttccatcgggctggccttcaaaaagttcgccggcttggacaacccggtgatcgagagaaccccgatcgacggggcggcccggggccgggattttgaaaaaggcgacgtcgttttgtcggtggacgggcgcaaattcaccgacatcgatgagatgcggatcctcctggccggtttcggctggggggatgaagtccggttcaggctgctccgggccgggatggaaaaagacgtcgtcctcaagatggaagaaacgctcccggcgcccgggaaatgactcgaccgagctattttttctcggtcagctcgagataggcgttttcgacgaaggacggccagcgggacgggggggcgtccggcaggggagggggaagaagagcggccttcacttcctcgagggatttccccccggcggcgagcgccttgacccgggcgattatttcctccaggtcggaaagaagggccctgagatcggccttggccaacgggtcggcgtggcccgagaggtaagtctccaccccgtcgagctcgatcatttttttcaaggcggcgacgtagccggccgcggttcctcccttggaccggtggatgagcgggtcgcggccgacaaaggccaggtccccgatgaaggcggccttttcctcctgaaagacgacgatggtgtcgccgcccgtgtgagccgggccgagctcgaggagggtgaccgcggcggtttttcctccgggcacgcggaaaatcagctcgagtcgggcttcataagtttcggcgggaaggaaggcccggcggccggcggatcgttcttcttgaaaggccgcggccatttccgcttttgtcgcggcgctggaaatgattgtcaggcctcccggaaatcccggcaggccgttgacgtggtccccgtcgctgtgagtgagaatgagaaatttcaccggccggtccgtcacccgggcgatctccgcgagcatgccgcgaaccgcctcttccgtcatcttggcgtcgacgacgatcacggactcctccccgacgtaaaacgcggcgttcgctccggccccgcccttcacgagataaagacctccggatactcggccgacggtcatcggccccggccgggtcgcggccggtttgggcgacggatccgccgggggcgtctgccccccgagaaaaacggtcgagctcagaacaacggcggttaagatgaatcgggtcatgacggtccttccttttccccagtttgcctcgccgcccggccgatgtaaagaggatgagccggtccggactataaccgggcggcgaccgtcgccccgatctccgagggcaggggaatgacgatcgccccggcctcggacagagcccgggccttgtctccggcccgcccggcgcgaccctcgatgatcgccccggcgtgtcccatccggcgctccggcggggaggtcaagccggcgatataggcgaagaccggctttgggtattgatcgcggatgaggcgggcggcgtcctcctcggccgtgccgccgatctcgccgatcaggacgaccgcgtcggtttccggatcggcccgaaagagcttcagcccgtcgacgaagctcagtccggtgaccgcgtcgccgccgatgccgacggccgtcgactgccccagcccaacgtcggagatctgccggaccgcctcgtaggtcagagtcccggagcgggagaggatcccgatccgcccgggacggtgaatcgaccccggcatgatcccgaccttggcccggccgggagtgatcacgccgggcgtgttcgggccgatgagaagagaagaagtccggcggagaaatgcccggacacggaggacgtccaggacggggatgccctcggtgacggccacgatcaggctgatgccggcctcggccgcctccatgatcgcatcggcggccgcgaacggcggaacgaatagaaccgagacgtccgctccggaggccgctcgggcttggcggaccgtgtcgaacaccggccggccgagatgccggcggccgcccttgcccggggagacgccgccgacgaggcgcgttccgtattcgatcatccgctgagcgtgaaacgagccttcctttccggtgaatccttggacaatgacccgggaatcgcggccgaccaggatgctcatgcccggccttcccccgtccgccgggcggcggcgacggcccgggcggcggcttcgcccatcgtttcggcgctctcgtattccaagcccgaggcggccagcagattccggccctcctcggcgtttgttccctggaagcggacgacgaacgggacgcggacgcctttttccccggccgcccggagaaggccgcgggcgatgacgtcgcagcggacgatgcccccgaagacgttgactaaaacggcccggaggccggcgtcggagagaacgatttcaaatcccgtcttgaccgcgtcctcggagactcctccgccgatgtcgagaaagtcggccggccggccgccggcggcttggatcaggtcggcggtggccatggccaggcccgccccgttgaccaggcagccgatgtctccgccgaggcggacgtagctcaggccggaccgggcggccgccgcttcggccggatcggcgtccggatcctcggccgccggacgaagctcgggatggcggaacagggcgttgtcgtcgagaacgatcttcgcgtccagggccaggaagcggtcatcctccgtcaagcccagaggattgatttcagcgagagtcgcgtcgttttggaggaaggctcggacgagaccgtccatgatcgcctcggcttgagtcctcgtttcgccggaaaggccgagggcgaaggcgaggcgccgggcttggaaaggccgcaggccggcgaacggatcgaccgtctcccggacgacggccccgggcttcgtccgggcggtttcctcgaggtcggcgccgccctcggtggaggcgagaagaagaatccggccttcggaccggtcgaccgcggcgccgaggtaaaactccgagcggagagccgcggcttcctcgacgagaatcgtccggaccggcaagccttttcccccggtctgagcggtgacgaggggcgtcttgaacagggattcggccttggcccgggcgtcctccgggccgagggcgaacgtgacgccgccggcttgaccgcggccgccggccggaacctgggctttcaggacgacgcggccgccgaggcgttcggccgcggccgccgcccgggcggatgtttcgacaagctcgccgttggggaggggaatgccgtatcgggacaagagggccttggaccggtgctcgatcagtctcatcccgggatcatcgcctcgacgccggatcgaaaaaagcggagggccggcggcctcacttgatgtagcccagcgtcctcaagtcctcgagcattttcttctcgatctctttattgtccggagcgatctttcgggccgctccgccttcataggttttgaccgttttcaccgaatgcgttttcaagaactcgtccttgaaagcctcggtcatgatcttgccgtccatgtcctcggccgccggctgtcccaggaggtacaggagcgtgggcagaatgtcgtagatgtgggccttctcaatcttgtagcccgccttgaaggcgggtcccttgaggaagacgaccccgtgggggagggtgggcatcttgaagtggttgtagcccatgccgtccttgcccagcatgaacccgtgatccgagacgacgatgaccgtcgtccggtcatcggccagcccgaggatccgcccgacgacccggtccatgtaggcgtagaccggctccaggacgcggctgaaggccaaatcgacttgaccccgggtggccttggagacgccgtcctttttggactcctcgttcgccttggccaggagctcggggtcgacgtgcgacacggcgaaatggctggtgacgtccaagatgcggaaataagtggcgaagacgttcaccgggtgttttttatacagatagagactggccgattcgacggcccggtcggccaggaggtacttgtaaaagtgggcggccaggctgcccttgggggcgcccgccccgagatccgggatgctttccttcgtccggagggattcgtagttttccccgtggacgaaatcgagttcgccgagcagttcgggcggataggttatggccgcgcccggggctaagggatcgtcggcgccggtggcgaaggccggggagaccatgtagccgttgacttcctccgggggaaacgtgacgaaccagttgaccaccccgacgttcaggccgagctcgccgaggatgttccagaacgccttcacccggcgggctgattgggagtagggaaccgtgatgtcgttgtccttgatataggtccaatcgacgatcccgtgcttgaccatggttttcccggtggcgatggatgtccagatgaccgaggatttcgtcgggttgatcgttctcaggacgcccgagcttccttctttcatcaaccgttcgaaattcgggagttttccccgtttgatcaggggattcatgaaattccagctcgcgccgtccaccccgatgaggatcacccggggggagccggaatccaccccttttttgcggcaggacgccgaaaggccgaagattaacaaccctgaaaccacgaggcaaacgagcggattgagccttttaaacatagaggaatggtaatggaggccggcgcgggtgtcaaccgcggccggcggaggaggccgaaaaaaagccgccccgccggaaagaaggcggggcggccgaaccgattcggggaccgaacgcctagagcttggtttcctcggtggtttttttcacgccggcgatcgttttctgaaggagggcgttttcgtcctcggtcagcttgatttcgtagatcttttcgacgccgttggcgctgatcatcgccggcactccgatgaaaagcccgttgaccccgtattcgccctggcacagggcggcgcaggggagaatacggcgcttgtcgcggagataagattcggccatgacgatcgcgctccaagccgggctgaagaaagccgagcccttgccgaagagcttgacgatttccgtcccggcttcccgggtccggagggccagccggtcgatctgttccttggtcgcgatttcggtcaagggaacgccgccgaccgtggtcaagcggggcaggggaaccatgtccgggccgtgtccgccgagaaccgttccggccacgtcggccaccgacacgccgagctccatggcgatgaaggcccgccaccgggcggtgtccagagtcccggccattccggcgatccggttgcgcgggaatccggtcagtttgtagaaggaataaaccatcgcgtcgagcggattggtgatgatgatgcagaaggcgttcggggcgtactgtttcaccccggcggccacggtggagatgatcttcaggttgacggccagaagatcctcccgggtcatgcccgcctggcggggccggccggcggtgacgatgacgacatcggctccggcgatgtccttgtagtcggacgttcccgtgataaaagcatcgtagttgccgtgaggggccatttccatgaggtcgagagctttgcccttggccggattttcaaactcgggaatatcgaggatgacgatgtctccgagttccttctgagcggcgatcatcgccaggatttgtccgatctggccgccgccgatcagggcgatcttcttgcgcataacgtctctccttcctgatattttgattcccgggtttcagcccggaatcgcatccgtgtctgcttcatcggccgcgatagtgaaatcgggatgggggagtttaccccgattcgccgaaaaacacaaccgcttctccggcttcaggttgccgccgaccccggtcatcggttaaactgaaatttcaaaagaacgaaagaaggtgcgcgctcatgatcatcaaggtgaacggccggacgatcgagctcttcgccggggccagtgtcggggacgcaatccggcgccattcccgggaggcttggcggaacgtccggggaaaacgggccttcgttttcgacgcctgggggaacgaaatcgccctggacggcgcgctttccgagggcgacgagatcttcgttcgttcctccggcgccggggagagatcctgatgaagaggatgatccgcctcgttccggcggccgggctggtcctggccggaatcctggcgtccggaagcggctccccggccgcggcggagattccaccttccggggaaacacggatcgtcattttccactccaacgacgtccacggcaaaatcgaaaatttcgccaaagtggccgcgatcctgaagaaggagcgggcaagcggggccgaggtgttctacctgtgcgccggggacaacttcaccggcaatccggtcgtcgaccggttcgagccgaagggcgagcccgtcctggaaatctacaaccgcctcggactcgacgccctctgcctgggaaaccacgagttcgattacgggctggatgtcctggagagcttcaccgcccgggcccgcttcccggtcgtttgcgccaatgcccgcgacgattcgggcgtcttgccgcacctgcggtcctcggtcgttctcaccggccggaaagggacgaagatcgtcctcttcggcctgattcagattgaagccgggaacggccttccctcgaccttgcccgaacgggttgcgggcctgcggttcgaggaaccgttcctcaaggcctcggaattaaaggatctgcgcggagacgccccgctgttcatcgggctgacccacctcggcctgggccaggaccggaagctggccgggcaaatgcccggcctggacgccatcatcggcggacactcccataccagggtggatccggccgcgaccgttaacggcgtgctggtcgcccaagcggggagcgacaaccggttcctgggccgggtggacctggtccttcgggacgggcgggtggcggagaaaaaaggctgcctgatcgacctcgaccgggaaaagaaagaggaccgcgaaatcaagcgcctgatcgaggaattcaacgagaatccggccttggcccgagtcctcgcctcggcccccttcgacatcacgggcaaggaggccttgggcagcctgatgaccgacgcctggcgccgcgagctcggcctggacatcgccttccaaaacaacggcggcatccggctccgccgcctgagccggaaaatcacggtcaaagacgtctacgcccttgatcctttcgaaaaccaggtcgtggtcatgatcatgacgaccgacgagatccgcaacctgatccggatctcgttcgaaaagggggagggcatcgacctccaggtttcgggtctcgtctacacggtgcgcatcgacgccgagcggcgcgttcaggacgtccagctcatcggccaggacggccggcccctccaagaagaccggacatacaaggtcggtttttccagctacatccccagcgcttatgatttcgcccaccgcgatcccggcaagtcgctcgggatcaccacggccgacgccctgatcaactatctcgaaaagcgtccccgtctctccggctaccagaacgtccaaagagcccgcatccggcattgagccgccgaatccgggaccggctccctctctcgggaaaccgttcggatctagaacgaagggcggcgttcgcttgatcatggagaacgccgggaaaagagcttgatgaaaggaaagaggacggccgtccgcccggaggaaaggccgccgaccaacagaacgcggcgtttgagacggacggagggtcccggcgagacctctcccggcccaggcttcggagcgaccgccggaacgaaaagaaaagcgccgccgatcattgggaacatttcaatgacttgaccgccgcccccgttcctcgagtaaactagaagaatccgaatccgccttcggagcggatcgattcattacgtccgcaaggagccgccgcgatgttggatcattatttcaagcacgccgatgaacgccgggccctgggcattccgcccctgccgctgaatccggaggatacggccgaagtctgccgtctgctcgaagccccgccggccggcgaggccgaccggcttctctcccttctccgggaccgcgtttcgccgggcgtcgatccctcggccggagtcaaggcggcctggctggccgacgtcgcccgcggccggaagacctcgcccgtcgttccgcccgaacaagccgtttttctcctggggacgatgatcggcggctacaatgtcggtccgctcgtcgaatttctcggagttcccgccctggcccaaaccgcggccgaagccttgaaggggacgattctcgtttacgcggcgttcgatcgagtcgccgccctggccgcgacgaatccggcggccgccggcgtcttgaaatcctgggccgaaggcgaatggtttctccgccgccccgccttccccaagtccctgaccctgacggtctacaaggtggacggggaaatcaacaccgacgatttttccccggccaagcaggccgccacgagaccggacatcccgctccacgccctggccatgggcgggacgcggtttccggacggcgcggccgccatcgcccgattccgggctgaaaacaagcgggtggccttcgtcggcgacgtcgtcggcacgggctcgtcgcgcaagtccgcctgcaactcggtcatgtggcatatcggggaggacattcccttcgttcccaacaagcgccgcggcggcgtcgtcctcggaggcttgatcgccccgatcttcttcaacaccaccgaggattccggcggcctgccgatccagaacgtcgacgtcacaaggatgaacaccggcgagtcgatcgtcctcgatcttgaaaaggggacgatcatgtcggccgccggcgcccttctctcgaccttcgagctcaagccagcgacgatcaaggacgagttccgggcgggcggccgtcttaacttgatcatcggccgggccttgacccagaaagcgcgggcggcccttcgcctccccgaggcgccgttctttatcccggtccgcaatcccgaggcgaaaaagggacagccgttctctcaagcccagaagatcgtcggccgggcttgcggcgtggacggcatgctcccgggttcggcgtgcgagccgaaaatgacgaccgtcggctcccaggacacgaccggccccatgaccgccgacgagctgaaggagctcgcctgcctggaattccaaaccgaccttttcatgcagtcgttctgccacacggcggcttatccgaagccggccgacgtcaagatgcaccggttcctgcccggcttcatcaccgagcggaaaggcgtttcgctgcggccgggcgacggcgtgatccattcctggctcaaccgtcttctgctgccggacacgatgggaacgggcggcgattcccacacccgcttcccgatcggcttgagctttccggccggttcggggctcgtggcgttcgccggagccctcggcttcatgccccttgacatgcccgagtccgtcctggtccgcttcaaggggaagctcaatcccggcttgacgctgcgggacgcggtcaacgccattccgtacttcgccatccggcgggggctgctcaccgtcgccaagaaaggaaaggtcaacgtcttcaacggccggatcctggagatggaagggctgccggatctgaccgtcgaccaggcttatgagctgacggacgcctcggccgaacggtcggcggccggggcggtcatcgccttgtcccgggaccaagtggcccggaacctgcggagcaacatcgccctgatgaccaagatgatcgaacaaggctacggacacgccgaaaccctccggcggcggatcgccgcggtcgaggcctggctggccgagccggcgctgatcgagcgggatgagaaggccgtcgacggcggagcgtacgcggccgtcctcgagattgacttggccgatatccccgagcctctcctggcttgtcccaacgatcccgacgacgtcaagctcctctcgaaggtcgccggcgacaagatcgacgaggtcttcatcggctcctgcatgacgaacatcggccatttccgggcggccggacggatcttcgacaaggccggctgcccgccggccaagatctggctgacgccgccgacgaaaatggacgagacccggctgaaaatggaagggtactacgcgatctattcccaggtgggggcccggacggagattccggggtgttcgctgtgcatgggcaaccaagcccgggtggcccccaaggcgacgatcctgtccacctcgacccgcaatttcgacgaccggatgggcgacggggcccgggtctatctgggctcagccgagctggcggcggtcgccgccctcaagggcgcccttccgagcccggccgaatatttcgagacaatgaaggcgaaagtgttgccggcggccgaggaattgtacgccccgctggatttcgccgggaccaaggattttaccctcggctacgccggggacaggtgagcgccgtgattaccctgaacggacaacgcaccctgatcacgggcggctcccgcggcatcggccgggcggcggcgatcctgttcgccgaggccggcagcgacgtcgcgttcaattatgtccgcgacgaaaaagcggcggccgaggtcaaggaagccgtcgaatcccgaggccggctctgcctggtccggaaagccgacctggcccgccgggaagacgccgcggccctggccggggcggtcgccgacgcctggggaggcgtcgacatcctcgtcaacaatcacggcatctggacttacctggaaatgggcgagggaaacgtcgaggcctggaagacgacgatggaggtcaacctggacggcgtttattacctgacggacgccgtcgtcccgcagatgaaggcccgcagcaagggatgcatcatcaacgtcggatcgacggccggaatccggggcgaggcccatcattcccattacgccgcgaccaagggagccttgaacgccctgaccaagtcctggtcctcggagctggctcccttcggcatccgggtcaattgcgtcgccccgggctgggtggacacggacatgagcgccggttcgttcgccgacccggccttccgggagagcatccgccagtcgatccccctgaaacgcatcccgccggccgaggatatcgccggcccgatcctcttcctggcctccgacctggcccggcatatcaccggggcgatcatcaacgtcaacggcggagcggtcctgtgcggttgaccccggccgaaaaattatgccttgacatccctttcgggcttgtgttattcaggagggcggtttaaagaattcccatgggaaagaagcatctctccctgatcgtcattccgcataccaccaagtctccccggacatggtcgttttcgcggaggacggtcaaggctgcgacggtttgcggcatcggtctggccgttttgatgacggccgtcacggtcgattacgtccgcgtccgcctttcccgccggagctaccactccctggtcgccgaaaacgcgaagcagaaggaagagctgcgcgtttatgggacgaaggtcggggagctggagcggaagctgaacggcttccgggaatacgccggcaagctgaatgtcttcgccgggatcaagtcgccggaaatgttgacgaatcccggcgtcggcggcgggcaatccgcctttccgccggatgcggctcaagtgatccctcctcccggaaatccgccgccgtcgatcgcctccgtccaggatctgacgcggacggccgatgaccttgagaaaaaccttgacgccctgctttcccatttcgagcagctccagggccagttcgccacccggccctccatcgccccggtcatcggctaccgctccagcggtttcggctggcgcctcgatccgttcggctcgggccggcgtgccttccattccggcctcgacatcgccacggttcatggaaatccggtggtcgccacggccgacggcgccgttctccgggtcgcctacgacggcgccctggggaacaatatcatcatcaaccacggcaacggaatcacgacgctctacgggcacttgagcaaagcgcttatcaagccgggcgcccgggtcaagagaggcgatacgatcggcctcgtcggacggacgggccgggcgctgggcgaccacgtccattacgaggtccgccttaacggcagcgcggtcaatcccaatttgtatatcttggacgaattctgaccgctattcgagcaaatcccccgcttgaatccctccccccaagacgaaggcatgggcgtccatttccgcccggctttccggatggaggcgggtgatcagataacgcgtccccccgccgcaagcgaccgtaatcccctccttggacaggcttgtcaccgtccccggcgggccctgatgggcgggcgtggcgacgccttcgacgggccggccggcgaggatgatcaaccggcttccccgcagccggacgaaggccgccggtttcgggcttaaggcccggacgcgccggtcgatttcgacggcgctccgcgtccattcgatccggccgtcctccttgcggatcttaggcgcgagcgtcgccagcgaatgatcctgggaacgggggatgatttcatcgatgcggtcgagcgttcggagaagaagtccggccccgagcgaggccaggcgggcttcgagctctccggccgtttccgaggaaccgatcggagtttcctcctcggccaggatgtcgccctcgtccattttctcgttcaagctgaagatcgtcacgcccgtccgtgtctctccggccgcgatcgcggccgcgaccggggcggctccccggaagcggggcaggagggagaaatggacattgaccgtcccccgcggcggaagggccacgatcgtcatggggatgatctggccgtaggcgacgacgacttggatatcgggagccgcggcccgaagccggtcgaggatctccggatccaaacggattttttccggctgggcgacggggatcccgcggtcgagggcgaaccgcttgaccggaccgggaagaaggcgcctgcctcgtccgacggggcggtcgggttgggcgatgacgagagggatttcgtggccggcttcgaggagggcctggaacgaggggacggccgcctcgggacttccgaaaaagacgacgcgcatgggggcgttcagggcttcgcggccgccgcttttctgaatttcttccggatcaagctgcgcttcaggggggagaggcggtcaacgaacagcttgccgtccaggtgatcgatttcgtggcagaacacccgggcgagaagatcccgggcctccaaaaccctttcctttccttcaaggtcgagcccctggaccgtgactttctgcggccgggtcactttttcgaagacttcggggacggacaggcatccttcctcccggatgatttggccttcctgggaggtgatttccgggttgatcatgatgatgagatcgtcgggattttcaccgatggaaagatcgaggacgatcaggcggacggagacgttgacctggggggcggagaggccgagacccggggcggcatggagggtttcgatcatgtcccgggccagtgtccggacgccgtcgtcgatgaccgtgaccggagcggacttcgcggccagggttttatgcccgatggtgatgatgggtctcagggacatgggccgtttccgcaaaacattttaacggaattttccgttgctttccagggggtgaaaaaaagagcgccggcgcggcggcttgccggcggccgccgggcggcttctcgagaggaaaaaaaaagggggacggaacaaggttccgtccccctttttccttgctttacataaccgccgacggcggcgggggctcatcggcctttccggcgttccggatcggcacgtagatcaggtaccaggccatggccgcgatggccaagaggccgagccagtaggacggggcgctgaagaggcgcggcacgtcgaacttaatggcgttctgaaggaacaggattttccagagggccttgaacaagccggtcaatccctcgccggcgatcagcccggcggcgatcaggatgccgacgttctccgcccgggccttctgggcgggattgagccggcgcttggccacggccttgtcggccagtcccttgatcatgccgccgacgaagatggcgaaggtcgtttccagcgggaggtacatgccgacggaaaccagcatcggagatttgacttggagaagaatcatggcgaagcccatcagcattccggcgatgaccaggggccaggccatttctccgccgacgatccccttggccagggcggccatcaagcccgcttggggggcggccagctcgcggctgccgaacgtgtaggcgccgtggagcagcatcatcggaaaatacataacggccgcggccaagaagattccgatgacgtttccgacctccattttccatggcgttccgccgaggatgtgcccgaccttgaggtcctggagcatttcgccggccacggccgaggacacgcaaacgaccgcggccacgcccaggacggcggccacgccgctggccccggccgccccgacgacgaccatgaggagggcggcgatgatcaaggtcgaaagagtcaggccggagatgggattgttggaggagccgatcgtcccgacgaggttccccgagacggcggcgaagaagaagccggccacgcccatgacgaccgcggcgatcagggccgggaaaaacgccccggcgaaaacgcggtagacgagaatcatgcagatgaacgtcagggccaggccgcccaggacgatcttgatgttgaggtctttttcgagacgggagacgacgtgagtctggccggtcgccttcttgacgtcggagaacgaccgtttgacgccggcggacaggttcttccgcatcttgaagagcgtgtagccggccccgacgagcatccctccgacggcgatgggccggatgatgaacttccatacgttggtgaccaagccgccccaatcctcggcgggaacgacggccccggccccgtagatcatgtcgatcagctgggggccgaggaagaacatgagcaccggggcgaacaggccccaggccaggaggccgccggcgaagttgagggaggccagccgcgggccgatgatatagcctacgccgaggtaggccgggaaaatgcccgggcccgagacggagaccatgccgccggcggtcaccttggtcgaggcttcctccgttccgagacgaacgaagctctggccgatcttgccgatcttgaagaggaaatccttgctggcggcgtagatgccgaacatgtcgagagcatagaagaaggacccggcgcccatcgcccggaagaggtgcttggcgctgctgctgccgtgctggccggccttgtggatctcggccgcggccacggactcgggaaagccgagctcgggatcggtgaccatgacccggcggaggaaagtgacgaacaggattccgagaaggccgccgacgaagagcagcgcggtcgttttaatataagcgtcgaaggtgtcgaacttcagccacacgccggcgatcaagaaagccggaatcgtgaaaatggccccggcggcgaccgattctccgatggaaccgacggtccgggcgaagttctcctcaagaatggaacccttcatcaggcgcaggacggccatgccgatgacggccgcggggtaggtggcggcgatcgtcattccggcccgcaggccgaggtaggcattggccgctcccaggacgacggtcatcacgagcccgatcaaaagggcccggagggtgaattccttcatatcggttttttctggaacgaacggttgatggctcatgcggcctccttggaacggaagccccatttatatcgggaatcatgttttcagtcaagggcggacctcttcctcccgtttccgggcgtccgccggcggcggatccgcgttccattgcgccccgcgacgaattgtgtttaaatagcgtctctcaaaagaattaggattcacgcaaggaagagttcggcatgagtctttatcgctggttcaagaacaggcttttctgcgacttagccatcgacttgggaacggccaacaccctcgtctacatgaagggcaaggggatcatcatccaggaaccgtccatcgttgttctcaacaagcagaccggcaaggtcgaggccgtcggccagcgggccaaggagatgctcgggaaaaccccggccaacatcctggccatccggccgatgcgagacggggtgatcgccgacttcgagatcgccgagaagatgctggacttcttcatcaaggaagcgaccaacaaccgcggattcctcctccggccgcgcatcgtgatcggcattcccaccgggatcacccaagtcgagcgccgggcggtcaaggacgtggccatgcgggccaaggcgaccgaggtcttccttgtcgagcagccgatgtcggccgccgtcggggccgagctgccgatttccgagccgacggggaacatggtcgtcgacatcggcggcgggaccacggatatcgccgtcatttccatggacggcatcgtctttaatcattcgatccggatcgccggcaacgagatggacgaggcgatccttcagtatctcaagaagaaatacaacctcctgatcggggagcggtcggccgagcaagtcaagatccaaatcggatcggcctaccccctcgaccagcccctgaccatggagatcaagggccgcgacctccgcgagggcatcccgaagacgatcgtcatcgatgaccaggagatccgcgaagccctcgaggaggtcgtgggggcgatcatcaacgccgttcggatcgccctggaaaaaacgcctccggagttgtcggccgacatcatcgaccgcggggtcatcctgaccggcggcggagctcttctcaagaacctggacaagcgcatccgggaagagacgcagctgcccgtgttcatcaccgacgatccgctgacggccgtcgtcctgggagcgggaaagatgctggacgatatcgacctgctccgcaagatcgccattccgtaaaacggcggcccggccatgccgcgatttctgaaggagcgcaaaaacggacttgtgctggcgggcctgatgttcgctcaagcggtcctgctttccttccagatccccctcggcgaggaggccagctatatcgagcgggccgcgttcgccgtcttcgccccgatccagcacgggattcggagcgcgctccggggcggcggggatttcttgggacggtatctttacctgcgccgcgtggaggaaaaaaaccggaggtaccgggacgaattgttccggctccggcaggagaacgccctcctccgaaacagcctcgaacggctggaggaccgggaggccgcggacgcgtttctcaaccggctggaccgggcgttcgtcctggccgacgtcatcggcgtcgatgccctccagcccttcaaatcgatcgtcatcaaccgggggacacgccatggagtgcggctccagatgccggtcgtcgacgcccggggacgtctggtcggacggatcatcgccccgatcgattccggcgaagcgaccgtccagctcatcaccgacaacctcagcgcggtcagcgtccgcggcctggagcaccccgtctcggggatcttgagcggggacccggcctccggccgggcttggatgatttatgttccggcctccgacgaatccttggtcgaaaacgaagccctggcgacgaccgggttcgaccgcgtttttccgccgggacttccggccggaacgatcgtctccatcgggacggacggatcgcttttcaagaaaatcgccgtccagccggccttcgatttccgcgacctggagatcgtcgctgtcttgaccgggccgtcggggggaagggaatgagaaactggatcgacggcgcgctcgcggcggcggccgcctttctcgccttttccctgctccggcctttgtccgcctccgccgacctggtcgtggacgtgttctccgtggccgtcctcgtcttcgggacgcacaagggcgaggcgccgggggctgttttcggcgccgcctgcggcttgatcgtcgacgcgttttccctcggcgtcttcggcctcgccggtttgagcctgacgctcggcggtttcctggccggatacgtctcccgcaaaatcaacatccagccgtttttccggatgttcgcctttttcgccgtcctggccgccgggacgttcgccggctgggccgggctttcggccctgatcggccggagtcccctcccgtggtccggggggctcctcctcctgcgcccggcggtatcggcctcggcggccgcgatgatcaacctcggaatccgccgatggaaagcccgccgtgagcgataagggcatttacgaggatttctccctggtccgccgccgggcccggcgcattttcgtgatcgtcgccgtcttgtgcggcctgaccctggccgtctactggaaaatccagattctcgattataaaaagtacgaatccctggccgtggccaatcggacccgggaaatcatcctgccggcgccccgggcgattctgaccgaccggaccggggacatcatcctggccgacaaccgggcggctttcaaggcttccttcatccgggagaacacccgggacgaggcggcctccatcgcccgcgtcgcgtccctcctggaattggatccctccgtcgtcgcctcccgcatcgaaaaatacaagtcttggccggccttccggcccatcgtcgtcaaggaccgattgacgttcgaagaagtggcccggatcgaggcgcggaaaaacgacctgccggaattgatcgtcgagaccgagccgagacgattatacccgcgacagtcgttctgctcccatgtcctcgggtacctgcaggaagccgacgccaacgacctgaaggaacgggcccgagagctgcggcccggcgacatggtcggaaaaatgggaatcgaacaaggatatgaccgtcgcatcgccggccgggagggacgggtcatcgacgtcgtcgacagcctcggccgcaagcaaagcgagctggagcgcgtcgaccccgtgcctggaaagaagctggccctgacgatcgattacgatctccaagccaaggccgaggagctcctggccggccgggagggggcgatcgtcgtcctggatccctcgaacggagagatcctggctctggccagcttcccgacgttcgatccgaacaaattcatcacccgtttcacgccggaggaatggcagtcgttcgtcaacaatcccgacaatccccttctcaaccgcgccttgcaagggcagtattcgcccgggtcgttgttcaagccggtcatggggatcgcggctctcgattcccgaaccatcggcctggagacgacgttttattgcggcgggggcatcgagatctacggagccctccgccgctgctggaatgaggccggtcacggcgccctttccctgcgcgacgcgatccggtattcttgcaacgtcttcttctatcagctcgggcgccggatcccgatcgataccatcgcccggtatgccgagatgatggggctggggaggaaaaccggcgtcgacatccccggcgaaaaggaagggctggtgccctcgacccggtggaaaaaaaccacgcgcaacgaggagtggtatcccggagagaccatttccgtggcgatcggtcaagggccgctccaggtgacgccgctgcagatggccgtcttgaccgcccggctggccaaccgggggcggggcattcggcctcatctcgttctcggcgcttcggaggagccgccgggggattccgctttgaacgtccggccggaggttttcgaacaggtgatcgaggggatgtggcggtcggtcaacgagggcggaacgggccaaggagcccgcgtcgagggcttcgccgcctgcggaaagaccggctcgacccaaacgatcagccgggagacggccgaacgcatcggaaccggggccaaagccgcgaaaacgcactcttggttcaccgggttcgcgccgcgcgctcagccccggcttgtcgtcaccgttctcgtcgaatacgggggcgggggaggggcgacggccgcgccgatcgccgggaaattgttttctctttataaatcaaaccatgatcgaccgcgttcaactcaaggaaattgactgggtgctcacggccttgatggtcgcgaacactctcgccgggatccttctgatctacagcgcctcggccgacagcggcggcggatacgcctggaagcagcttctttggatggccgccggattgatcgtcttctttctgacgatctccatcgattacaaggcctggatggcctttgctccttatatctatgccttgtttctcctcttcatggccggcctgttccttttcgggcggacggtctccggctcccgcagctggatccggatcgccttcatgggagggcagccgtcggagctggccaaagtcgccgtcttgttgatgctggcccgggtcttctcggaataccgggcgccctacgcctcgcgaggcgtgatcgccctgagcgcgggattggtcggagtccccatggggctgattctcctgcagccggatttcggaacggccatgtgtttcctgccgattcttttcggcgccctggtcctggccgggctcacgaagaaaaccgtggccgcgatgctcatcggggcggtggtgctcggggcggccggctggaatttctttctcaaggattaccagaaaaagcggatcgagatgatgatcaatccggcccaggacccgcggggggccggttatcacgtgctccagtcccagatcgccatcggctcgggcgggctgaccgggaagggatatttaaaaggcccgcagagccggctccggtttcttcccgcccgccacacggatttcatcttcgccgtcttggccgaggatttcggctttgccggcgtttttgcggtcttggccgcctatttcgccatgctggcccggatgttctcttccgtcggactgtcccgcgaccgggccggcatttacatcgcgtttttagccgccggtttgatttccttccaattcctggtcaatgtcttcatgatcgtgggatggctcccgatcaccgggattcccattccgcttctcagctacggagggtcgtcgctcctgtcgacgtatttcgccctggggctggtcgtcaacgtcaagatgcggcggttcgcgaatgtttgacccggagcgcctcttcccccggatcgaaaaacccggccgctacaccggcggggaatggaactccatccgcaaggatcccgcccggacgagcgtcgccgtcgccttggcctttcccgatgtttatgaaatcgggatgtcgtacccggggcagaaaatcctttacgatattctcaacgcccggcccgatcttcgggccgagcgtgtcttcgccccgtggccggacatggaggacgcgctccgggcgtccgggattccgctgttttccctggaaaaccggacgccgctcgatgccttcgacgtcgtcggattctccctcctgtatgaactgaactattccaatgtcctgacgatgctcgacctcggccggatcccgcttttggcggccgaccggccggacgatgccccgctggtcgtcggcggcgggccggccgtcttcaatccggagccggcggccgcgtttttcgacgcctttctcgccggcgacggggaggaagcgtttccggaaatcatcgatttgtggatccgcctgaaagcccggggcgagcggcgggccgggatcctccgggccctggccgggattcgaggcgtttacgttccgtccttgtacgagacccggccggccggaactccgccgctcctcgtcgtccgcccggcgtccggagacgcgccgtttccggttgagaaacgcgtcctcccatcgtttgaccgggcgccctttccctccgggatcgtcgttccaaacgtccaatcggtcttcgaccggatcgccgtcgaggtcgcccgcggatgtccccagaaatgccgcttctgccaggcgacctcgctgtacgccccctaccggctgagggaagcggagtcggtggtcgaaacggccctggacggtgtcgtccgaaccggctacgaggacgcctcgctgttcgccctctcggtgagcgattatccctatctttccgagaccgtccgggcgctcatgtccgaattggagccgcggcgggcctcgctttcgctctcggccctccggccgcggggcctttcggccggcatcgccggcgaaatcacgaaggtccggaaaacgggcttcaccctggtggccgaggccgggacggaccgcctgcgccgggtcatcaacaaggacgtcagcgatcaggatcttatggaagccgcggccaacgcgttccgccgaggctggcggctcctgaaaatctacgtgatgatcggcctgccgacggaaacgcgggaggacgtggaggcgatcgccgggttggccggccggctgacccttttaggccgggagttgacgggcggatcgccgcagatcaacttgagcgtatcctcgttcattcccaagccccatacgccgttccagtgggcggccatggacggcccggaaacgctccaggagaagcagcggctcctgaaagacctcctcttcaagcggagaaatgtcaaggtcaagacgcacccggtggagaattcgctgctggaggccgtgttttcccgcggagaccggcggctcggcggcgttcttctgcgggcctggcgggccggggcgcggttcgacagctggggcgaccggttccggttcgacgtgtggcggcgggcgttcgaggaggagggagtcgatccggcggcgtatgtttcctccctggatcccgaggccgcccttccctgggaccacatggcttccggcgtggccaaagaattcttccggcgggaattcttgaaggccctggccgccgagcccactccctcctgcctggacgcgtcctgcggcgcctgccgcggctgcgccttcatcggggcgatcggcaaaaagccgccggctccgccgcgattcacccctccggcggccccgccgcctgagcgggcggacggggggggagaggaggtcgtccggtacgaggccgtctatattaaggaaggcaggctccggttcatcggacacaacgacctggtcaatgtcatccagagaacgttccggcgggccgggattccggcggcctattcggagggatttcatcccatgatgcggatggccttcccgcctccgctggccctggggatggaaggccgggacgagcgcctcgaattcaaaacgcgggcggtcctggccccggccgtctgcgcggacgccttgaattcctcggctcccgacgggcttcggtttcgagggctccggccgctggagcgggacgcgccgcccctttcccggcgccttcgcgggctggtttacagcgtggacttgggacatctggccgtcggggacgttttggccggcccgggaccggacggcgggacgtccgaattcgtccggcggaaaatcgaggccgccgggcttccggccggcggcccggagatccgcctggatccggaccgcaaccgcctggtcatgacgtttcgttttgatccggccaaagccccccgcccgcaggatgtcctgtcggccgtcttcgggctgacgaatccggcttccgtcctcgtccgcgacgcggttcttgtcgactgagccggccccgccccgtccggcaaattgacagtcccggacgaatccggtataaaaggaagcgatttttcacgccagaaaaagatcacggcagacgccccaaaggagatgttcatgatggatttcactttatccgaggagcagcaagccctccaagaaatggcccgggagttcgcccaaaaagagctgcgtccggtggccgccaaatacgaccaaagccatgagtttgcctatgatgtcatggaaaaagcgttccaggccggtttcctgacgggaaacatccccgaagcctacggcggaggcggcctttcgaatctcgacctggccgtcgtttccgaggagctggccgccggctgcgccggccttttcaccagcatgatggcctgttccctggccaccgcccccctcattctcttcgggaccgaggagcaaaagaggaaattcctggagccgctgtgcaggaaaatgagcttggccgcgttctgcctgaccgagcgcgaggccggttcggacgccggttccgtccagacccgggccgtccgggacggcgacgtttacgttctcaacggcgcgaaatgcttcatcacaaacggcggcgtggcgagcctgtataccgttttcgccaacaccgccccggccaagggcgcccggggcgtcaccgccttcctcgttccccgcgacacgccggggatcacggtcggcaaagtcgaggacaagatgggccagcgggcctccaacacggccgagattttcttcgaggacgtccgcgtcccggcggccaacatcctcggccgcgagcgccatgggttcatcatcgccatgaaaaccttcgaccagacccgggcctcggtcggggcggcctccgtcggcgtggcccgggcggcgatggaagccgccgttgcctacgccaaaacccgccggcagttcggaaagcccatcgccctctaccaggccatccagttcaagatcgcccaaatggccatcgaaatccaggccgcccgccatctggtctatcacgccgcctggctggccgaccggggcctccccaacggctctgaatcggcgatggccaagactttcgcctcggacacggcgttcgccgcggccaacgaggcgatccagatccacggcggatacggctacatgagggattacccggtcgagaagtatctccgggacgccaagctctttcagatctacgagggaacgaacgaaattcagcggatggtcatcgcccacgaggtgatcgggccggtcaaggaataaggcccggccggcgggccgccgcccgcccggttaaaaatccggggataaagaaaaaggacgctcgcgggagcgtcctttttcttttcagccgtccatcgcggacggcgcaaagagagggattattcgtcgatcatctcgggcacgaggccgagcgtgtcgactccggcgcccttgcagacgtcgatcaggtcgacgaccttgctgaacggcagcttgacgtcggcccgcaggaagatcgtcttgtcggaacgggtggaatacaggcggcggagctcgtcaccggcattctgaagaccgggataattttcattgttgatgttgaccgtcagatccttgttcagggtgcagacgatcaggccggccggctggccgcccgagccttcgctggccacttcgggcaagcggacgtcgatgcccttttgaaccatgggagtgatgaccatgaagatgatcaggagcaccaggagaacgtcgcacagggggacgacattcggttcagctttcgccatatcgattcctcctcgaaaagaccaatctcaaggcgctcattttaatccaaacgccggggggaagtcaacggatttgaaaaattcctcccggagtcctatagtaaccgcctttggaggccgtcatgaacgttttggccgtcctgatcgccgccgccgccgcctttgttctggccggccgcttctattcccgcttcatcgcccgccgcctgggcgaggatccctcccggccgaccccggccgtcgctttgcgggacgaccgcgacttcgtcccgacgaaagtccccgtcgttttcgcccatcatttttccgcgatcgccggtgccggcccgatcctcggcccgaccatggccgttctttacggtttcgttccggcttggctgtgggttctcctgggcgggattttcatcggggcggtccacgatttcacgaccttgttcgtcagtcttcgggaggacggccggtcggtggccgaaatcgcccgccgaacgctcggcgagcggggctttcacctgttcatcgccttcactttgatcatgatcgtcctcgtgacgtcgtcgtttctgagcgcgacctcgatctccctgacctcgctctggcccctggaaaagatcggcgtccgggaaggggagaccttcctgagaaccgtcgtcgtggacggcgtgccgatgggccggatcgggggcatcgcctcgatgtcggttatcgtcatcaccctgtgctcgccgcttctgggattcctgattcaccggaagggcgtgaagatgaccgtcgcttatccgatggccgcggcaatcggcgtgacgtccgtcttcttgggcatcgcttttcccgtaaccgtctccgcctccgcctggatgatcatcatctcggtttacgtcctgttcgccgcgggcctgccggtctggctgatcctccagccgcgcgatttcatcaatgtccagatcctttacgccggcatcgccttgatggccgtctccctggtccggacgggcttggccggcgtccgggtgacgatgcccggcttcaatctggccgagggcgtccgggccttgggatcgatctggccgatgatgttctgcatgatcgcctgcggggcgatttcaggatttcacgccctggtcgccggcgggacgacgagcaagcagctttcgagggaatcgcacgcccggatcgtcgggtacaacggcatgctcctggaatcgctcctggccgtctgcgttcttctggcgatcggggcgttcttgagcttcggcgattatcgctcgatcgtttggccgacggagccggggatcaaatccaatcccattctcggattctccctggccgcgggacatctcttcaaccggggcttggggattcccacggccttgggaaccgtcttcggaatcctgctggtcgagggattcgtcgtcacgacgcttgacgcggccgtccgcctgaaccgctatctattcgaggagctttgggaaatccttttccggaaggtgccgggctttctccggaaacattggatcaacgccgggatttccgtccttctcatgtggtgcctggcggcctcgaacaccttcaccctcctctggccggtctttggaacggccaaccagcttctggcggccatgagcctgctggccgtctcggcttggctgatgctgaggaggaggagggcgtggtttacggaaatcccggccgtcttcatgctggccacgacgatcgcctccctggcgatcctgttccgtcagtatctgcggacgaagaattatgtcctggccgcggccgacgcggccttgttcgtcctggcggccggagtggtggtcttgacggtccggttgttgcgaaaagaaaggcggcggacggcggcggaaaaggcctgatccagagccgacccgggctcagcgcagcgtttcgtaggcctttttattggcgttggtttggaggacgagcagaatcgcgtccttccccgcggccgtggcgtaggccgtgtgaatgtcgatcacggcgttgcccaggagggcgccgacctcggccccggccccgatccggtcgctgatgacgaccgtcagaaccgattgggctttcaccttgtagcccagagtccgcaaggcggcctcggctttcttattgtccgaggtcagcagccggaaccgccctccctcgggatgggacgtcacgcacatcgcccgaagattgacgccggcgttggccagcgtcccaagaacccggcccagaattcccggctcgttcggggtgatgacttcgagctccgactccactttgacgtccttcacatcgtcctcctcgagggggtcatcataaaccagaacgaggcgcgaaggcaagaaatccccgttttttcaggtgaagcatgaaaaaatactctcttgacattaggccgtcccggtgttaagaattaaatacgttccatgtacgcaaaaaaaatccctttgatcgtccttggaaggagggctttatcgtgaaatccaagaagctgacggtctttttgattgttctcctcgctttcggcctggtcacgtcttacgccgaaaccaagaaatggcggcgaaccggctccaatacctttgtccggatcaagggcaaggtcccgacggccgaggtcatgaaaacgctggccgataaatacgccggcgacatcaagatcggcatggatcaggttggacagggcgatctttacgagcccgtcctccaagccttgaaggacgggattttcactgaagcctcccttccggccggggaaaaattcgcctggatgttcttccgcttgggcggaaaggttaaggtttggaccgatgttgaatgggccgggaaaaaacctctcgacgtcttcctttttgacgtgaaaaccccgaccaagctgtacacgtacgccatgccccgtccctgcggcaacctggccttgtacaaagcggtcgacgtgattccgccggctccgccggcgacctgcctgctcgtggtcaacccgatgaaggcgaatctcaacgagcccgtcgtcatcgacatgtgcgggacccagaacgcggcctcgatgacggtcgagatcttcgacgcccagggcgtcaagatcgccgaccggaacctgaccccggccgactgcaagtggcagacctccttcgacaaggccggctcgtatgtcttcaaaggcgcggccgtcaacgccgacggcgtcgcctcgtcgaatccctgcgaagtcacggcctatatcaacgccccgccgacctgcaagctctggacgtcctgcctcccctgcgaggattatgtcggcaagccgatcaccttcgacgccaacggctcgaccgatcccgacggccagctggtgaaggcggtcttcgagatcaccgatgaaacgggcaacgtcatcgactcttacacggccaacgccaagccgttcacctggcagaaggtcttcaccaaggccggcaaatacggcgtcaacgtctccgtgttcgacgacatgggcgccgcctcctccacggccgatccctgccaccttaccttcgacgtcacccagaagagattcttctgggtggccgaaatcggcggcctcctagcccgcggaacctacacgggattcttcttcggccgcgtcggcatgctctggggcgtggttcccgatctgatggacatcgtcctgaccatgggcccggccatcccctcccagggcgatccttggaaagtcttcttcatgggcaacgtcacggccaacctgcatctcggcccgtccgtttacgtgggcgcgggattgggatacacgacgaaggagcaggaaacgcggaagagcggcatcgacctggtcggccagttcggcgtcaacatcttcaaccattacacatcggccggctcgatcttcgccgaggcccggattcccgtcctgacctccgatcgcccggtcgacgatcactacaagcttctgctcggtttccgctacatcttctgagccgcgcgggtgagatttcccagccgccccgcctgaacggcggggcggcttttttttcatcatgaaaatcgcgctgatcggggcggacggacagttgggcaccgacctgaggacggccttgaaaggccacgaggtcgttcccttgttttggccggagttcgacgtcacccgggcggaggaaacggccgggaagctttccctcatcggtcccgacgccatcgtcaacaccgccgccttccaccgggtggatgaatgcgaggaccggcccgaggcggccttcgccgtcaacgcgatcgccgtccgggacttggcccggacagcccgggagctggacgccgttctcgtccatttcagcacggattatgtctttgacggggagaagaggacgccgtacgtcgaacaggaccctcccgggccgctcagcgtgtacgcggcgtcgaagctggccggagagcatttcgtccgggcgtacgcggggcgggccttcgtcatccggacctgcgggctttacgggaaggccggctgccgggaaaagggacggcatttcgtggccgcgatgctccaggcggccgagtccggacggaaggaaatccgggtcgtcgacgaccaggtcgtcactccgacgacgacggccgagctggccgcgcggatcgccgagctcctccggaccgacgcctacggcctttatcacatgaccgccgagggatcgtgttcctgggcggatttcgcccgggcggttttcgagctgtccggccgggatccgtcgatcatcgtttccgtggattcggcggccctgggggccaaggcccgccggccggcgtattccgttcttgaaaacgcccggatgaaagaaaccgggctgactcctttttccttctggcgggacgccctggccgcctatctcaaggacgcttcccccccctcgccggcccggtagggtctttctccgggagtcgaccgcggccgaaatcccgtccatcccggcttttcagcgacgcttgtttcggcggtcttagaacgatcgccgtcggcgggaaggatcgagagacggggggacggaatcatccccgggacaggggaccgaggggacggacggatcggcttattcggagagcttgccgagcttcgacagctcttcgttatagtacttgcggtagaggatctcccactcccggctgccttcctcgatcggctttttctgggattggatcttgtcggtcgctttcttgtcgagctggtcgtagaggcgcatctcctcctcgatcgcccggacgatcgacaagcgcacctcgttcggctcgtcaaggtactcgaccgtgtcgtttttcgagagaacttccagaatcctggtgctcagataattgattttttcccgggacaggcggctgctcataggacgatgttccgttcccgggccagcttggttttaatcatccggaacatggtttgatattccaagttctcccggcggattttttccatgtgttttgtgagaatttcccggacttccacgtcgaggcggtcctctttctggaattcctcggtgatttgaacggtgatctcctcgaggacacgttccttgttttcggccagaattttgccttctttcagcaaattgcgcaggatcatcccggcaagatgatcgatctggttcttgttaagtctcatttccagaatacgatacaacaaaagtccggcttaaatcaagacgaggaaaggcgccgcctcgttttccttgatccgggccagggcgatcaggcggttttccgggtcgaaaaggcggaggacggccccgggggccggagccggctcgggcgggacggcgacggccgatccgaaaaggccgatcgcccgtccgttcctgaccaaggcccgccccgcggccgtcaccgaaaccgccggaaggtcctccagaaggccttccggcggaatcaaaaacgcctcaaaacgtccggcggcggcggccgcctcgatttcctccggggttttggcttcatccagcctgtatttgcccatggccgtccggacgaggcggtggagatgggcgccgcagcccaggtccgcgcccaggtcgtgggccagggaacggacataggttccggccgagcaggaaacctcgaaatcgatgtcaggcggggcgtacgaccgaagctcaaaccggtcgacgcggacggccgccgggcggcgctcgacctcggtgccgccgcgggcgtagacgtacaggggcttgccggccagcttcttggccgaaaacggcggagccaactgaatgagatcgccccgaaagcgggccatggcccggaggacgtcctcctccgcgggcagggaatcgaccgccgggcccagggccgttccggtccggtcgtaggtatcggttgcttggccgagacggattacgccttcgtaggttttgccgatcgttccgaaaaacgggaacaggcgggtcgcctttccgatcccggctaaaagaagtccctcggcgaatggatcgagcgtgccgaaatggccgattcttttctccccgagaattttccggagacgaacgacgcaatcgtgggacgtggggccggagggtttgcggaggaggaggagcccgtccatgccggcggtcagcgggagcccgaggaggcgggggcgtccaggagattttcgaccgaggccatcacctcggccgaaatgatcggaaacgggccgtacaccgtgaagccggcggcgtgggcgtggccgccgcccccgaagtgttcggcgatcccggccgcgtgggcctcgcccttggaccggatgctgacccggaagacgtcgggctccatttccttgaaaaagaggacgacccggacgcccatgatcgatcgggccagggtggtgatgtcttccgtgtcgacctgccggaggttgagctcgatcaaatccttccggaacatcccgatctgggcgatcgttccggcggcgttgagccggagagtcgagagaacccggcccaggaggatgattttttccggccggttgttatggaagagggcttcgctcgtttcgatcgggcgggctccggccaggaccaacttgtggcaggcggcgaaggcccgggcggtggtgttggaaaactggaacgaccccgtgtcggaaacgatggcgcaataaaggtggttggcgatcgacggcgtcagggcgaggccggcggtttcgcataagtcgagaacgagctcggcgacggccggcgcctcggcgtcgacccagttgatgtcggcgtaatggctgttggaatagtggtggtcgatgttgattttgaaatagccgtccaagccggtctgcccggagcgggagacgtcggcgcattccagaagaacgaccgcgtcgtagcccgtcgaggccaattggccgacccggatgcggcggaaatcggaaaacgtgttgaaggggacggggatcgggtcggtgatgacataatcggcggtcttgcccatcccctcgaacgcctcgaccagggccaggccggagcagagggaatcgccgtcgggccggagatgggacgtcacggccaggcgccggcagtcgcggatcttccggacgatctcgtcaacgggttttatcgtcatgggcattctcggccacaatccgtgaaatccgctcgaccgtatcggccgaggcgtcgatcacgaaaacaagctgcggattatacttgaattcggcggccgcggcaagacgatgacggatggcccccgtccggcgctcgaggtgtccgcggacctcctccggatcggccgggccgaagacgctcagaaggacgcgggccgtccgaaggtcggccgggacttcaacccgggtcaccgagaccagggaggaagaatacggcctcaattccgccggaagaaccgtgctcaaggcctccctaagaaggctggccatcctcttctgccggcgggattccgtccgcatcttagaaatacctcgtttccgcgctcaggatctcgccctggacgtggctctcgatgtcctttcggacggactcgaggacctgctcgacgacgaggtgatcatggttgagggtgacgacgcccacggccgtccgctgccatttttcgtgaaaatcgatctcggccacggccgcgttgaaacggctcttgatccgggccttgaggccggaaagctcccggcgcttgtctttcaaggaccggctgtgcggaaaatggatttccaccagcagaaggccgacgaccatgacccgcgcccccttcagacggcgctgactttttcgatctggaaggcctcgatgagatcgccttcctggacgtctttgaagttggccaggccgagtccgcattcgtacccggccttgatctcgttgacgttctccttgacgtgcttgagggaggagagccggcccttgtggacggcgatcccggcccggatgacgcggatttcagcgctgcgggcgatcttgccctccaggacatagcagccggcgatcgtgccgaccttggggatccggaagatcttccggacctgggcccggcccaggaacgtttccttgatcaccggctcgagaagcccggtcagggccttcttgatgtcgtcggtgagctggtagatgatcttgtaggtccggatctcgacgttctccttgccggccgtctccaggatcttcggggacggcttgatgttgtatccgatgatgatggcctgggtcgtctgggctaggacaatgtccgattcgttgatcgagccggtggccgcttggatgatgcggatcttgaccttatcggttccgagggaagggagcagcccggtcaggacctcgatcgagccctggacgtcggcccggatgatcaagggaagctccttggccgcgccggtttcaaccttgcggaaaaggtcgtcgagcgaggcgacggcctcttgtctttgcggttcggccttggcggccgcttcctttctttgtccggcgatgcgccgggccgtctccaggtccggcaggacctggaggaaatcgccggcccgggggacatcggagtatcccaggatctccacgggcgaggacggtccggccgcgggcatcgtccgcccgaggtcgtcggtcatggctcggaccttgccgaacgtcgttccggaaagaaaggtgtccccgggccggagcgtcccgttctggatgataaccgtggccatcgggcctttccggggatcgagccgggcttcgaggacgacgccctgggccggggcggagggattggctttcaagtcgagaacgtcggccatcaggaggatcatatcgagaagctccggaatgtttttccgttccttggccgagatctcgacgctgatgacatcgccgccccattcctccacgagcaatccgtctttttgcagctcccgcttgatccggtccggattggcttcgggcttgtcgatcttgttgatggccacgagcagggggacgccggcggccttggcgtgattgatcgcctcccgggtctggggcatgagcccttcctcggcggccacgaccaggatgacgatatccgtcaccttggctccccgggcccgcagctgggtgaacgcctcatgacccggcgtgtcgatgaacgtgatcgcctttttattgacggtcacctgataggcgccgatgtgctgggtgattccgcccgattcccggtcgaccaggttggatttgcggatcgcgtccagcagcgtggtcttgccatggtcgacgtgtcccatgatcgtgacgacgggcggacgatgggccaacagctccggacgggccgccgcttccaggcggcaggattcctccaccgggacgatgtcgagaacgatgttgagatccttggccagggaagcggccagggaggggctgatgatatcggtgatcgccaggttgtaccccttgacggcgagcttgtcggccagatcccggggccggattttgaaccggtcggccaggtccttgatcgtggctccctcccgcaggcgggcttggggccggggccggggggcggccggcttgggggcgggagacggggcggaaacgggggccttcgccggaggcgcgggggcggccgccttgggcccgggagatggagcggaaacgggagccttcgccggagtcgcggaggcggccggcttgggcgcgggagacggagcggaaacgggggctttcgccggagccgcgggggcggccggcttggccgcggcggcgcttttcttcggggccgttccggccgccgggggcttggaagcggacggaggaggagcgggcgccgccggcttgaccgcgggaggagggggggaggcgggaggcgtcgcggcggccttggttttcggtttcgttgttttcttttcgctcacgggggattcctttgaaaaaattaacccagctccttgatggcgatcttccaaccggtcagcttggaggcgagcttgacgttgatgcctttcttcccgatggccagggaaagctggtcccgggagacgagcgcttccagcgatttatcggccgtcgagaccgggatgacgcgctcgatccgggccgggttcagggcggacttggcgtaggctcccggattgggcgaccagaggacgatgtcgattttttcgccgtcgagttccttgctgatcgccaggatccggcttcccttggggccgatgcaggcgccgatcggatcgacatcgcgctcccggctgatcacggcgactttcgaccgctcgccgggctggcggacgatgtccttgatctcgatgatgccggacgagatttcggggatttccgtttgaaggaggcgcccgaggaactcgttgctggaacgggagacgatgatctgcgtctcctggcctttctgtccccgccgcacctggacgatgaccgcccggatctgggcgcctcggtcgtaggtctcgccggggatcatttcccagggggggaggacgacgtccaggttattgacgtccaggatcagggcgccgttttcgatccgccggtaagtcccggtgacgatttccccgatccgatcggcgtaggcgtcgtatattttttccgattccgcgtcgcggactttctggaccaggacctgcttggccgcttgggccgcgatccggccgagggtgtcggacggaaggtcgatttcgatcgtctcgcccacggccgcgtcggctttcaaccgctgggcctcgggcaggctgatctcccggccggcgtcggccggcgcctcgacgacggttttcaggcaatagacccgcagatcgcctttttcgggcttgaaggtgatttgaacgtcctcattccgcgtgtaaatccggccggccgcgacccgaagggattcctcgatcgccgcgacgatgactttcggctccacaccgcgctccttgctgagctgcagaatggtattccagacgttgattttcaagacatcctcttcattttgggggatccggtcggaatgaaacattatatcggaaagagacggggagttcaaattcgccggtttttgcgatccgtccggcggcggaggggattttgacatgacgggcgggtttttatatattaagcgccacctccggggagggttcgccgaaaccggagcccgattttaattatttgagggagaagacgatggccgcacacctgttctggctcgcgcctctcggatcgatcctggcgttgtttttcgcttggtttttctatcaccaaatgaagaaagcccccgagggaagcgagcgcatggctcaaatcgccctgtacgtccgccagggggccatggcctacctgaagcaacagtacaaggtcgtgacgattgtgtttgtttttctggtcatcttcctggcgatcctggccttcctcttcaaggttcagaatccttgggttccggtggcgttcctgaccggcggattcttctccggcctggccgggttcttcgggatgaaaacggccacctctgcggccgcccggaccacccaggcggcccgccggtccctcgacagcggtttgcggatcgccttccgcagcggggcggtcatgggtctcgtggtcgtcgggctggcccttctcgacatctccctctggtttcttatcctgaaagccatctatcccgtcaacgacggcgggcacaacctgatcctgatcaccacgaccatgatcacgttcgggatgggcgcctccacccaggcgctcttcgcccgcgtcggcggcggcatctacaccaaggccgccgacgtcggggccgacctcgtcggtaaagtcgaggccgacatccccgaggacgatccgcggaacccggcggtcatcgccgacaatgtcggcgacaacgtcggcgacgtggccggcatgggcgcggacctttatgaatcctacgccggctccatcctggccacggccgccctgggcgcctcggccttcctggggactcccgacctgcagctcaaggcggtcatcgcccccatgatcgtggccgccgtcgggacgctcctttcgatcctgggcattttcctcgtccggacgaaggaaggcgcttcccagaaacagctcctgggggccctcggccgcggcgtcaacggcagctcgatcggcatcgtcatcgtctcgttcgcggtcatcaagctgctcggccttcccctgggcgtctggctggccatgatcgtcggcctggcctcggggatcgtcatcggccgggctaccgaatatttcacctcggcctcctacaagccgacccggacggtcgccgagaacgccaagaccggtccggccacggtcatcatcgccggcttgggcgtcgggatgctgtctacgacgatcccggtcctggccgtcgtcgtcgggacgatcctggcgttcctcttcgcctcgaatttcgacctgaacaacgtcagtcacggcctgtacggcatcggcatggccgccgtcgggatgctgtcgaccctgggcatcaccctggcgacggacgcgtacggcccgatcgccgacaacgccggcggcaatgcccagatgagcggcttggaggaggaggttcggaagcggaccgacgccctcgactcgctgggcaacaccaccgcggccacgggcaagggattcgccatcggctcggccgccctgacggccctggccctcctggcctcctatgtcgaggagctgaaggtcggattgatccggatcgggcggacgatcatcgaattcgccgacggaacgacgatcgatacggcccgggccggattcatggatttcatgcggtattacaacgtcaacctaatgaatccgatcgtcctgatcggaatcttcctcggggcgatgatggccttcatgttctgcggcctgaccatgacggccgtcggccgggccgcctcccgaatggtcgacgaggtccggcggcagttccgggagattgccgggatcatgaccggccaggccgagcccgactacgcccgatgcgtgtccatctcgaccaagggcgcccagcgggcgatgcttttaccctcgctgctggccatcgccctgccggtcgtgaccggccttcttctgggcgtccccggagtgatgggcctcttgatcggcgggacttccaccggcttcgtcctggccgtcttcatggccaattccggcggagcttgggacaatgccaaaaaattcatcgaggaaggccattacggcggcaagggctcgacggctcacaaggcggcggtcatcggcgacacggtcggcgatcccttcaaggacacgtccggccccagcctgaacatcctcatcaagctcatgagcatggtcgcgatcgtcatggccggcgtgacggttgtggttcaccttctgtgatcggagttttttaagacgattcgacgcccgctccggagacggggcgggcgtttttttaaccgcgctccgctatccggcgacggcgatcccgcgcaggctgtaagggcccgcgtccgtgatttcgacctcgacgaaccggccgacgacgttggcgttcgaccggaaattgacgacctggtttccctcgttccggccggcgaacacggccgggtcctttttgctccggccggtgcagagaacacgttcccgccccccgatcagcgttttatgaaaggccagctggatgtctttctgaagggcttgaacctccatcagccgccgtttcttgatttcagccgggacgtcgtccgtcaagcgggccgcggccgtccgcggccgcggcgaatagcagaaggagaaaatgccggcgaagcggatttcggccagggccgagagggtttccttgaattcggcttcggtttcgcccggatagccgacgatgatgtccgcgctgaggcggatggagggcatgagagcccgaagggcggccgcggtttccaggtagtctttccgggtgtatccccgcttcatccgctcgaggaccgaggccgagccggattgaagcggcaggtggagctgccggcagatcttcggcgtggcggccatcgtccgggccaaggcgggcgggaagcttttcgggtgcgaggtgaggaagcggatccattccggcccggggacggcggccgcccgcccgaggagggcggcgaaatccgtccccgactccgggtcgcggtaatggttgacgttctggccgagcagctggatttcccggtacccgcgggcggccagctcccggacttcttccaaaaccgcctccaccggccggtacttttcccgcccccgggtgaagggcacgacgcagtaggcgcaaaaattgtcgcagccctccatgatcgtgacatacccgctgacggcgctttcccggagaggggccgttttcttctcccgccagccgcgcgtccgggagacggcgacgacccggcggcgggcgctttccgcggccacttcggcgatccggtcatactggtcgaatccgaggacgaaatcgacgccggatttcgggccggccaggctctccttccggagttgggcgacgcaaccggcgacgccgacgagaagcgggcgtttctttttcagcgtccggaggcgtcccaaaaaggactgcagcttttcctccgacttggcccggaccgagcaggtgttgacgacgacgagatcggcttcggcgaccgaggcggccggggaagccccggcggcccgaagaaacccggccagccgctcggagtcgttctcgttcatctggcagccgaaggtgtggacggcgaaccgcagtccgccgagaggggggccgggggcggtcatcggaggaggtcttcgaggatcgcggccgcgtcccggacaaacgtcgcgcagcgcgtttgaaagagatttccgtcccgagctttcttttggcccgcggccgtggccaagtcgcagccgatgagggggggacacgagagatcgtcgccgtggcgggcccggaaccgccgggcgaattcggtcatgacggcgtaggttttttccttggccgccgagtcctcgacccggacgcgtccgtgcctgaggccgatggccaggaacgcgccggtgacggctccgcacgtgaagccgaggtgggccatccctccgcccagcgcctggctgagcttgagggcggtttccgtatcgagcccggcgtcttcggcgaagggggtgaaaacggcttgggaacagctgaagccggcctggaacaaccggccggcggcgtctggtttggacatgattgatttctccgcgctattgtacctaaggccggcggtttgaggaaatccgttccccgaagcgcttccgcgaggagtcagggcccggcgtttcgctccagcatgtcccgcgctccggccagagaggccggcgtctggaggcttccggacatgagacgggcgatttcctcgatccgctgatccgggccgagcttccggatcgtggtgaaggtccggtctttctcggtcttcttggtgatcgtgtaatggtgggcggcgaacgaggcgatctggggaagatgagtgatgcacaagacctggtggcgggcggcgagcgccttaagccgctgggcgacgaattcggccgtcttgccgccgatcccggcgtcgatttcatcgaagatcagggtggaggccgcgtctttttcccgggcggccgacttgagggcgagcatgatccgcgacagctctcccccggaagcgattttccgcagcggcttgggcggctcccccggattgggggagatgaggaactcgacgtcgtccaagccggcttcccggaccgagtcgggctggtccggggaaaaaggccggccgtcaaggcggacttcgaagcgggcgttcttcatcccgagcagggcgatctctttttcgatcagggaagacagctcgccggcggccgtccggcgggtcttggacagcttttgggccgaggcggcataaacggccgcggccgcggcgatgtccgcgtcgacccggagcaggcggtccttgatttgaaggaaatcctcgcgttcggctttcaggcggtcgaggtagccctggatttcgccgatttccgccccgtattttctcttgaactgttcgatcaagctcagccgttcctcgatctcctccagccgctcgggggattcctccccccggtcgcggaaacggaggagcaggtcggaaagctcccggacggtgatcccgaacgaggagagggaatccttcatctcccggaaatccggatggaaggggctcagctcctggagcaggtgttcgagcttgacgagcgcggcggacagcgaagcctccccgccgtaggccaagtcgtaggaggcgtcgagaaggccgcggattttttccgcgttccggaggagaaggcgcttttcccgcagctcctcttcctcgccggggcggagcccggctttttcgatctcggcgatctggaactccaggaaatcgagccgctggccgcgctcccgctcccgggcggtccattcctctttctgccgggccaggccgcgcagctcccgggcggcccgggcggtttcctcgcgcagggggatcgtcccggcgaactgatccaggtaggcgagatggctttcgatctgaagcaggaagatatgatcgttctggccgtacacgtcgatgaggccggccgtcgtttccttgagccttttcaagggaaccaggattccgtcctggtaggccttgcctccgccggcggcgagaagccgctggaggatgaggtcgccttcgccctcctcgccggccggccggtcgaagatcgcctcgacggaggcttcggcggctccggcccggacaagatccgccgatcctttttcaccgcagacgaggcggatcccgtcgatgatgatcgattttcccgcccccgtctcgccggtcaggacggaaaatccgttctcccaatcaatccggatatcctcgatcgtggccaggttgcggaggcggaggtacttgatcattcggcggaggactcagggacggccggcttcgagcttcagggggaccagggccttggccatgttgatccggccgcatccgatggagtcgtcgatccccggaagcgtcgccgcgttgacgtcgtcggcgctgagacggatgatttcccggatctgggcggccgtcagccagggtttcaggcttttcaggatggccgcgagcccggagacatggggggcggccatcgacgtcccgtcgaaccggctgtacggcaaaggaccggaaccgagaaaccacgtcggcacggccgtcaggatcgacacgcccggggcggccacgtccacctcgggtccggcgttggagccttcccagacgtcgtcgttgtaatccgtcgcggccacggccaggacgtaatcattgtaggccgccggatactggacggggccgccgttgttgccggccgcggcgacgaggacgcagccctggtcggaggcataggcgaccgcgtcgaacagcacctggctgacgtcgttgaatccgaggctgaggttgatcacctgggcgccctggccggccgcccagacgatcccgtcggcgacttgggagaccgttcccgttccctggtcgttcaacactttcaccggcaggatcatggcgttccagccgaccccggcgatgccctcgccgttgtcggtggaggcggcggcgatgccggcgaccgccgtgccgtggtacaggtcgtcggacgcgtcgtaatcgtcgttgacgaaatcacggcccgggccgacgatttttccgaccagatcgggatgggtcagctcgacgccggaatcgacgatcgcgatcgtgaccgcggcgtcgccccgggattcctcccagccctgggtggccttgatgtcggccccggtctttccctgggggctccccggaacgtcgccgatcgattggccgatgttggacagggcgtattgatacttgaacaggttgtcgttcggcgtgaccgacgcccgtccgatgtaattcggctcggcgtacaggacgcggggatcggcggccaaggcggccgctttctcctcgacggcggttccttccggaagaaggacccggtacacgtccagggcggcgatccggccgatcggccggactctttgaacggccatggcggcggcccggtgagccggggggatttcgggcctgaacttgatcaacacttctccgggcgcgtacgtcccgttcgggtcgaatccggacgccggtccggcggatcccttgggacggacatccccgacgagcccggcgctcatcggaagcacccaggcgatcaagacgcccgcggcgagcaatcggagaatggccggccgttgggtcatgatgatcctcccccttaaaacaggaattccatcctcgccgcggcccccgggctgagattccagccgccctcgagcttcttaccggggatcaggaagccttcggccttcaaacggaaggacgccgaaggttcgatgatcatccccagggacgcgccgacggatccgcggccgttgattttctttttttccgaaccgctgagcgagccgatcgtctcttccatggtgaacgacgaccagaggccgtcatagaaaacggaggcggtgggcgtaaaggtctcgaatccccggtaagcgagggtggggccgaggcggacggccgtgcccgaggcccggccggagagccgggccggctgctgaagggcctccgacgtccattcgcctttgagaccgagggaaaagagagcctggacggcggcgccgatttcccagtctcccggccggaacaggggaacctccatctccgccccgaggacgatcgcgccgcgcgatccggcctcgtagtcgacggaaaagggcaggtgccggaagatcaggccgttccagttttccgcgccgccgccggccaggagggagaacgacgccccgccggacagctccagcccgaaacggatcctcccccggatcgatttcagaaaagaggagccggcgtccttgtcccaaacgaccatccgggagccggcctcggcttcgatccccgcatggatgcggtagaacggcgccggttcctgggccgcggcggccgccggaccggcgagaacggccgcccccaggatcaagacggcgatcgatcgggcgcgcaagggcatggtccgctccttattgtttttggggggccggagttttttccgcggctttctttcttccggcgtcctcgatttccttcagctttttttgggccttggaggcgtatttgccgttgccgtaatcggtcacgaccttggtgaaatacggccgggcttcgtcgggttttccctgacggtattgggagtcgcccaggatgaagtagactttgtccatttccgggtaaaggggataattcatcacgacgtcggtcaggcggctgatggccggacggtaggacctcttccggtaataatgctccccgatgacgaaaatatgctcggccaggcggttctcgcattcctggatcttggcccgggccgactccgcctcctcggtcaggggaaacatggaaaccgttttcttgaattccgccagggcttcctcggttttcgtctggtcgcggccgggtttcagcattttgttgtaggaacaaaggccgatccgatactgggccaggggggccgaggggctggtcgggtagagaccgagaaagctgcggtactgggcggccgccaggatcaggcttccctcgtcctttttctgaaagtacgtgtcggcgatggccagcatcgcccgctgggcgtagaagctctgggggaacgattccatgacctgccggaacaggatcaaggccttgtcgggattttttttcatcagctgttcgccctgcttgaacaaggcttcgtcggaaccggcgatgtccggggagatcaccgcctgttgtttccggcacccgggcgtcagagcgagcgcggccgccagaaccaggacggcggcggctcccttgtgttttttcatgagaggcttccttgagtcgtcgcgggacggctccgcttgtcataaagatcgagaacgtaggcccattcgcgctcgaggccgtcgcggagcgccgtccgcggccggtagcccaggtcccgccgggccttggcgatcgccgcgaacgtgtggggcgcgtctcctttttgctgttccatccggcgcgttttgaccgggcgcccggtgatttcccggaacacggggaagaggtcggacagcttttcccggtgcccgccgccgatgttgtatatctctccggccgtcccgttccgctcggcggagacgagggccgcgacgatgtcgtccacgtaggtgaaatcccgggtctggctgccgtccccgaacacggggatttcccgcccttccaggatcgccttgaaaaacttgtgaaaggccatgtccggccgctggccggggccgtagacggtgaagaagcggagggcgaccaccggcaggccgaaattgcggtgatagagaacgccgagctgttcggccgaaagcttggtcacgccgtaaggcgaaatgggccgaagcgggctcgtttccttcatgggcaaatcgggcgtcaagccgtagaccgacgaggacgaggcgtagacgattttccgcggcggccgttccttggccgcctcgaggagccgctgggtggcggcgatgttgtgatggaggtaggaggcgaagctccgcccccagctcgcccggaccccggcctgggcggccaggtggtaaaccgcctcgaacgggcgcagcgtccggttgagaggcagatcgttgagatcggcctcgatgaaggtgaagcggcggtcggcctgcaggggacggagattccgccgcttgatccaccggggatagtaattcgtcaggcaatccaggccgcagacgtcgcagccttcgtccagcaggcgccggcagagacgggacccgatgaatccggcggctcccgtgaccaggactttcatcgccgctccttccgggcggcgatgtccctcatcgtccggatgaccccggccgggtcggggctgccgaagacggcgtttccggcgacgaacacctgggcgccgtcctcgcagaggcgctcgaagttctcgaggttgacgccgccgtcgatttcgacgagcgtccgaaggccccgttcctcgatccggcggcggaggaggcggatccgctcgtgggaagcctcgatgaacggctggctgccgcggcccgggttgacgctcatcaacaggacgaaatcggcgtcgggaagaatcgcctccagggcggtcaagggcgtggccgggttgagaacgacgccggccttgcggccggcccggcggatggccgaaacgtcgcggtggagatggggggcggcctcgacgtggatcgagatccagtcggccccggcctcggcgaagagggggatcatcgccgaggggttgtcgaccatgagatggacatccaacgggagggctgtgacttttttcagggcggcgacatgggccggcccgaacgtcagcatcggaacgaaatggccgtccatcacgtcgacgtgaatcaggtcggctccggccttctcgaccatatgggcggcgtcggccagccggctgaagtcggcggaaagaagcgaaggggcgatctggatcatgtcagcggctcacttcgaaatggatttggttgcgcttgaggatcagggacccggcgaccgggctctgctttaaaatcaccccggggccgatatccggataccaggcgtagctgacgtcgtatttcaggaagcccagggatcgcagctgccgcaggacggagtccgcgttccgggcgatgagatcgggcatgatgtagcgggggtcttcctggccgcggctgacgagaaagtccaccgccgaagcccggttgacgacagtcccggccggggggtcctggaagaggatgcggccggccgcggcctgcggggtatggatctgggaaacgcggccccggcgcaatccggccgctttgagcagttgggcggccatctcgacgctgcggccctctagccgggggacgacgatctgttcgttccccaggctcacgacgacgccgaccgtccggcgcggcttgacccgggatcccttggccggatcctgggtcaggatccgccctttttccaagcgcgtgtcgaaccgggaatcgacggtcgccaggctgattttcttgggagccaggagcgcccgggcctcctccacggtcttgcccgtgagttcgggcaaattgatcagctcaccccggtaaatgagctcggaaaagatgtcggccgaggcgaaaaaaagaaaaagatagagaaggacgaaaaggaggatgctgttcgccttcgtcgaggaggccattcactttctgtcccggagagtcgggaaaaaatgtatcataaagcattcaccggtgcaaaccgccgcgccgttgcgctataatgccctgaagaaagcgaggtccggaatgaatccctctgattttcgcagcgataccgtcacccggccgacccccgaaatgagaaaagcgatggccgaggcggaggttggcgatgacgtcatcggattcgatccgacggtccagaagctggaagccctggccgccgaaaccatgggcaaggaggccgggctgttctgcccctccgggacgatgggcaattcgatcgccgtcaaggcctggacccaagaactccaggaagtcatcgtcgaatcccggtcgcacattttcaacctcgaatccacccacctgacgttcatctcccgggtgacgccgcgtccgcttccctcgcggcggggggccatggatccggccgaggtcgaacatttcgtcaagaagccgaacgtccacacgccccagacgacgctcatctgtctggaaaacactcataacaattggggcggggcggtcgtccccctggaaaatttcaaggcgatccgggaggtcgcggtccgtcacggcctgcgggttcacctggacggcgcccggattttcaacgcctcgaccgcctcgggcgtcccggtccgcggctatgcggacgaagtcgactcggtgatgttctgcctgtccaaggggctttcggccccgatcggctccatgcttgtcgggccgaaggacttcatcgaatacggccggcggatccggaaggccttgggcggaggaatgcgccaggtcggcgtcatcgccgccgccggtctcctcgccctgacccggatgaccggccgcctggccgaggatcaccgccgggcccgccggctggcggaagccctctcggccatgcccggaatcgtcctcaacccggccgaagtggagacgaacatcatcattttcaagttcgagcatccggagcttacggtccccggcttgctttcggagctggaaaagagaggcatccgggctctcgccgcgccgggcggcgtcggcatccggatggtcacccacaaggacgtcgacgacgcggacgtggacgcggcgatcggcgcgttccgggacattctcggttgacgggcggtctcggaggacaattcatccgtgaggagtttatgaatatgacgaagcccaagtccgctcggccggcggccctgatcgccgccgtctgcatcctgttggccgcggccgccgcggccgaggcccgaatcgtgggtccggccgaggcccggacagcggccgcccgccttctggaattcgaaaacgcccggcccgatctccgcctgacgccgggcgtgttcgccctcggccgcgtcgagcccctgctccgccgcggccgtccggtcgcctacctggcccggctcgagccgcggggattcatgatcctgtcggacatcaccgagggatcgccccaggtgttcgtctcctacgagggagatccggaccggatggcccggattccctacttggcccgccttctcgaccgcctcgactatgccaaggtccagcttcgttatctcccggcgtccgggccggcggccgcaggccgcggggccgcggaatcaccggaccgggaagcggtgaatcggaacgagcggcgctgggaagccctgggacgcggcgaggttgccgccgcccgttccgccgacggatcaccgtcggcggaggtcaccccccttctcgcaaccaagtggaaccaggacacgcctttttggaactatacgccccgggtgggcggcgagccgaccccggcggggtgctcggccgtggccatggcccaggtcatgaattattggaaacaccccgcccagggccaggggagccattcctatacatggaacggccagaccctcagcgcggatttcaaccatccttaccattggagcttgatgcgcgacacctactacgccggcacttacacggccgcccaagccgacgccgtggcccggctctgttcggacgtgggcatctccatcgacatgcaatatgcggtcgacggttcgggatcttacatcaacgacaacgacgcactgacggcgttcttcaagtacagcccggacgcccatgaaaccgaccgggcggaagccggaagctgggaagcctggttcgaagtcatccggcgggaggtggagattcaccagccggtgatcatggccatctataaccgcgccgaggagtccggccacgccgtggtggccgacgggtaccggacctcgccgtccaaccagctccacatcaacatgggctggggaggattcgccgacaactattattccgtggaccacatttaccatttcggcgacgccgagtgggactacgccgtgatcggaatccatccgattcggatcaaactgacgctgaaggcgacggagggaggcacaaccgtcccgtcacccgggacgtacgtgtatccctacggcacgacccagatcgtccgggcgaccgcggtcccggagacgcattatgccttcaccggctggacgggcgacgtctcggggacgcagaatcccgtcgacatcgtggtcgacatggaaaagaccgccacggccaacttcctccggaatatttacgcccccctgagcgcctccgggcaaaagatcctcaaccgttccttttcccaggccgagtacatcaacctgatcaccttcgagcccaatccggacaacgtcgacatcaagtttcaccggctctacgaagtggaggggacgaagaagacggagatcgccctgctcgagaccgccgtcgagtttcaacaccgcggggtgcttaaggacaagacctacacgtaccatatcgtcgcggtgaacagcgcctcccgggaaggcgcgcccgccgtcctggtcgttcagtagatccatccgttttttcccgtgaccggcgcggcctgagcccgaaagaatgaatccgttccgatgtgagaggagaaacatgatgaaaccgagaagcgttgtctgcctgctgacgatggttttcaccctggcgtcggccgtccatccctgcacgatcatcgtggccgggaagaaggcgacggtcgatggatcggtgctcaattcccacaccgacacctgcaataattcccgcctcatggtggtgcccgggcggacgttcccgaaaggaacgctggcgcctcttcattgggggattcaggatgtcgcgcttcccctgggcgatttcggcgaggtgatcggccgcatcccccaggcggagcggacctattcctatatccactccggctacccccacatcaacgaacaccaattggccatcggcgaaagcaccaccagccagagggaggagctccgggtcgagcgcgagggggctaagcagatcatgacggtcgagcaagccatggccttggcccttcagcgctgcaagcgggcccgggaggccgtggccatgatcggggagtggatggagacctacggcttcctcccttcctgcgggcccgagtcggaggacctctgcatcgccgatcccgacgaggcttggatcatggagatgttcagcgtcggcccgggctgggaaccggggaaggggattcccggagtgatctgggccgcccagcgcgtgccggacgacgaggccgccatcgtccccaattggagcatcatcaaggagatcgaccttgacaagccggactggttcatggcttcgagcaactatcagcagttcgcgatcgaccgcggctggtacgatccggcggccggcaagccgtttgtttggcaggagatctacgcccccattccccgggagtgggccaccgggcggttttggctgtttttccagacgatcgcgccccggcttcgcgcttggccggaacggcagatcacgggccccttcagcgggatcgatccctaccaccagtacgtcgaacccctttcgctctatcccttctcggccaagcccgaaaagccgctcggcgtcgaagatctcatgaaactccagcgctcggtcaacgaggggaccatttatgacatgaccgccgatcccgactggctgatccccgacggccagggggggatgaagctgagccccctgaccacgccgtttcccacccgccccatgcgggagctgctgaaaatttcctcgcgtcgcaacgtcgcccgcggcaattacggaatgatcgcccagctccggggctggcttcccgatcccatcggaggggtctactgggtctatctggacaatcaatacaccggcatctacgtcccgatccacgccggcgtggagcggatcaatccgctctacagcacctacgacccggaccggttcagcgaagactcggcccgctgggtgtatgacttcgccgagaatctcctctatctgaaatggcaggaggcgatccgcgacctgcgggccgtccgggatccgctggagagagagttcctggaaaaattgcccgaggtcgacaagaaggccttggagctgatgaagaagaaccccggccaagcccggacgttcctgaccgaatccgcctggacgaacatggaccgggccgtcaaggcctatcgggatctgcgctcgaccctgatttcaaagtatacgaacaacaaacagggatcctaagcgtccccggccctcttgtcgcggcggccggcgcttcccgggacgtcggacgtgccccccggccgcgcggcggatcaatccgcggccaggccggcggcttcgaccaggatttgagccaggtcgcggacggccacgtcggcccggtccttgtcgacgagggcgtcgcggagcatcgtcaggcagaacggacaggacgtggccaccgcggccacatccgcctccaggatctggccggcccggagatgattaatccgggttccggccgtttcctccgtccacatcaacccgcctcccgcgccgcagcagaggctgtgttcgcggttgtcggcgagctcgaccgggggagccccggccgcggcccggaggacggcccgcggggcgtcggccaggccgttgtggcgggccaggtagcagggatcatggtaggcgatccttgtcccggtccccggggccggtttcaaccggccggaagcgatcagctcgagcaggaattcggaatggtggcggatctcgatgcgggggaaatgggcccgggcttcggggctcaaggaggcgaggcccgaggccagccgcgggtactcgttccggaaggcgttgtagccgtgggggcaggtcgtcaggatcttccggaccttgtgccgggcgaacgtctcgatcgtctccgcggccaaggattggaagagatattcatggcccaggcgccgggccgcgtcgccgcagcacttctcctcggtcccgaggatcgcgaagtcgacgccggccgcggtgagaagccgggcgaaagccctggcggtccgccgtccctcctcctcgaatgagccggcgcagcccacccagaagaggtattccgcgtccgggtgatcggcgatcgtccggagattcaagccctcggcccagcggccgcgctcggcgaacccgactccccagggattggcgttcgtctcgaggttgcgaaacagggcgttgagcggggcggggaacttgctttccatcaggacccggctctggcgcatcccgacgattttgcggatgtgctcgatctcgaccgggcagacgtgcatgcaggcgccgcaggtcgtgcaggcccagatttcgtcctcggcgtggacgtccgggacgagaggcttctgggcgtcccggtcgcgggcgaggacggccttccgctcggccaggaggttcttctccatgtcgaccaggatcatcttgggcgatagcgccttgtccgtgcgggacgccgggcaggcgtcctggcatcggccgcactccatgcaggcgaaggcgtcgagattgtccttccaggagaaatcggccgctttttcgatcccgaacgtctcggagttttcaagatccaaggtcgggatgatccggcccgagccgggttgccggaccagcatgccgaacgagccggcgaacatgtggagatacttggaatgggggacataggcgatgaaaccgaagaccagcaggatatggagccaccagccggcgtgctcgtgggccgcgacggccgccggaagcaccccggctcccctgatcgcgtcggccaggaggttgccgaggaacgcgtacccccgggctccgccgcgggcggcgatggcgaaggcttcataataaaggaagctggcggtgacgaggatcaggaaggcgtagatcacggccgaatcgagcggggtcgtccggtaggccttcggccggaggagaaagcggcggacgatgaaatagagcgttccggccacgactaggacggccatcacgtcggtcaggagggcgaagaacatccggaaacggccgtgaccgagaaggctgaagccggaaaagaatccctcgagcgtatggttgacggtcaaggtatcgaaggtcagggcgctgtagaagatgaagacatgcatcaggccggtgaacggccgctcgtttttcaaggtgcagcgctggagcaggatcttgccgagggcggcgcccagccgccggaccgggcggtcggaccggttctccgaatgcccggccgcgatgatccggatgcggaggatcatcggccggaggaacagaaccgccgtggccaggacggccagggcgaacagggctttctccaaaggggggagcatgcggcctcctcaaaaagcgaagtggaaacccagccggaaaatccggggggactggatgccggtcgcgtaccgcagggggaactcgggccccgtccacgggttttcggacgtggcctggtgcatgttgaagagattgaagacgtcgaacatcagccggatcgatccaaaggggaacggaatgattttttccagccggaaatcggcggtcaggttgaattcataccgggccaccccccggccgtgggcctggatcatgaccgggccctggttcaagccctcgacgatgatcatccgggtgaacggctggccgtcgtaatacttgacgaccaggccggcccgcgtcttgaagggaagctcgtggctgatccccaggcggattgtgtaggcccggtcgaagcggggacgtccatgggcgttgatcccggcgttcggattgtcgtagagcgggccgatcatcccctcgtcgttttcccaggccgtgttccccgggccgttggtctggaacgcccgggtggccgtcatcgccaggaagaacaaggattcgtcggtgggccgcttgaaaagaatgaaatcaagcccggcgtaggtggatttgcgggaaccatggccgggattcgagagaagatggaaatcccggccgaacgtctccggccgctgatcgtagacggtgaattccagatcgtcgatcgagccggagatccggtcgtcgccgatgtcgaaaaaggaaacgggatcataggccgcgcccggcacgccggtgttgacggtctccacgaggttccgcgtttcccggagaaagccggccagcgacatcatccagccccggcccattccccggatgaaggcgagggtcagctcatccgtatagggcaggcggaggttttcgtcgatccccccgtagcgggggccttcccggcggagaagcggtccgcgctcgtcctcgctccagcccgcgtcgccgtcggcgtcgttccagcggaaagccagccggccgggagcggccggatccccccaggccagccatgaaagaggaagggtccagaagtaccggacgaccgaaagccggacggccgaggagccggccgcggacagagggacgcggagggcgaagcgcggggagaaattgaggctctggatcgagccgcccccgccccggccgtagacggcggctccgtggaggcccagggacagcgagacgcctccggccaggttgattgtgtcctggacgtaggcgtcgaggccggccgtctcttgccggtggcggaacggcgaatcgaagacgagggcttccagcgggcggccgtcataaaaaacaagacgaagatcgccgggaacggaagccgcgctctcggacccggcgtaatgcagccggacgccgtattcgaaaagatgatgggtccggacgacgttgcggaaaaacgaccggccgtcgaaaaacaccgaggcccgaacgcgtttttcgtcccccgtttgggcggccgtgccctccgggatgttcaggaatttctcgattcgttggacgccggaggctccgttttgaaggtcgtcgttccatccggccaggcagaagctcagcccgtagcgggaggaggatcgtccgcccggccgggattcggagaggatctggacgagatggcggccttcgttcctccggacggtcgtctccgggggaacgccgccggccgccccggccgacgaatggcttgccgcttggccggtccagaagagccggaggcggcgacggtcgccgtcccggacgagatgaaccaggccggaaaccaggcgcgattcgtcgagcggctcataatcggccagatcgcgggcggccgtgtcgaccgtccaggacgtgaaatacgtccagcgcccgccgaaaaggggacccgaaagccgcagggagacgtccatcaagcggttgaaggtgtcgctttccgtcaggccctcttcccggagggcgggggtgatgttggacgaggcgaaggacttgtcgagataaaatccctggaccgcgccatggaaggacgacgtccctctaaagggcgtgaggtccaccgtcgagcccggggtcagggcctggatcgggacggccgaatcggtcaggaaaaatgattccagggcgaacaggtcggggacgacgagcggagttcccccctcgaacggctcggtgacgtcctgtccgttccagaggaagacgttctgcgtccaggaggcggcgccccgggagccgaacagcgaggggaccgcctcccacatgccgccgacgtcgatccggtcggcggtggcggtcgaggcctggttttcgatcagcgagtcgacggaacggccggtcggcaggctctcgatctggaccgccggaatgaacacgcgcccgttggggaagaggtcttccctgacggccgcggatcccgtcccggcccccgttttctccaaggtgaaggccgcgaagacccggccgtccggctcgcagacgacgcgggggcggacgacggccgcgtaaagaggggcggccgcccggatcgcgtaggcgccgggccggagcccgacgagggcgtaccagccggccgcgtcggcggaaaccgaggcctcctcctcaaagtcctcgccggagacggagaccaccgccccggggatcggctgtccgccggcgtcgagcacccggccccagacaagcgtctcggccccggcttcggccggaggaggggaggccaggaagaaaaacaggcagagacagacggcggaataaatcgagattcggatttgcgttcgtgttttcggcaaagccatcgtattttcttctgaaggcctccggttgtcaacgaaaaaggaaagaggccgggagttcggaatctccccgagcggcccggaagattgaaaatatcggcgcggtcgggtatcttagcgtttccgcggaaaagagaaaacgacgacggaggacaagatcatgactctcacaaaggacatcgcggtgatcgggggcgggccgggaggatacgtcgcggccctgcgggcggcccagctggggaaatccgtcgtcctgttcgagaaggaatggatcggcgggacttgcatgaacgtcggctgcattccgaccaagcacctgctccaccagacgagccttctgcgcgccctgcggacggccaagacgttcgacggcccggctggcgaggtgacgttgaactggacccgggtgctggaagagaaacggaaagtcatcgaccgcctcgtccggggagtcgaatttcttttgaagagccataaagtcgaggtcgtcaagggaacggcggttctgggcggcggacgccggatcgtcgttcggaacggggagggggaggagcaagcctatgaagccggggcggtcatcctggctcatggaagccgtccggccgagctgccgtttctgaagttcaacggaacggacatcctgtcgagcactgaaatgctcgacctggcggccccgcccaaatccctggctgtcatcggggccggggcgatcggcctggaaatggggacgatctactcgcgtcttgggaccgatgtgaccgtcctggagattttaccctccgccctgcccggctgcgaccgggaaatgggccagcggttcgagctcatgttgaaaaagcagggcctcaaggttctgacccagtcccggatcgaaagctgcgagcgcggtccggacggcctggtcgttctcaagggcacgagcctgaaaaccagcgccccgttcgcctgcgcgaccgagaaggtccttctggccgccggccggcggccgaattccggcgggctctcggaaggcgcctctccggtcgccctcgacaagaggggctttgtccaagtcaacgagcgtttggagacaagcgtccccggcatttatgccgtcggcgacctgatcggcggaaaactcctggcccacaaggcctcgcacgagggaatcgcggccgccgagaacgcggccggggggcgcggccatgtcgattaccgggccctgcccatggccgtcttcaccgagccggaattcgcctcgatcggcctgaccgaggaagaagcccgggcggaagggggcgaggtccggatcggcacattctccttccaggccaacggccgggcgctgaccatgaattcccccgacggcctggccaagatcatcgccggggcggacggccggatcttgggcgcccacgtgctcggcgcctgcgccagcgacttgatcgccgagatcaccctggccatgacccggggcttgaaggcctccgacatcggggagtcgattcatatccatccgacgctctcggaagcggtcatggaagcggccttgaaagtcgacggacgggcgatccattgcttgaattgagaaatgggattaaaatcctgccgctcccgcgaggataatgctccatgaccctggccttggtcttcctggtgttcggccttctcggcgcggtcatgatttccctgaacgcgcttctcggcccgcggaagaccaaccccgtcaaggagcagcctttcgaatgcggcagcccgccgcttcagaaggggatccccggtttcgccgtcaagtttccgctcgtcgtcttcctcttcgtcctgttcgacatcgaagtcgcctttctcttcccctgggccctcgttttccgggaaatgaagggaccggcgttccttctcctcctcgcctacaccgccgtgctggcggccggattcgtctatgcctggagaaagggggccttccgctgggaatagagccatggccggaggattcctcaccacccgcttcgacgccctgctttcctggggccgcaaatactcgctcttccattatcccttcatcacggcctgctgcgggatggaatacatgtcgacggcctgcgcccattacgacatcgaccgcttcggcgcgggcatgacccggttttcaccgcgccaggcggacatgctgctcgtcgtcggaacgatcaaccgcaagctggcccccgtgttgaaaacagtctacgaccagatgaccgagccgaaatgggtcatggccttcggggcctgcacggtttcgggcggcatctacgacaattacgccgtcgtccagggaatcgacgaaatcatcccggtcgacatctacatccccggctgtccgccccgcccggagacggtgctcgacggcctcctcaagctccaggaaaaaatcaaggccgagggccaggactggcgatggaagaaaaagacatcctgaccgccctgcgcgaggcccttcccggcgcagtcctcgaggaaggagaatcgttcggcgatccggtcgttcggatccgcccggaggcgctgttgccggcggccggccttctcaaggccgagccgcccgggtacgcgatgctgctcgacgcgacctgcgtcgattatccggaccgccccggccgcttcgagatggtctatcatttcttttccctcgcccggaaccggcggatccgggtcaaggcggaccttccggccggtcgacctgaaatcgcctcgctcgccgcgatgtggaaaaacgccgcttggctcgagcgggagatcttcgacatgttcggcgtgcgcttcgccggccatcccgacctccggcgccttttcctggatgaaggattcgaggggcatccgctccgcaaggatttccccctccgcggacgtcagccgctgccttcgaattcgaaacaggagacgccgtgacctccccgctggtttcggccgcccgccccgagaacctgctgattaacatggggccgtcccacccggccatgcatggaacggtccggatcatgctcgagctcgacggcgagcgggttcaaaacgccgacgtcgaggtggggtatctccaccgcggcttcgaaaagacctgcgagaaccggacctggtggaatctcctgatctacaccgaccggctgaattacgtctcgccgcttctcaacaacctcggctacgccctggccgtggaaaagctctgcgggctggggatccccgagcgggctcagtggatccgggtgctgatgggggagatctcgcggatctgcgaccacttgacctgcctggcggccatggccatggaaaccggggccttcaccgccttcctttacaatatgaaggcccgtgagttcctctgggacgtcatcgagcagacgaccggcgcccggctgacgacgtcctacatccggatcggcggcgtgcgggccgacctccaggctgattacgaatccgccatccgccgtggaatcgaggaaacccggcgcgttctccgggacgtccgccgccttctggaccggaatccgatctttctcggccggacgcgcgacgtcgcggcgatgagccgcgaggaggcggtggcccacggctggaccgggccggcccttcgctcgacgggcttggcctacgacgtccggaaggcccggccttacctgacgtacgaccgcctggaatttgaaatcccgaccggcgaccggggcgataattacgaccgatacctcgtccggatggccgagatggagcaaagcttgaggatcatcgagcagtgtctcggcccgctccggcgggagcggccggccgccaaagcggccgcgatcgagccggccgaggcgatccaggccgcccggacgtctccgcccgaggcccccgtccgcttgtccccaacgctcgagggcgccgaacgggacgttctcggcggcatccagacatccgctcccggatacggcttgcccggaaaagacgccgtctacggaacgatcgagggcttgatctcccatttccaatatttcatgaagggacacggcctgcggccgccggccggggaggtctacgcggcgatcgaggggggcaacggcgagctgggattttacctcgtttccgacggaacggaccggccttaccggctccacctgcgggctccgtgtcttcacgtggtctccgccctggccggcttgatccaggggcggctgctggcggacatcatcccgaccttcggctcgatgaacatgatcggcggggagctggaccggtgacgaacgcgtttccctcgggactgcggacccggatcgaggcgatcctcgcccgctatccgaaccggcgggccgctcttcttcccgtccttcaccttgtccagcgggaacgggggttcatcggtccggaggatgaggccgaggccgccgtcctctgcggcctgcggccggtcgaggtccgggaagtcttgacgttttacacgatgttccggcgcgagcccgccggccgccatcttctgcgcgtctgcacgaatttgtcctgctccatccggggaagcgccgggatcctggaccatctccgccgcgcgttcggcctccagccgggacggacgacgccggacgggcgcttcaccctggtcgaagtcgagtgtctcggggcctgcgacaaggggccgtgcctgctggccggagacacgctccatgaaaacctgacgccggccgccctggacgcgatcctgcgggagctggagtgaccgatggcggaaagacccctcacctcgacgttcgacccggccggcccccggtcgctggaggcctacgtccgcggcggaggctacgccgcggcccgccgggccctggccgaaatgacaccggcggcggtagccggcgaagtcaaggccgccgagctccgaggccggggaggggcgggttttccggccggggtgaaatggagctttattccccggacggatccgggtcctttttatctgtgcgtcaacgcggacgagggagagccggggacgttcaaggaccggcacatcctggcccacgatccgcacctcctgctcgagggaatcattctctgcgcttatgccgtgggcgttcatacggcgtacatctatatccggggcgaatacgaggagccggcccggcgcttggagaaggcgatcgccgaagccgccggggcgggcgtcctgggagcgagcgtcctcggctcgggcttttccctggacgtgatcgtccaccgcggggccggggcctacatctgcggcgaggagacggctctcctcgaatccctcgagggattccgcgggcagccgcgcctcaagcctcccttcccggcggcggtcgggctgttcggcaagccgacggtcatcaacaacgtcgagacgctggcccatctgcccgccgtcatccggaacggggcgtcttggtttctcggtctcggaaaaccgaaggacggggggacgcggctggtcagcgtcagtggatcggtggtccggccgggcgtctacgagctcccggtcgggacgccgctgcgggacgtcgttttcgtccatgccggcggcttggctcccggccggacgctcaaggccgtgattcccggaggaatgtcgtcggccgtcctggggcccggagaaatcgacgtgcccatggacagcgcctcgctggccgcggccggctcgatgatcggatcggccggagtcatcgtgatcgacgacgcggtttcgatgaagacggtcctggaccggatcagccggttttacgcccatgaatcctgcggtcaatgcaccccctgccgggtgggaacgtcctggatccggcggatcgtcctccggcgcggggccggagagggccgggccggcgatctcgaccggatcgtccggctggccggggcgatgaagggacggacgctctgcccgttcggggatgcggcggccgttccgatcctggctttggttacaaaattccgagcggaattggaacaatagcgccatggtcaaagtgacgatcgacggacgggtcctggagacggccgagggaacgacgatcctggccgcggccgaacaagccgggatttccatcccccgtttctgccatcatccggccttgactcccgaaggctcctgccgcatgtgcgtcgttgagatcgagggcgcggccaagctcgagccggcttgcgcgacggctgtccgggaggggatgaaggtcgcgacgcaaacgccgcaggtggccgaagcccggcggaacgtcctcgagctcctcctggccgatcatccggtcgattgtcccatctgcgacaaggcgggggagtgccggctccaggattattaccgggattacgggctttttccgagcgacctgcgcgagccgaagacgcgacgggagaagcttttaaaaatcggagagcggctgatcctggacagggagcgctgcgttctttgcacccggtgcgtccggtttctgagggacgtcgccaagacgggcgagctgggtgttttcggccggggcggcgggtcggagatcggcttcatcgagggggcggcggtggccacgccttacgccggcaacctcgtcgatctctgcccggtcggagcgatcaccgacgccgcctttcgtttccggacgcggtcctggtttttggagccgaagccgtcgatttgcccgttctgcggccgcggctgcgggatcgaggtcgatgttcaccccggcttcgcccggcatccggaaacaggcggcatcttccgcgttcgtccccggcccgacgccaccccggccggaccgtggatctgcgacgtcggccggtacgcttggatcgaaatcgaatcgcgccgggcccgggcgatcgtctggaataagggcggcggcggggaagccgtgctcagcgccgagaaggcgttcgccctcctgggcgccaagatccgggccctggacgagaccgaacggaccggccgcctggcgctcgtcgttcattccggattgaccaacgaagaatgggatgatgtgcggatgttccgggacggattccatccccggccgctcctccggctggccgatccccccgacgacggaggcgatggattcctccggacgccggaacggacgcccaaccgccgcggcgccttggcggccgggggagccgatctgcgtcccctggatttggacgagctccgagcccgcgccgatctcctgttcgttttcgccggcgtccgcggagaggtcaccccctggatcctccacccggaggagtggcggtcgatccgaacgaaagtcctcgtctcgccggttctgacggaagcggacgatctcttcgatttcgtccttccctgcgcctcggcgtttgagaaatccggaagctacacgaacgtcgaaggacggcggcgggaatttggggccgcccggccggtttcggaaggcatccggacggaggggggcatcctccggtcgcttctcgaggccgtccggagagggaaaagggaatgagcgaaatttctgttctcctggtgaagatcgtcgtcgccctggggtggcttctcctccttgctctttttctgacgtgggtcgagcgaaagcagagcgcggtcatgcaggaccggatcggggccaaccgggcccgggtcctgggcctgaggatgttcggcctttttcagccgttcgccgacgcgatcaagatgattttcaaagaggacttcgtcccgccgttcgccgacaaggttctccataccctggccccgttcgtttcctttttcttcgtcgcggcggccgtcgccgtggtgccgttcggtccggcggtccggatccgcgggacgcccgtccttctccaggtttacgacggcacggccgggctcttgttccttctggcgatgctctcgctgggagtttacggcatcctcctttccggctggtcgtcgcgcaaccgctggggtttgatcggcgggctgcggggcgcggcccagctcgtctcctacgagatcggcctcgggctgtccctggtcggcctgatcatggtctatccctcgctgcggctctcggagatcgtggcctatcaaggcgggttgattctcggcttcctcccgcgctggggcgtttttctccagccgctcggctttctcgtcttcttcgtcgccgccgtcgccgagacgaagcgcgtgccgttcgacctgccggaaggagagtccgagatcgtcggcttcaacgccgaatacggcggcctcaagtggggccttttcatgctgacggatttcatggagatcatcgtcgtggccgccctggccgcgacgctgtttttcggcggctggcaggcgccgtggctcggtcccgacggcgtgcgctggccctggggcggacattgggcgatggccggcggcgtcgtcctctttctccaggtcctctccttccaactcaaggtcgctttcttctgctggcttcagattctcatccgctggacctatccgcggatccgttatgatcaattgatggatctggggtggaagctgctcgtccctctcggtcttctcaacgtcttgggaaccggcttggtcatgagcctgcgatgaaaaacgcgttccgccttctcgtggcactcgtcgaggggacgatcgtcaccgcccgccattttttctccaatctttggttccatttcctccggctgatcggcctgaaaaaatatcggcccggggcggtgaccatccaatatcccgaggaaacgaagccgcttccccttcgataccgggcggtccaccgcttgatgaagcggcccggcggaaagccgcggtgcgtggcctgccttctctgcgcgaccgtctgcccttcggaatgcatcgtcgtcgaggcggccggggaccgcgacccggaaatccagaagaccgcgggccggttcgagatcgacctgacccgctgctgcttctgcggattctgcgtcgaggcgtgtcccgaggacgccatccggatggacaccggccggatcgacttggccgcccgcgcgcgggccgagctcgtctggaccttggacgatctgctgcggtgaggcggacggccgtccgcttctccgttttaaaacgaaacttttcatgaaattcccgccgtttagtattgtttctcttttttcaatcaggtataatcggaaactctttatttcaaaggaggtcttgcatggaaaaggttacggtagaggaacttctcaggagagccgcgcagcccgccaaagacgctccgcgccttcacaagtattacaaaggaaagctgggcgtcgccttgaagtgccgggttcgggacttcaatgatttcgcgatctggtacacgccgggcgtggccgcggtctgcaaggaaatcgccgccgatccgcagaaggcctacgagtacaccaacaaatggaacagcgtggccgtcatcagcgacggaacgcgcgtcctgggcctgggcgacatcggccccttgggcggccttccggtcatggagggcaaaggcatcctgtacaagtacctcggcggcgtcgatgcttatcccatctgcctggatgagaaggatccggataagatcatcgaaatcggccgggccctccagccctccttcggcggttacaatctcgaggacatcgcccagcccaagtgctttcggatcctcgacgaactgcgggccaagtgcgaaatcccggtctggcacgacgaccagcagggcacggcctgcgtcaccgtcgccggcgtgatcaacgccctcaagctcgtcaagaaagacatcgccgcggccaagttcgtcgttctcggatcgggcgcctcggggatcaatatcgccaagatgatcatggccgccggggccaatccggacaacatgctctcggtcgattccaagggcattctttcccgcgaccgggccgaccgggccgttctccaggaaaaattcaaggagaaatgggacctctgtatgcggacgaatcccaaggcgaaacagggatccgcagccgacgccgtcgtgggcgcggacgtcctgatcggcgtttccaccccgggacccggaaccatcaaggccgagtggatcagggccatggccaaggatgcgattgtcttcgcctgcgccaatcccatccccgaaatctggccctgggaagccaaggaagccggcgcccgcgtcgtggccaccggccggtcggatttccccaaccaggtcaacaattcgctcgggttcccgggcatcttccgcggcgcgctcgacgtccgggccaagacgatcaccgacgagatgtgcatcgccgccgcccgcgagctggccaaggtcgccgaggacaaggggatcagcgaggactacatcgtcccgaacatggacgaatgggaagttttcccccgcgaagccgcggccgtcgggatgaaggccatcgagcagggcgtggcccggttcaagttcacggccgaggagcttctggccatggccaaggagacgatcgggaaagcccgcaatgaagtcaagctgatgatgaacgaaaaattcatcatcgacccggatcaataatccggattcaactcgttatttgagggggagggacgaaaatccctcccccttttttgtatttcggcgcatttgacaaggatatttttttatgataaataccagtccagatcgacgtctatacgaggatacccttcgagattaggtttcgatgtgcgtgtccgatgaagagtgacgcgatcgagtgagaaaaggaggacgcaatgaaaaatctcacgaaaactgtcgttctcgttttggcgatcgctgtcgttctgaccggctgcaagcagcctacccagctgatcaacgacgtgaaagcggccatcgagaccgtgactacggccggcgccgacaagtacgcccccgaggagctcagggccgtcaatgacgacctgaccaaggctctcgacgaaatcgccgctcaggacaagaagttcttcaagaaattcggtccggcgaaggaaatgctgacggcccttcagacgaaggtcgccgacctgcaggccgctctgccggcgaagatcgaagccgcgaagaatctcgcgatccagctgcagggcgaagcccaggccgcgatcaccgagaccaccgagcttctgaagaaagctcccaagggcaagggcacggcgaaggacctcgaagctctgaaggccgacctggagggcgcggaaacgatgtacacggagatccagggcgccctcgacgccggtgactacatcggcgcccaggacaaggccaacgccgtcaaggcgaaagtcgccgccatcgccgatcagatcaacgcggccatcgcgaaggtgaagcggtaatcgacgacgggacttgaggaatcgcgggcgcgcttgaaaaaccttgggtttgccggcgttgcctgcctcctgagtctgttcgtcaactgttcttgtagcacgccgccggtacctccagaggcggccagggcttcggtcctggagcaagacctctggagggccggcggttctctccttattccccgggattatgaggccttccggtccggcttgaaggacgccgacggacggatcgaggccgagaaagcccggttcggctggttccgggactattcccggatccaggccgatcttcaaaagctcgtcgccgagggggaggcgctgctccgtcgaatcgacgaagacaaggccgcccgggccaaaaccttcgccttatcggctgaaaccctggccgcccgaatcgaaagccttcatcgcatcacccagtatttcaacgaaaacgacgacatccggaaaaacgcctcccaggcggagatcaagctggtcgaggcccggatgctggtctccaaggaaaaatatgaaccggcttcggccgcggccgcggccggcgaagtttttctggaacgagccgaggaggcggccgtccggctccttgagcgctacctggattccggccagctggccaagtggaggcgctgggcggaggaggccgtgaaggaatcccagaacggcgacggcgtggcgatcctcgtcaataaggtcgagcgccggctgaccgtctatgaaaagggcaaggtccgggcccggtacgacatcggtttggggaaatacggcctttcggacaaacgccgggccggggacgaggcgactccggaggggcggtacaaagtcgttaagaaaatcccggcctccaagttttataaagcccttctaatcgattatcccaacgaggacgacaagcggttcttcgccgaggccaagcgccggggccagattccgagccatgccgggatcggaggggccatcgagatccacggcggggggaaagacagccttaccaagggctgtgttgggttggaagacaaggatatggacgacatctacgcctggtcggtcgtcggcacgccggtgacgatcgtcggggcgaccgacgtcgaaaacacgatcctggatgaaatccggaaattcaagaaaaatgtccgctaaaatcagaaaaattcttctgatcgcggccgcgggattcatcctcgcggccgggctgatcgtcctcgcagcgaacataatcgcccgttcctgggcccggagcgaggagcgggccgaaatcccgccgcctgtcgaggccaagaccctggcggctaagacgcggcagctcgaatcgaggatgaaaagcctgctgccccgggggacttatatcatgatcgacacggccgaaaaccgcctccgggtgatccgggacggcaaagagcttctgctggcgatcgtgtcctgcggatcgggcgacatcctccaggatcccagcggcgagcgaaagtgggttttcgacacgccccgcggggaatttacggtatcctccaagctcgtcaacccgacttggatcaagccggattgggccttttacgaggaaggggaggatctgccgaaaaatttcagtgaccggatcgacaacgacaccctgggcgattacgccctgggcatcggcagcggttattttatccatggaacgctgtacacccggatgctcggccggaacgtgacccacggctgcgtccgggtgggggacgatgatctaaaaaaagtctatcaaagcgtgcccatgggcgcgaaagtctacatctactgacatgaaaacccgacggattttaggtcttgtcgcgggaaccgcccttctggttgccggcgcggccggacaggaagcggccgccccgtccccgcggaaagcggcccgcgtcgagcaggaatacggcctcgcccggacgccgtcgacgtattttattttcgatttcgaggccggaaaggtctccttgaaggccaggggcctcgttctcaaagaatggccgatcttcaaggtgaaaacctgggggcggcacggcggagtcatgacgtgcccgctgttgaaaaaaaccgcctacaacgcgcccaagaggaaggacgtcacgccgggcaaagtcgaggacgaaacggacaagaagccgacggccaaaaacgacgatctcgacatcctggaattggtgaagatgccggtcaatttcacgcttgagcttcccggcgacatccggatgaacgtccgtctaaggaaaagcgggttcgcctggattctcgacggggcgggccgtttgttttcccgggggatcggccggtcggtgaaaacgatcgtccggggaatcggacgacggccgttcacggaaatcgagatcgtctttctcgaggaaagcgcggccaaaaacatttactggtcttttttcgaaggccagaagtgcatcctttactggccggaataatttccggcggggggacggaagcgatctccgtataaagggaaagcgatttaatccggattaattgggaacgaaaaataaaaatgtaaaaaataattgtattatattgaatataaataaaatatatcgcaataaaatacttgacaacgatacgctaaagttttatattaacaatcgacttaatgctaaggagtatcatatatggctaagattatcggcatcgatctaggaacgacgaactcggttgtggccatcatggagggcgaccaagcgacggtcatctccaacgaggaaggcggccggacgactccgtccgtcgtcggattcacggccaagggcgagcgactggtcgggcaggtcgccaagcgccagcgcgtcaccaatcccgaaaacacggtctactcgatcaagcggttcatgggccgccggtacgccgaggtcccgaacgaaatcaagcaggtgccgttcaagatcacggaagcgcccaacggcgacgtccggatcgctgtcttcgacaagcagtactcgccgcccgagatctcggcgatggttcttcagaagctgaaaaaggcggccgaggattatctcggggaaaaagtcgagaaggcggtcatcaccgttccagcgtatttcaacgacagccagcggaaggcgaccaaggacgccggccaaatcgccggcctggatgtggtccggatcatcaacgagcccacggccgcggccctggcctatggcatggaaaagaagaaggaccagacgatcgccgtctacgacttcggcggcggaacgttcgatatttccatccttgaagtgggggaaggcgtcgtcgaggtcaaatcgaccaacggcgacacccacctcggcggcgacgacatcgatcaacggatccaggattggatcacgacggaattcaagaaggaaaccggcatcgacctggccaaggacaagatggccatccagcgtctcaaggaagccgcggaaaaggcgaagatcgagctttcgacgacgatggagaccgagatcaacctgccgttcgtcacggccgacgcctcgggccccaagcaccttttgatgaaaatgacccgggcgaaactcgaggccctcattgaggatttgatccaacggtccgtggccccctgcaagcaggccctgtcggacgccggcctgaagcccgaggacatccacgaggtcatcctcgtcggcggccagacccggatgccccgcatccaggcgctggtccagcaggtcttcggccgcgagccccacaagggcgtcaaccccgacgaagtcgtctccgtcggcgcggccatccagggcgccgtcctttcgggcgatgtcaaggacgtccttcttctcgacgtgactccgctgaccctgggcatcgaaacgctcggaggcgttttcacccggatgatcagccggaacacgacgatcccgacgaagaaaaccgaggttttttccacggcctccgacagccagccgagcgtcgagatccacatcctccagggcgagcgggagatggcctcggacaaccgcaccctgggccgtttccacttggacggcatcccgccggcgccccgcggcattccaaaaatcgaagtcaccttcgacatcgacgccaacggcattctccatgtctcggccaaggacatggggacgggcaagcagcagcagatcaccatcaccgggcattccgggctcgacgagaaggaaatcaagcggatggtctccgacgccgaggctcattcgaccgaggataaaaagcgccgggagacgatcgacgcccgcaaccaggccgaccagatgatctacagcctggaaaaaatccttcgggaaaacgccgacaagatcccggcggccgaagccgaggccgtccggtccgagatcgaggcgaccaagaaggccgtcgaatccgacagccccgaggccatcaagaaagccctggaaagcctcaaccgggcctcccacaagatgaccgaggttctctaccggagcgccggcccgcagcccggagcgggggccgcctccgacggtcccgagcaggcttcgtccggcccgtccggcggaaacggcgggtccgagggggacgtcatcgacgccgaagtcgttgacgacggaaaatcaaactgacgcccggcccggccgggatgggattgaatgtccggaggagcggccctccgctcctccggcgatttttccccgggttaagacgggggaaaggaaagaggggagcgcatggccagggattattatgagatcctcggagtcggacggtcggcttcggacgcggaaatcaagaaagcctaccgccgcctggcccgcaagcaccatcccgatctcaatcccaatgacaaggcggccgaggccaaattcaaggagatatcggccgcctacgaggttctcagcgatcccaagaagaaagcccggtacgatcagttcgggttcgccggcgagcgcccgccggccgacggcgggcccggcggcggcgactacgcctcgggcggcttcgagggattcgacttttcggatttcggcgggggatcgttccgcgacctctttcagaacatcttcggcggggcggccgcccgggcggcggccgcggccggcccggagaggggtgaagaccttctctacacgatgaaagtcgggttcgaggacgccgttcgcggcgtccagaccaagatccgcctgaaccggcgggcggcctgtccggcctgcggcggatcgggctccaaaagcggcgaggccaagacctgcccgacgtgccggggatccggcaaggcctttcagcagcgcggctacatgaagttttccggcgtctgcccggcctgcggaggccgcgggaccgtggccgggcgcgattgcggcgactgccgggggcaggggacgcgggagatgcccgaaacgatcaacgtccgcatcccggccggagtggacacgggaagcaaggtccgcatcccccgaaagggccatgccggcctgggcggcggtcccccgggggatctttacatccagatcgagaccctgccccatccgctcttccggcgggagggcatgagcctccacgtcaaggttccgatcacggttcccgaggcgaccctgggagcgaaaatcgacgtcccgacgctggacggaccggccgtcatccgcatcccgccggggacgaaatccggacagcgcttccgattgaagggcaagggggcgccgcagcccggggcccggatccgcggcgatgaattcgtcgaggtcatgatcgtcccgccgcccttcggcgacgagcgcgtccgggacctgatgaagaagctcgaacccctctacgggggcagtccgcgggccggaatgaatgaagaggttccacgatgaaaagaaacacaatgaataaaacgaagccccggccggcggaccggaaagccgaaaccgccgggccgcggcggccgcggcccaaggccggcgaggctgggtgcccgggatcgagctactaccatatcagcagcgtggccgaccggttccatatccatccgcagacgctccgcctctacgagcgagaggggctgctcaaaccgtcccgctcgtgcggcaacacccggctctattccgacgaggatttgaaacgcctggagatcatcctcaatcttgtccgcgacctgggcgtcaacctcgcgggggtggaagtcatcttgaacatgcgggcgaaaatcgagcggatcgaagccgaggtccaagccttcatggattccttccagcgggagttcttctccggccgggaggaggagttcgaggcccgccgccaaagcctcgtccacgtctcgtcgtcccagatcgtgaaagtcgacaaatccgaatgacgtcctacaaggatttcacggaatcgcggaacctccgccgctacttggagcagatcggccgttttccgcgcttgaccgaggagcaggaaagagagctggccgagcgcatccatgccggggatgccaaggccctcgagcggatgatcgagggcaacctgcggtttgtcgtctcctacgtcaaaaaatacaagggaatgggcttggacatgctcgacctcatcaacgagggcaatctcggcttgatcgaggcggccaagaggttcgatcccggccgcaacgtcaagttcatctcctacgccgtctggtggatccgccaggcggtgattcattcgctcaccgcctcggcccgcgtcacccatgtcccccagaaaatctccgaccagatgctcctgatgaagcggaaagtcgcccagttgtcggccgagctggggcgggagccgaaccgggaggagatcgcggcggcgatgaagatgacggtctccgagatcgaggacctggccctgttggaaaacaaggaaatctcgctcaacgaccggttcgacgaggacggccaggggctggaggagaagatcggcgatccgatctccccctcggtcgaataccagatcatcaaggcttccatcttgaaccaggtccgggagatcctaagcgagctggatgagaaggaagcgactgtgttaaaattacgcttcggcttggacgacgaccggccgctgacgctccaggagatcggcgaccgcctccacctgacccgcgagcggatccgccagatcgaacagacggccatgaccaagctgagccggtcccacaagctccaggagcttcgcggatacttgaactgaacggggacgaatgaggtgaagaacaagggacgcgaggaatgcccgcgctgctttgacacgggctggatccaggtcgaaacgaaagcgggccccgcggcccgccgctgttcctgccacgaggcgaaaaccgaaagcgccgtcctcctccggacccgcatccccacccgctaccgcgactgcaccctggcgaatttcgaggtccatgacgactcccacaaggacgccctccggatctcgaggaaattcatctccaatttcccggcccaagacatcgggctgctgttcatcggcccctgcggcgtggggaaaacccacttggccacggccatcttggccgagctggtgacgaagaaaagggcggccggcgtcttctacgatttccgggacctgatccgcgacatccaggccacgttcgcccccgattccgacgtcagcgagtccgacgtcctccggccgatcttcgaaagcgacgtcctggtcctggacgagctgggggcccagcggtcgtcgacctgggtcgaggaaacgatcttctacatcatcaaccgccgttacaacgagcggcgcctgacgatcttcacctcgaactaccccgacacatccgagacggccgacgaccgggccccgatgttcaagaaaacggccggcttcggcgcgacccgcaagcccgaggacacgctcgtcgaccggatcggcgtccgcctccgctcgcggatctacgagatgtgcaaggtggtcgagatctccgggcaggattaccggaaagtcgccaagcaggccgggtaccgcttctgaaccgctcccgcggttttttccctgcccgggaggccggagatcgtcctggaaattcgggtccgctccgcggcgttcgccgtcaagacctttccggcggacctcgcgcgcgtcgtccttccggccggcggcgggtgtggagagccgggcggcgatccggcccgcgagggtccggatacgtcccggatttcctttttatctcatcatcaggttcttcagaacggaaaaagccgtgtcgatccgggcattgtcgatgatgaccgtgaattccgtgtatgtggaaacgacctcgatgacgttgatattcgaccaggcgagctgtttgagaatggaataatgcacgccgggggtcgagacggttttcgggtgaagcctgagaatgaccgccgaaaggttcgaaaaagaggaaatcttccgttcgcctttgaagatttcgtcgacgtttttcctgaactcttcgctgatgatcagcgtgacttcatatatgcccctggtgaaggtcaggaatttatccctttgatgagacacgtcgtgaatgagcttttcctgctttttgatgatgttctccgacgcggcgaaggtgtattccgcgaggttcgagcgcacggtgagatcgaggatctcaacctcgaaggatcccttttgagcccggccccggattccgtctgaataccgcttgagggccatgatcatagcgctttcggtgacattcttctcgaggctttttttgatttcgggaaggatattcctggccaaagaggacaggttgatgatcccgctccgaagaccttcctccaaaaaaggagtactcatgacgattctatggatttcttccgatatggttaacatgtcaaaaatataacaagaataataaaattagtaaataatttatgtatttttgacaatggggcgcctcgttctccataatgccgtctcaaattgaattggaggagaacgatgtcggaattgaaaacggaatgcccggtttgcggggcgttgatgatccttttgagcgggaccatcgagggagaacttttcccttgccgggagtgcggctctcaaatggaagtggtgagccttgatcctgtcgtggtggccgaagcggccgccgaggaagaagactggggccagtgacatggtgaaaattctcgactcgactcttcgagaaggcgaacagacgcccggggtgtacttcgatattcatgtcaagctggcgatcgccgggatccttgacgagctgggcgtcgatttcattgaagccggtcaccccgccgtcaccgaggatatcgcgaaagccgtcaccctcatttcggccggggggatgaagtcgaaaatcgccgcgcattcgcgttcgatgagatcggacatcgataaagcgctcgaatgccgcgcggatttcatcggaatattttactgtgtatccgaccggcggcttcaggattattccacgaatcttgtttcggccgtggataaaatcacaagcgtcatccgatatgccaaggaaaaaaggccgtccctcatcatcaggtatacccccgaagacacggtcaggtcgaaatatgaaaacgttttttccgcggccaaggcggccgtctcggcgggggccgatattatcagcgtggcggatacgacgggctacatgattcccggcaccgaacggagcatgtacgagttcatttcgaggttgaaagacgatctcgggaaggacggcttggctccgttcctggaggtgcactgccataacgaccgcggcctggccgcggcgaattccctcgacgcgatcagggcgggggcccatatcgtggacgcggcggttctcggcctcggcgagcgggccggcatcacggacctcgggacgcttcttgcggttctgtcgtttgatttcggccttgagggaaaatggaacacaaagatcctgccggagatttacgcgacggtttcaagatattcgaatgttcccgtgccggtcaaccttcccgccaccggaaagaacgccttcacccattgcgccggagtgcacacccaggcggccattaagaatccgcttcattatgaaagcctcgatcccggccgcttcggccgcgcttcaacgatcgccctcgatcacatgtcggggatttcctctctccagtacaacctcgaaaaaatcggcgagcccgccgacgacagggaatggctgaacgccgtccttcagaaagtgaaggaggtggggaaaaaaggaagaaccgtggatcttgaagaactgaaaatgatcgtgaaatatcagaaagaattatccggaggaatcgaaaatgagaatcgggtttcttcattcgcttatcagaaaggatgaaaagctcttattggatgaattctcgaaacggcgcggcctcgacgtcgtccttctcgacgaccgggacctcgtttataccctcgggggaaaaaaccatcgcttcgacgtcgtcgttgaacgatgcctcagccattcgaaggcgctttacgcaatccggcttttcgaggcggcgggaatcaaatgcgtgaatgcttacgcggtcgcggcgacgtgcggcgacaaactaatgacatcgatcgccctggcggaagccggaatcacccagccggaggtcaagatcgcgttcacccgtgaatcggccctcaaagccatcgaggacatggggtatccggtcgtcctgaagccggcggtcggttcctggggaaggcttctgtcgaaagtgaacgaccgggacgcggccgaagccctgctcgagcacaaagcggtcctcggctcttaccatcattcgatcttctacatccagaaatatgtcgaaaaaaacggaagagacatccggagcttcgtggtcggcggaacatgcgtcgccgccatccaccggagttctccgcattggatcaccaacacggcaaggggcggagcggcgacgaattgccccgtgacgccggagctcgcggacctttccgtccgggccgccgcggccgtgggcgggggcattgtcgcgatcgatgtattcgaaagcgactcgggctacttgatcaacgaagtgaaccatacgatggaattcaaaaacagccttgaacctacgggggtgaacatcccggcgttgatcgccgattatgtcatcgagcggggacgggggaactgacgatgggaaccataagggccgcgatcgtgggggcttcgggatacgccggcggcgagcttttgaggcttcttctttttcacgagaacgtcgaagtcgtccgcgcgacgtcggaaaggaacgcgggtctgccggtgacgaggcgtcatcccaatcttcggaagatcaccggcctctgtttttcctcatcgagcgaactgaacgagtgcgatctgattttcttgtgcctgccgcacggagaagggatcaagaacatcgaccattttatgaatcaggccccgaaaatcatcgatttaagcgccgatttcaggctgaagaggagtgaggacagggtgaaatggtacggctcgggccatccgcggcccgagcttgtgaatcagttcgtgtatggaatccccgagcttcaccgggaggagatgaaaaaagcgagctatatttccagcgccggttgcaacgccacggtttcgatccttgctctctatcctctcttcaaacagggcgcagtcgaaaagggaaaaacggtgatcgaggtgaaggccggctcaagcgaaggcggccgctccccaagcgaatactcgcaccatcccgaaagaagcggctgcgtgcgtacttatcaacccacgtcccatcggcacaaggctgaaatcattcaggagctggggcttggagaaaacgatgtccatttttcggcgacgtcgatcgacatggtcaggggaattctcgccacgtgccacgtctttttagaggaaaagctcggggaaaaggaaatctggaagatcttcagagagcactacgccggcgaaccgtttatccggatcgtcaaggagagaagcggcggttaccggtatccggagccgaaaattctcgccggcaccaatttctgcgacatcggatttgaacaagacccggattcaaaccggctggtggtgatcagcgcgatcgacaacctcatgaaaggagcggccgggcaggccgtccaggcgatgaacatcatgtgcggatttcccgagaaccggggactcgaattctgcggacttcacccggcgtgaccatgtgcaggatcctggttgtaaaatccgacaaggaattcgagatttcccgccacctggaacggtttgcggctctttgccggagaagcaaggaataccagggccacggctggggcttagcggttccggacggcggacggtggaaggtttacaagagcctcgcgccggtctgggagcaaaaaatgcgcggcttcggccggagccggcttctcatggtccacgcccgaagcgcgttcaggaatgaaaacataaaccttgagtataacatgccgtttgattcgggccgcctggcgttcgctttcaatggagagctccggggcgtccgaatcggcggccggggcgtcagcggggcggaaaagatatttcattttgtcaaacggctcggcgacaccgggcttccgcggcccctgaaaagcggcggagacatcatcgccgaacgaaccgcttatgtccgggcgatgaacatggtttcctgcgacatgagcaaaatcgccgtttattcccgtttcagcgaagacgaagagtatttctcgatgaggatcaaaagggaaaacggcacgtttcttttatgttcagaaaagtatccggatgacgaggaatcgtgttgggaaagggttcccaaccattcttaccttgaagcctagaaatgatcatttttaaaatcggcggagggaaggacatcaaccgggaggggatcgcgaagggactgagcctggttcacgaaccgtttctcatcgtccacggggccaacggcctgcgggacgagctggcgctgaagacgggatacgacatcaagaggatcacgtccgtctcgggctattcaagcgtcttttccgaccccgggctgatcgacttgatgatgatggcctacgccgggctggcgaacaaaaggtgggttgagactcttcagcggcacgggatcaacgcggtcgggcttacgggcctggacggccggctgatcgccgggaaaaggaacgccggcatcaggatgagaaaagattccaaaatcctgatggtgagggattattccggaaaaccgtccgggatcaacgccggtcttctcaagatgctcctcgaccggggctatgtgccggtcctcaccgtgccgatcatcgacgagaacggctatgccgtgaattctgaaaacgacgacatcacggcgtttctggcggaagagctgaaggcggatcaaatcgtcatgttcatcgaggaaaagggttatctccgggatccgtccgaccccgattcggcgatggaaaggatatccaaaagcgagctggctttttttgtcgaaaacgcctccgggaggatcaaaaggaagcttcatgcccttttgaaaatcgccggccgggagggggcccgggccgtgatttccgacggaaggggcgaaaacccggtttgggacgctctcaacaatcgagggaccgtgatctcatgaccggtttaagggaagccgaaaagatttattccttccccgtttaccccaaacgggatttagtgctggtcaaaggggaaaacgcggcggtttttgacgagaacggcagggagtatatcgattgcgtcgcggggaacggctcgctcaacgtcggccattccaacccggccgttgtcaaggcggtgaaagaccaggcggaaaaaatcatctcctgcgcgaatatattttataacgacgcccgcgcggcttttcttgaaaaattgatttccgtcatgcccgcagggcttcgcaaggccttcctctgcaattccggcgccgaggcggtcgaggcggcggtcaagttctcgaggctcgcgaccaaaaggaaaaaattcgtctcgaccgtaaacggatttcatggaaggacgctgggcgcgctgtcggcgacccataacagcaagtaccgggaggatttcctcccccttctcgacggcttttccttcgtcccgtacaacgatttcgaaaaaatggaacgcgccgtcgacctggaaaccgccggggtgatcgtcgagacggtgcagggggagggaggggtttatccgggacgtccggattatttcgcgcggctccgccggctgtgcacggagcgaggcgctcttttgatcatcgacgaagtccagacgggcttctgtcgaacgggaaagttcttcggctttgaacacttcggcgttgctcccgacattctctgcctggcgaaatcgatcgccggcggccttccgatgggagccgtcgcggcctcggatcaaatcgaggtcggtatcgggaagcacggcagcacgttcggcggcaatcctctttgctgcgcggccggaacggccgccatcgagttcatgctcgaaaataagctttggcttgaagccgaaagaaaaggctcgtacctgatggaaagactgcgcctcatcaaatcctccaaaatcagggaagtaagagggctcggcctcatgatcggcatcgagctcaaggaaaaagcgaagctttatgtgctggaccttctggaaagggggctcctcgtcctcccttcaggtctcaacatcatcaggcttctcccgccgctgacgattcctcgcgacgatatcgacagggtgattgagcggatcgccgcctctctcggggataaagaaaaaagcttcccgcttgattgaatgccgccggatcgatcgacccccggccggaatcagagcttcagggcccgctccatcttctcgagattcgtccgaagctcgaaggggatcgtccggccgaagccgttgaaaaacttcttgatctcgcccgcttcccccttccattcggacggcttgatctcgaacagccggtccattttggagcgggggatcggcaggccttccatgttgaaatcattcatgtcggggaccaggccgatgggcgtttcccgcgccccgaccttgccgtccacccggtcgatgatccacttgaggacccgcatgttgtccccgaagccgggccagacgaacttgccgttctcgtccacccggaaccaattgacggcgaagatcttcggcggattgcgcatcaaggccccggtgttcatccagtggcggaaatagtcgcccatgttgtagccgcagaaggggagcatggcgaacgggtcgcggcgaaggacgccgaccgccccggccgcggcggccgtggtttccgagccggtccgggctcccatgaagacgccgtgcgtccagtcgaaggcctcgaccaccaggggcatgaggtgggagcggcggccgccgatgaggatggccgaaatgggaacgccccggggattgtcgaattccggcgacaacgtcgggcaattgtagagcgagaccgtaaaccggctgttgggatgggcgatcttgtccttcgagccggggatccaggggcggccctgccagtcctccacgcgcggcggaaggccgtcgaggccttcccaccagggctcgttcgcgtcgacgtcccgcccgacgttggtgtagagcgtcgggtagaaattccggcccttgagggtccggatcatgttcggattggtcttcatcgacgtgcccggggcgacgccgaagaagcccgcttcgggattgatggcgtagaggcggccgtcgggcccgacgttcatccaggcgatgtcgtcgccgatggtgaagacgcggtattcggggagggccgactggagcatggccaggttggtcttcccgcaggccgagggcatggccgcggtgatatacgtcacccggcctttcatgtcctcgatccccatgacgaccatgtgctcggccagccagccctgccgcaggccgaggtaggaggccacccggagggcgaagcatttcttgcccagcagggcattgccgccgtaccccgagccgatgctccaaaccaggctctcccgggggaaatgcatgatgtagcggcggttggggctgaagtcgccgaccgaatggctgcccttgacgaatcgctccgacgtcccgattctcttcaggacatgggttcccatccgggtcatgatccgcatcgagacggcgacgtaggagatgtcggtgacctggaggcaggccttggcgtagggcgagtcgggatggcccatcatgtaagggaggacgtacatcgtccggccgcgcatcgccccgtcggccagcttggtcagcatcgccttggccttgtcgggggccatccagttgttgttgggaccggactggtccttttcggggtggcagacgaaggtcagttgctcggtccgggcgacgtcggtcgggtggctgtgatggagataggcgtcgggccagttcgcctggttgagggcggtgaaaacgggctgcggcccgattttttcctcgcggaggccgatctcgatcagacgatgggcctccgcctcggacccgtcgcaccagtagacccgcttgggcttgtagatccgttcctgttcctcaacccatcgctcgaccggagtggacatgtccctcctcggcaagaaagagggaacaaaatatcacgggcgcggccgcgaagtcaaaacgaaattctccgccgggcatccaagcccgagtccgggttcgaggaagcctcatccggccccctggcggaaagggaagggggcggcgtgcttttcatgaccgggggaggaatcgtcggcccggaggatggacggggaaggaggccggctcgaaaggccggtttttcgatgaaaagacccgggtcggctagcggacgaggatcgttcaccgttattcgagggccaggtcgaccgccgccttgcagtggagggctgtcgtgtcgaacacgggaacggacgcgtcggccggcttgatcaggagggggatctcggtgcacccgagaatcacgccctcggccccgcgatcccggaggccgtcgatgatccgctggtaggtcttccttgatgcgtcgtggatctttcccaggccgagctcgttatagatgatgtcatgtacggaggtcttttcggcttcgctcgggacgaggacgcgcaagccgtgcattttctccagccggccgcggtaaaaatccatttccatggtgtagcgggttccgagcaggccgaccgatttcaacccttggcgccggatttcggccgcggtcgcgtcggcgatgtgaaccagggggattccgatcgccgcggccacggcctcggccgtccggtgcatcgtgttggcgcagattaggagaaggtccgccccggccgcctcgacggtccgggcggcctcgatcatgagggcggtcaagcgctcccaatcgccggcgatctggaggttttcgatttcctcgaaatcgaccgagcgcatgacgatcgaggcggagtgggcgccgttcagccgccgatggacgtcctcgttgaggaagcggtaataatcgaccgtcgaatgccaggtcatgcccccgatgaggccgatggttttcatgagcttctcctttggccgatgtccggagaggcccgcggcgggccgggcgatgcgacgcgcgaagcgccgggcagggcgccgcggagggagggcgatcccccaaggccgaggcgtgccgagccgggaaaggcttgcgacggcgccgcgggcccgcggagaaggcttttccggcctcccgggcttttccggaaaggaaaaatagcagaaatctccgataaatggaaacagcgcggctttgaagacgcggcgggggcgccgaatccccggatccaatcccgcttacgccggcggttgtcatcggccgatccgacatcgtgtctccggcggtcctccccgcgccggccccgcccgatcccccttgcctttaccgagtggtcatgttaaattattccggcttgctccccggtagctcaatcggcagagcggttggctgtaagctcaattgcagcttccacgagaaatcgtggttgaaaaatcgggtgaactcagggaagcccgccctccgcggcgcggagagggtaatcctgagccaagccccgccggtgcggcggggaaggtgcagagactagagcgaaagctcgtacctgggcttatccgcccggggaagcgcccgacaccctcgtccctctttcgagagagaacgggtgaagagatagtccaagcccggaggaaactccggggcccttgtaaccaataggttgcaggttcgagtcctgcccggggagccaaaaccgcctttcttctatttttttatttttcacatagcagttttttattttttttagttagcattttccttttttctggtttacaattcccttgatatgtcaatcgggggaaagcatgtctacaaagatcgaaggccttattgcatattccggccgaaaagtggccggattcaaccggattcagtggttgctttcctccgaaatcgctggccgttttcgcccggaatatgcctttcgagatcgcccgggggcgggtgctggcgatctcgcgccgaaccttgagattcggcggggcatcttcgccgccttcgatgtcgccggacgtgagtgtttctggacctctacgcgcgttctgaccgacgtgaatcatggcccctttccggcggtcccggacggtcgggacgcaaatatctacgactgcgaaaactcccacatcgtggtcaccagcatccagcaactggccagtcgggcagaccgtcggcttcccgctttcccggatgatttcttcgacctgacacttgtcgacgaggggcaccgcaacatggccaggagttgggagcgggtctttgagcggttccttaatgctgaggtcgtcagcctcacggccacacgcttcagaggagacggacgcgagattgccggtgagcgggtctatgcctacctattcgggacttccatggtgcagggatacatcaagcaaatctcggttgtgaacgtcgcacctgaggagatctccttcacctatcgaggagatgccagacggcacacgcttgatgaggttcttcaactgcgggatgaggaatggttcagccatggagtggccctcgctccggagtgcaaccggtccatcgtggacgccagcatccagtggcttcaacatctttgggaaaccggcacattctatcaattgatcgcggttacctgttcggtggattactccctccaggtgctgtccctttatgcagagcgcggtttgcaggttcgtgaaatccacagcaacatgccaaggaggaaaatcatatgggccttccagtaacacaaggggcgtacaacctgcttgaagagaagtggatacctgttctttacagtaatgggaagacggatcgcgtcgggatctgccaggtgctgaccgatgcatgcgaaatccggcagatagccgccagtaatcccatggacagggtggccctcttgcgctttctgttggccgtgctcatgtggtgcaaagaggacgcgaagtcttcccttgcggcgttggacgagaagaactccggcataccggagaactggctgggtagactgaaggaacacaaggccgcgttcaatctattgggggatggtaagaggttctatcaggatctcaatgcggcaacgccggatgtcggtgcctccaacttaatgcacgagttcccttccgggtctaagatcgctcactttcgtcacatacgcgacgacagcgacgggctgtgtttaggatgttgcgctctggcactcgtgcgctggtcggtccttgcgagcgcggggaccgctggtgccagacagagcatgactgcgagcttgaatggaaacacgccttcgtatacgtttcatgctggaccgaaccttttcattactctcagacgcgaattgcaaaggttgatgcctgtcgaaaaagaccgccccgtctgggatggcgctgacgaaaaaactccaatcggccctttgaaggcattcacatggcgctctaggtgtgtccggctggcgccaccctctgaaaacggagagcgcaatcttcgtgaaggccgctgctcttattgtgaaaagcagtcagatcgaatcgtatataccatacgcttccgaccaggctggaagcgcaattccagcgagccatggcgcgacgatccacatctactcagactggatgtgcatgataaacagattgttccctcttggccgagccccaacgatgcgttggaacaccatgcggaaacgtggagttcagtcatgcaggggattctgaaccggacaacggatcagaatggaacgaagtatgaaacagtccttgtcgcagccgtacaagcgctttacaaacacatcgcatcacattcccttttcatggccgcccttgaccaggaacgcaagaatgccgtccgtgcggaactcgactgggcgcgccgagcgacatgggccacagtaagcgcgcgtacaggtaaagggaagacgaaggagaaagtatggggggaacctccgaaagggcatgcgattgttgagagtttgcatgggcaaaaatccctggggcacgagatacgttcgagtctgtgtgcgctcagtagccaaacgcatgtcgatatggagaattgcttcagggaactattgttacaatacgacgttaaggagtggcgacaatcggttaaagagattctcatccgggtcattgagcaagtcgtccgttccactattactggctcgctgctgcaacggcgggaggccttggcgcgggcaagatcggccctggagtcgacactcaataagacagaacatggtgacgcgctatcggaggcggccatgcctagcaaaccgaaacgtggccgcaagaagagaggcacaaaatgagccagaccgctgaatacatcaagaggctttcagacttgcaggaaggtgagcgttcgcggctgcgccgtctggccggacggccgctcgacgcaacgctccagggtttcgacctcttcacgggcctctggtggccgctgcgggcgaaaagcccggcgactccgcgccgggagccgtcatggctcgttgccaagcttttcggcgcgttccgcgtcccgcacatcaggcccgattcaggtgcggggccgtctttgcccaaaattttgggccgctgcgaaccctgcgacccaccggagttcaagtcccgcaatcgtttccgaaagcgttttgatgccttgctctgctcgcccctgtcagcccttgagccaaacctacgttgggcgctgggagaggtcgcccaggtcgtcgccggacacgtgccgcacgtgcgggatgtgaagggcatcgactgggaacaactcctcgacgatctctccatctgggaacggggcgaggtgcactgccgtggacgcgatgttcgcgacatttgggccgaaacatatctcaacgctgtcaaaaaagaaaggaggatattaaaatgatcattgaaatccacatgatccagaaccacagtccggcgaatttgaaccgggacgacttgggtgcgccaaagacctgcatcttcggcggtgttacccgggcacgcatctccagccagtgtctcaagcgaagcatccggcgtagtccggaattcgcagccgctttagaaaaggatggcggcgttcgtacacggcggctgattgagttgatcgcaaaggcggcggcgggcgagggtaatcaaccgaatgagcaacatttaaaagccattcggaaggtctttacagacggaggggtcggcctgagggatgagaacacttttgaaatactcttctttctgcctcaatccgccatcaacaaaatgggcgaggctgtgcgcgacgaaaacagcgacctgggcaggaaattcgccgagatcatcggcgagttcgtcaagacccccgacatcgcactttgtggccgcatgacggagttcgatgcaaaggggccgtttcaggacctcaaaggccagtttaccgttgaggctgcgctctccgccgctcacgccatctcgactcacgcaatcgtgaacgaggtagactacttcaccgctgccgacgatgtgccaggccaggacgccggcgcggcccacgtcaacgaggccatgttcaattcggcgtgtttttacaaacatttcgtgattgactggagccagttgcacgcgaatctgaacaacgataccgcacttgcaaggaccaccgtgaagtgcttccttgaagcagccgccaaggccaacccctccggcaaacagcacgccttcgcggcattcaatccgccagacggagttctggtcgaagtcaaaaccaagtcggccacgcccgtcagctacgccaacgccttcgccgatccggtgccggaaaagtccgaacgaggattggtcggcgaaagtatcgcccggctcggcaagtatacccacgatctcgttgtaggttacagcatcgaggctgagcgtttctggttctcgccgaatctgcgccatcgtcttacctggatcgacaagagcaagaaggaacacgagcaagaacaatccgtggtcggttccgacgagttcggtgagttcgatcagttcgtcgataaggtcatggacaagatggagacaaccgggacgcctgcagaggcggcgaaatgaccgaggccaacacactcttcctccgccttgaaggcccactccaggcctggggcgacacgtcaaagttcgttatccggcggacaatggatgcgccgacaaagtccggcgtgctaggcctgctctgctgcgccatgggcctgccgcgccaggcggcgcgggaacgcctgtcggagctgaacaggcttgcgatgggtgtgcgcatcgaccgacccggcacgcggtggtgggattaccacacggtaggagcgggaatcggcattataacagctgacgggaagggaattaagcggacgccttccaccggcgagattgaaacccttatcacgcgccgggagtacctggccgacgcgagctttctcgtggcgctccagggtgatgcgaagttgatccatgatattgccgcggcgattgcgtcgccaaagtggccggttttccttggccgcaagtcctgcccgccgtccgtcccggtgcttgcaaggcccagtgagggtgagttgtggacgaatcccgccggttatgacggcctgaacgccgcgctgggcgccatgccgtggcacccgcggtacaagactgacgttgcgccgaagaacagggcggtggaaacgcttgtggagtggcggtccgccccggattgtgatgtcgcccccgacgacgcggaagtgtggtatgacgtgccggtttgcttcgatccaccggtccacgaggcgcgatttgtcctgcgtggcacagtcccagttgaagtgggggatccgatccagacttccacgccagcaccgccgcgtccgcgcgcggactacaagaatacagaatatcggaagcgtcgcgaagaacgaattaaagccgacaccgggttgtgcgtcttctgcaagtcgcccggcccgcgcatgaccgtccagcacgtcacctaccgaagagccggtggcaacgagaccctggaggacctgcgttcgctttgcggtctgtgccatgatgccgtcaccatgcttgaatatggcctcggcatggaacttgaccgcatcaatcctgaggaaccacgctggcgcgaccgaatcattcaaaagcgagccgagattctcaaataccgctcgctggaaacccgacgccgacgcctcgtctccgaagaggtggaatagctatgtacctctcctgtctcttgatcaacgtaggggacgatcccgatcggcatcggcctggacggttgtggctcaggaaccgttatcatgtccatcagcgcctttgcatggcctttccatccgatccacggaaaaagcgcgatcctgaattccttataccttacgatcaggacgattttcccgagcaacgacacttggctgaccggaagaagaacgaagttgagtacgatgccctgaaacaagtccactccccgcgcaacgacgaagccggctttctttttcgcatcgatcctctctgtaacggccgagtgatgatcatcgtgcagtctgccatagagcccgactgggactatgcctttcacaatgcggattatcttctggctgcgccgcctgaggtgaaatcgtttgaccccgtcttctcgaaaggccagcgtcttcgattccgcctcctggcgaatccgactcaaaaaaaggcgacgttgccgaaacggcgctggaacacgatgtcgcaagaggaacagaacaaagagaaaacgcggcacgggaaacgtgtgccagtcccgagtagccaggaaatcgatgactggcgcggaaaacaccagggggaagacccccgaacgtttgttcatgagaaactccacgaatggttggcgaattggcggctgatgcgaaacgggcggacaatcgattctgcagggtttgccatcgatccgaatttcaccatcgttcagccgggttacgtctatatcaataaggaaggcaaaggccaagggaagcgcctccactcggcgcgttacgaggggattctcacagtggacaatccggagctcttcaaggaaacgctaattcgcggcatcggatccggcaaagcttttggatttggcttgctttcggttgctcctgccaatgcatcgggtgaaggggggaggacgtgcgagtaaaggacctgcacgttctgccaaagttcagcgacggatggagttatctttatgtcgagcattgtcgcatcgatcaggaagcctgggccgttgccatccacgatgaatcaggtaaggtacctgtcccctgcgccaatttggctcttctcatgcttggacccggtgtctcaattacgcatgccgcgatttcggttctggcggatcatggctgcctcgttgcctggtgcggcgaagaaggtgtccggttctacgcagtaggcatgggcgagactcggagtgccgcgaactttctacatcaggcgcgagtctgggcagatataaacctccgtttgatggttgtatatcggttataccagttgagatttgctgagaaactagatccagacctaacccttcgtcagattcgcggaatggaaggcgttcgtgtcagagaagcatacgctaaagctgccgcggagaccggagtgccgtggtcaggccgcagttaccggcgcgacaaatggactgttgctgatccggtgaacagggctttatctgcggccaattcgtgtctttacggcatctgccatgcggctatcgtctcagcgggattttcgtcggctattggtttcatccacacgggaaaaatgttgtcgtttatttatgatgtcgcggatctttacaaagcggaaatcacgattccagcggcatttcgtgcggcagcagaagagaaaggtagcttggaaagacgagtacggattttttgccgcgacctgtttgtttcgacccggttgttggagagaataattccggacgtcaagaaggtgttgatgttgccagaaaaaactctgactaatgacgcctcattcgaccaagattccgcagctccgggtgctttgtgggacaatattacagaaagagaggagggtggccgcgactattcgttggtagttgaagaaacggaggctaccaatggtggttctgattcttgaacgcgtatcatccggtttgcggggcgaattaacgcgttggctaatggaaccaaaagctggagtcttcgttgggaaaatctcggccatggtgcgcgataaactatgggaaaaatcatgttctcaagcgaaatcaggcagttgcgcgatgatttattcaagtaacaacgaacagggttttaaatttcggagttggggcgatatgactcgttctgtcgaagactttgaagggctttttctcgtccggataccgtaaacaaagccttttttcagtattgtccccacgcgtgtgggggtgaaccg

SEQ ID NO: 503 - DNA, 394668 bp, Artificial Sequence
  Synthetic Oligonucleotide
caaccaccccgatcgagttcgccaacacggttgcctacaggtactatcagatcctgttcccgacccttcgggccaacagcgatggcaacatgcagatcgcggaagtggagttcctcggcaccgtcgcgccgtagtgaacccttgccaaggttcgccacagtcgaatgtccatgatcaggggcctgcgtcccagtgacgccggcccctttgttgtgcgctcacatggcaacgcacagaagcacaaagacgccggcgaaaacgtgagcgaaccgctcgccccgccattgatgccgcgacaggatcgtggtaggattcgggggcggcccgatcgtggctgcggcaaacacggggctcaggcaacgggaggtgaacatgcgttcgagcgtaaggcagcgatggattccggtgtgttctctgatctgtctcggcgcggtagtcgcctcgggcgcaacggtgccgctgggcgagctggacctgacgaagatgtccaccgggtggggcaagccccaggtcaacaagagcatcaccgcccgaacgctgtcgatcggcgggcgctcgttcgaaacgggcgtggcgacacacgccgaatcgatctgctacatcgccctggacggcaaaaccgagcggttcagcgcctgggtgggcgtcgacgacgccaccgggcctcgcggctcggtccggttcaaggtctatggcgacggcaaggtgctgttcgacagcggcctgatgaccggcaacgacgaagccaagcgtgtcgacgtctcgctggctggcgtgacgcagatgatcctgctggtcagttccggcggcgacggcatcgattacgaccacgccaactgggcgggcgccgagttcatcgtggggggtgacaagccgacgaccgtcgacgcaccacggccccctgccgaggagaaggtgctgctgacgcccaagccgggcccggcgccgcagatcaatgggccgaaggtctacggctgccgaccgggacatccgttcctctaccgcatcccctgcacggggacgcggccgatcgcgtttggcgccgccgggctgcccgagacgctgcggctcgacgcgagcacgggaatcatcacggggaccgtgcccacgccgcgaggcgagtacgtcgtgacactcgaagcgaaaaacgaccacggcagcgaccgccgcaccttcgcgatcatcgtcggcgacacgctcgcgctgacgccgccgatgggctggaacagttggtacatccactattatcacgtcaccgaagagcacatgcgaaacgccgccgacgtcatgatcagctccggcatggccgactacgggtacagctacgtcaacatcgacgactgctggatgaagaggcgcggcgatgagccctaccgcgacgcgaaaggcgcgatcctgcccaacgccaagttccccgacatcaagggcatggtcgatcacatccacagcaaaggtctcaaggcaggcctctacacagggccgggaccctggacgtgcgccgggtacgtcgccagctacgaacacgaacgggtggacgcggagaagttcgccgagcggggtttcgatttcctcaagcacgactggtgctcgtacagtgaggtcgccggcggcacagacctggagcacctgaagcgcccatatcagttgatgggcgacatcctcaagagtctcgaccgggacatcatcctgaacctgtgccagtacggcatgggcaacgtctggacctggggtggcgaggtcggcgggcactgctggcgcaccacgggcgacctgggcctcgaacaaggcggcctgctgcccggcttctaccggatcggcctgagcaacgcccggcactttgagtacgcccggcccggacagtggaacgaccccgactacatcctgatcgggcacatcggcaacgcctatcagcatgatgagccgcccaaacccaccccactgacgccaagcgagcagtacagctacatgtcgatgtggtgcctgatggccgccccgctgttctactcgggcgacatgcgctatctcgacgaattcaccctcaacgtactatgcaatgccgaggtgatcgacgtcgatcaggacccgctgggcatccaggccaggccgctggtgcaggacgacgagactctgattatggccaaggcgatggccgacggctcgctggcggtgggcctgttcaacctggccgaattgcctcgcgagatgtcggtcgactggccgctactgggcctgtcgggcaagcgcctcgtgcgggacctttggcggcagaaggacctgggcacgtacgacagccgcttcgccgccaacgtatcgcgtcacggcgtggccctcgtccgcctgatccccgccccatagacggatgatgggcggccggcggataccgatatctcttgcagacggcaacctctgtcgatagaatggtaaatgccgcgatgcaacgcgatcaggcaccctgactggcatgccctgccgggtgcgcccggagacgggtgggccgagacgataggtctgggtaagcgcttcccgagaacgtggaggaccatgtcatgcggaagtcgaaggcattcacactgatcgagctgctggtcgtcatcgccgtcatcgccgtgctcatggggatcctgataccggcgctaggcaaggcccgtgagctggcccagggcgccgcctgcaagggcaacctgaagaactataccatcgcgatggcgatgtacctcgacgacaacgaccgcaggttcgcggaaccacagagatgctacttcagccaactaacaccctaccccgtcgaggcaggcatttccgagtacctgcatctgcgctggtgcaacggcgacatcgagttgaagagtcacccggagtacggagggatgatggcccggtacctcggcgatgccagggcattcatctgcccaaccttcaagaacctcgcagtgcgccacagcgacgaccagttcttcctcgcctatggcaagaacgtcaagaactacgaaccctggtacaactacacgatgaacgcctatctgggcagcgcccgcagtgacgttcaggagacccgcgttctcaaggacacggacgtcaagcatcctgcgacgacgttttcgttcgcagaggagagcgcgatcgtcgatacggcctacaacatgtccgggctcaatgacacgttcatggcccccggcagcgatacgatggtcaagagttggttcagccagaccggaggcgacctgcgtcgcatcatcccgggtcccgagggggtcgggcaattctgggatgtgatcgcgggtttccaccacgccccttcgggcgacaagctgggcggacgcggcaactgcgcgttcctcgacgggcacgtcgaggccttctcccgtgccgagacgttttactacgcctatccgaagaagtgacggcgttgcgttaaatccgaaatccgaaacacgaaatccgaaatagatccgaaggcaccaaactgcgaattcgaaacggggttcggcacagcgtcagcatttcgttcattttagcttgcggatttcgggcttgtttcggatttcgtgtttcgagtctctgttcagtcattgtagccgggcgagccgccgacctcggcgctggcacgccaggcgcccttcttgtcgagggtggccgaatcggcggtcagggggtcaatcaccgtcagcgagtagccagccccatcggtgaggtcgtaccatccgtccttgtaccggaaggcgaggatcatctggccggcggcatcctgcaactcgatgctttcccccgcattgttcaggctgccggcgtactggccgacgacgggcgactggtccccataccgcgcctcgaacgccccgatgtctttgacaacgagggcatatgcacccgggtcgagagtgacgtcgccgaaggtgaagtcgatcccattcgtgaagcgcaccagatggagattaaccggctgagagccgatgttgagcaactcgacgtattcggtgttcggatcgacaggatgatacatgatctcgctgatccgcaggctctcggccaccggaccgacggcgtagaccgcctcgttcagcgcgctccaggtgctgccgctctgggcacgggcgcggaccatcgcgctggcatcgagccggatcgggccggcgtagcggaccgccgtcggcgcgacaccggctggaacgtccgcgcccccctgcgacgcgaccagctcaaccgagatcaggaagtcggaactgttggcacctgcgttgagcccctggatcgccaggaggttgcgtcccaggcgaagccggctgatatggccggagaggtcgaaccgctcgaactcgaccgcgtcgaggtcggagtggttgtcggtggcgccggagttccaggcgggcgtcccctcgaacatgacgcgctggacttcgacgccgttgaggtaagcgatgaaaccgtcgtcgtaccgcgccttgagcgtcaggccgccggcgtattgcaacccctcgggtgtgacgtcgaacggaatgcggatgtagcagctctcgttgcggttgtacatctgggcctggacgtcgatgtcgaagaacgcctcgtagccggtgctgcgttcgtagccgacgccgccggagccggcgatccaggcggaatcgtcgaaatccacctcgctgcgccaggcgctgccgatatccgtggtggggacgaacgcgcgcttggccgccgcttccggcacgaggaccagctcagcgcccgtgctgccgctgacgccggggcgccgcggatcgctgccgtcgagcgtgtaccagaccgttgcggcgttggaagtcattgtgagccgtgagccctcggcgatgtggccgccgtgctgatagacaccgtcgatatggaagaccggcgcctccacgctcgggtagagccccagggctttgaactgcgacagtgccacctcgttgcggcgagggaaatagttgtcgagcagattctgacgttccacgatccagaaatcgttgcgggtgtacaggtaataggggcccgaactgtaggaatgcacatcccggcgatagtcgccccagcgggccgactcggcgatgacagcggcgtcgatctcgtcggcccgtcgggtccatcgcgcgatgttgcgctcggtcgtcagggcgccgccgttgaacagatgcttgtgcacgcgatcaccgaagcgaacgcggaattcctcgatttgcgaaagggggcgatacaggccggtcgggtccaacgtatcccttatcacggtctcggtcgccttctcaagaactcgttcgccgtcccagctatagaagcgccagggcttgttgtcggcgccgcctccggcggcgcgccagtttccgtcggtcttgagatcctggttgccggcgaacaggttcaggagcgtgaagtcgatgaagttgtcgatgtcgatgacctggcagatccgggcccaatcgccgccggcggcgatgctcctggcctgttgccaggtctggggggtgacgtcgtgggcgtcgcgtcctccgttaatcgaatcgagtcgatccgggtcgcctccgttgtaggcggcgtagtgcgaggcgaccggccgctcctggaccagatacaggccccagtaaatcccgttgaggtacaagtgcacgtagaacccgcgtccggcgtcggcctgccccatctcgagcaacgagtcgcgcatccactggtcgcgaatgtactgcgcccgctggcgctggccgggatcccagtgcgtccaggcgttgttaaagaagccgcgcagttgaagcgaatcgaacgtttccacggggctgccgtcgaacaacgggaaccggagcttcgacgagccgtagacgtcgcgaaagcggaggctgaaactgtgcttgggacacttgggcgggttgcggctttcgccgccctggatgcgcaggccgcagtcgatctgaaattccttggcgccgtcgatgctgaacagctcggcggacacgggccgttcccaatcctggccgcccgtgctgctgtgcccggtgtagatgtagatgccgccggtctgcgcatcattggtcttgctgaacaaatggtccctgtcggtcaccagagacaacgtcggaatcgccagcagcgcatcgtccatgacgtcggcatatgcggggctgttgtagatctcggggtccatctcgtagtcggccgggtaggagccgaaccacgtgctcggatagccacgtgccagcacctcggactgcgagcgcctcgccgcatcggccaggaagatgtacgtgtgcgtgtccgcgttgctgggtacgcactgcggcttgaccgcctgggcccgcaggcacgtggtcctggtgatccggatcgggccgttgtagacactgccggcaggaacctgccgagcctgcgaatacggcgcgctgccgtcgagggtgtagtagatggtcgcgccgggcgtctcgcacgtgatcgtcacgtcaaacggcatatcgtagaaaccgcggtcatggctgaacttcgtatcggcgacgagaccgtcgtacaggccgctgttgcgcgagccgggcgtgggcgtcagcaggaagccgtacggcccggtgccgtcgggcgagcggccataggagatgtcggtcctctgttcttcgaatgcaacgctgtcgatgagcgtggtcccatcgggggcaaacagtgccagggtgtccccgtcggaatcgagcgcaaacgacgcatgcagcccgctgtcgcttgtggggccgtcgagccagacgatgagatatccccccgccggaacggtggccggctgcgaggcaccgcctgggaactgccattttgtcggttcgcccggatcgtccgtcaggtacatgcgggccaggtcgatcggcgcatcgctgtaattatggatctcgacccagtcgtcgtactggccttgggggtcggccttgacactgctgttggccgccatcagctcattgatcgccagcggcagacccgccccccggcctgccggggtcgccgagacaggaccgacactcagaagaaacgaagccagcacaagacgagcggcccgacgggattcacgcgtcacactcattcctcactcccgacaatccaagcggtgacaggcgtgcaagtacgctggtgttccagaatccgggaccgtcgtcgatccccaatgacctcgcgactccgcccgccgtgaaggcatattcgcacatgcgcatcagactgtattctaccattcgcggcctgaaaatcaacgttatttgccccgccgggccgccaagtctacaccgccgacctcgtcgagatcgagccgacgccttgccggatacgatccgaccggttacgattcgctatgcaatcgtggccttgacgccaaggccgccgacagagttcgggagaatgtcgccatggcagcatttcgcgatccagccaatccgatcctcaccccacaggacgtaacgccgtcgcgtggcgatttcgaggtcctcggcgtcttcaatcccgcggtggcccgccttggcgaggaaatcgtcctgctggtgcgcgtagccgagcgtccgatccagactgacccggaggtggtgcagaccgcgtttctcgacccggcctgcggccggatcgtcaccaaggcgttcactcgacccgacccggccaacgatttctccgatcctcggttgatcgtgcgccggggcaggacatacctgacctcaatatcgcatctgcgcgtggcgagaagcaaagacggtatccgcttcaccatcgatgagcatcccacccttggtccggccgacccctgggagagcttcggtgtcgaggacccgcgcatcacgcggatcggccagacgtattacatcagctacgtcgcggtctcgccgctgggggtgaccacggcgctggcgtcgacgtgtgatttcgcgaccttcgaacgtcacggcgttatcttcggcccggaaaacaaggacgtcgtcctcttccccgagacggtcgacggacgatactacgcattgcatcggccgcactcgccgctttgtcacaccaacaacatgtggatcgccgaatcgcccgatttgctctgctggggccgccatcgccacttgatggggctgcgcgacggattctgggacgaggcccgcatcggggccggcgcaccgcccgtccgcctcgacgaggggtggctggagatttaccacggcgccgaccgcaaccatcgttactgcctcggcgccgtcctgctcgacgcccgccagccctggatggtgcgggcccgctcagcgcggccgattctcgagccgcagaccgaatacgagtgctccggcttcttcggccccgtggtcttcacctgcggcctgctcgtcgaacagacgactttgaaggtctactatggcgcctccgacacaacggtctgctgcgccgcattgtcactcgaagacgtgctcgcgtcgatgcagtcgtaagtcgctgggtttctctcaattctccgcaacaccgtgcgcgccgtggtcggcaacctctgtgagtccggatcggccagccggtcggcccgctggtccacccgacgctgacccgatcctgtgcggcgcctcatcatccgatgggacacggaatctcgaaaagaaaccaatgtcaccgacagtcttcccatgtcccccaatcttcccacatcaaaataagcattttcctccgtggaattgcttgcagggcgtcccatattgcgcgtatatttaacccggatggggcggtgatgaatacacgtgtggttctgctcacgcggaatagctacacgcagacgctatgtggacatagagagtgtctggatgagtaaaatccgtgcgggcgaggtttgtccggacggagtaaaggggagatgtacggatgggtgggagaaacccggagaaaggaggtgcctgggggttccacggatacaaggtaagctgacggtttccacagagtcacacacggagtgtaaggagacacaagatgagacggttacctgcaatactgccggcgctggcgctgctcgccgtcgtcggcaccgccagtggtgcgctgacgctttccagcgccagcggcacctggagcgatcctgtacttcagtccttggcccctgcccctgcctactggtcttctttgatgggcgaacagctcatatcctggggcactccggcctatctgtttggtctcaagagcagcttgggcttcacacccgtcgcgacgcccaccgacgtggtgctcgatacgccctttgtcgtgggcgcgctgcgccattacaatacgcccatagtcgtcggcaccggcatcacggcggtcgatctggacctggcgatggactttgaggggacgccggtcaacacgtccctgacgctgggcgttacggaaacggtcggcccgggtggccatcctgcggatgtcatcacgctgccgacgtcgttcgatcccatcgcgtttgaggtcgggggcgcggactacgagttgtgcgtgctgggtttcggcagttgccccagcagcatcatctcgtcgcttagcacggaagaatgccgtaccacctgtcctccgctcccgctctgggcgaagatctgcagcacgacgccaccaattccggcgccgggagccctgctcttggccggcatcggtgtcagtgcggtgagctggctgcgccgacgccgaacgctctaaagctcggcacatgaggggcgatgcgatattgtccgcccggcatcgggccgggtagggccgcgagcaacccgcagcagtacgcctggacttgacgccacggtcctcgcttactgctgcggggccggctcgatggtgatctcattgccgccagcctcggcacgcacctgtggttcgtagtaggagtatgcctggctgtcgggaattgtcgcgcgcaccgggaagcgggccttgacttggaagtgcagggtccgttgttcgccgcgttccaggccgtcgagatagaagatcaccttgcgtccggccacctcgtaccgcgtgacgagattgtcggcaagcagcgcatcgagcgactcggcgacagcggcgaagcctgtaggcacaccgacatccacgatcatcattcctgtcgagtcctttggcccgaggtaccgcaccgtcgcggtgacgttgacgatatcatcgacctccacgtggtcggcgtcgtacatcacctccagggtcatgtccttctggaccggatcgtcacgcagcagaacgttgaaccgtcgaaccagttggaatcgcacctgccccgagccgacagcgctgatttcgacggccgattcgagcggcagctccgccgtctgaaggacgtcgaagttggtgctgttcacggtgaactgcgccagcgtttccccgccccgcgccttggcggtcaccgtaaggtccacgttgcggctctgactgcgggccgccatcatcagggccttcagccccatgaccgtatcctgcgtactgccgtagccgcccaggctgttacgctggagcgaaagccacttgaccgcttcgttcgcctgcggccattccttctcgatcatcgccagcgccgcgtaggcggttgtctccaccgggtgaggttgccagtgcagaccgtcggcatcggtgacggcgatcgccagcagccgttcgagcgccgcgtcggcggccggatcacctacccgcgcgaaggccagcgccgcaattgctagggcatacgcatcgtcccggaccgacgcgaggttgtcacgcagatattgcgtcgccgctccctgcacgtgcggatcggccataccgtaatccgccatcgcaatcgacacgaacgcggtcagcgcgtacgtcccctgcaccccgccgaccatttcactgtggcatacgaaccccaccggcggccacgatccgtcggatgcctggtgcgaggcgatccacgcggccgcctcggccagaatcgtctcgtcgatcgtcgtcacctcacgcgcggcgctgaacgtgccgagcacgaatgccgtcagccagaggctgccctcggcatcgctctggccgaaggcggagaacgaaccgtcctgatggcggaatgtcagttctcgctggtagcccaccgtgatgaagtgctcggccttggcccgcacctcgggcgtgagctggccggtcgcgttgagatagcgcagaatctccacgtccggggcgaagaagatcatgttctgctcgccgcagccgtagggcattccgagcaggtcatccacaccgttgatgctctgggcaaccaggctgggcgtgatgctcaggagaatcttctgcgaatcgggcacggcgaattccggcgtattcgcgtcgaggaccaccgtctcgcccgctcggatcgcgccgttggtgaccagctcacgccgggtgccttccggctccacgagcacttccttgcgcacggcatcggcccgccggaccgaacgcagacggacctccagcggatgatgtccgagcttcgtcggctcaatgacaaacgaaacagacgacacggaatttgcatttacctgcacctgctgttcgctgatgtcgagcaggttgaaccagtcggcgtccgccatctccacatagaccacctgaggttcgtcgaggtagttgaacacctggacccggaccgggaattgctcgccccgcgtcaccgcatacggcagatcgggctcgccaaagaactcctggaacacgcggactgacgactccgtcacgccaagcccgttgtcgctcgtggacaccgcatgaagccgccacgtcgtgatgctgtccggcgccgtcaggtccagcatcgcggtcccattgggctcggtgagcagatccggcatccacacccacgtctcagggaagaactggcggacccgatcgacctccgccaacccatctcctttgccggcgttctcggcaacatcgtcggcgccaccccttcggacgaccggaccaatccaccacagcccgttgattcgccggccctcgggaacatccagcccgcgcgaagtcaccacggcaagcccggcgtcctcaaatatgttgcgggcgccatagctgtacggctggtcgtgcgtttccgcctgcggctccatgaaccgctgttccagctcgccgaacacctcctgcatgttgagccggccttcgttcagcgcatagaccgactcgtcgacgatggccaggccgaccatcgactgaccctccgaacgaaccgagacgcgaaccggctcacccggcccgacctcttcggcactgactcccagggccaggctggctgcgtggtccatcgtcacctcgaactcgatcgtggcggcggaaatctcgttgttcgggttgatcacgtacgccaccacccgggcggccggcaccatctgctgcgtcgcctggaaccggatcgccgagccggtcaccgcgtccgaccagacggtatggccgttcgcaaagacatcgtagtagatggttgcatcgtgcgtgcgaaacacatcgatcgtgactgtgtcacccatgccgacggcgccggtggattcgcgactcagatgaaggaagctgtcgctgggcgagtatgtcgcatagacgtacaactccgcctgcccgctttcgccatcgcctcgaacctcgctcttcagtgtggcccaggaagccttctgcggcgccctcagggtgatcgaggtcgagccttcgaacgccagcgaatgggcctccttggagatcatctcacccgattcggcgtagtactcgccgatcaactgtcctgtcacggagacgggcacaccgtcgggcgtctcggccaccaccaaaacgtcatacgattgcgcgggcgtgaacgaccgagacgaggcgatcagccggtgctcgattcccgacgagacgatcttcagcagcttggtcgtcttctcctggtgatccgacgtgtcggtgacggtcacgtcgagctgcacgctgcccgcaccgccggctcccgtggtcccgctgacgtacttgacctcgggcagcgagaactccgcccgcccttccgtcagcggcgccgtgtagcgagcgtattcctcccagacaccgacgtagcgactggcgctgatctgaacctcgccgtcgacgggcttgccgaagaaatacgtcgccgtgacggtcccggggattctctcgtcggtgcggaagtaatcccgtggcgtgtcgagcttgacctcgaatcgcggcagcacgtactcctcgactcgcaggtcgatggttccccggccggcccccgattcggcggtgatcttccacgtgccgtagttcagctcgctggccagatcgaggttgaacggcgcgacaccgaaggcgttcgtcgtgaggtccttgcggaagattttgacgcccttgccgtcggtgatctgcacggtcacgtcggaggcgctcggacgaagctcgttcgtcagcaccagcacgcggccctggatcgtctggcccggcttgtagattggcttgtccgtttcgatcaacaccacgggcatccgccggatcatgatctgagttgtcagagtctcctcggcgccatcgacgtgtgcctccaggatataggagccatccgccaagttgggcgtgtcgaatcgggcgacgaaccgccctgcctcatcggtctgcccggcggcgaggtctacgttcccttcatgggccttgaggcgcagactcacgccgatccctgccgacgactggcgtgcgctgaccaccgtgatcgtcgccgaggtcgaggcgccactgtacaacgtcttggggacgaccatcatcacatcgacggtccccgcccgggcgactgccgccaccagccccaggaccagaaaccctgcaaacctgattctccgtgccattgtgccgctccttagattgggatgaatgaatggataataaccgtaaatccagcacctgccttctcttcgaccagacagggggcgtacctttggctgatagtgcgggcgaatcatcgttcgccgccatagtttgtggaaccgccgcccgtgccccgaaaatccctcaagccacgctgagctatctccgcaaggtctccgaaggtgccggtgcgatgatatgcgacaataatatgatagcgacaagcacggatatgatggtcaattccggccggccttcgaaccttgattcactgcggccattttatcggaacgtgcgtctgggttcaagctttttcgcccaggcccgcaaagagccggcggacgtactcggtgcttctggtgaacgcttccaggggcggcatggtgttgggcgagccgttttcgatcgcctgttccaggacgatgtgcgggcgaacgccctcctggcgcagggcatcggccagggcgcggtaatcgatatcgccctcgccaaatgtctcggtccagacgccgccctgggactgccgcaggtgcagctcgcggatgcgcttgccgtagagcttgacgatgtcgaacagggcgacctgcgagttgcccgcgccgcgatagacccagtgggcgtcgaggcagagtgtcacatcggccggatcggtgccgagcatcatgtggtggaactcgcgtgcggcctgccgcagttccatgttgtgattgtggtaggccagcgtcaggccgagcttccgcagttcggccccgagccggttcagtgcggccgcctggaccttgagctgttcgtcgttcttgtcctgcgcgccgccccaggcgagcggattggggttggtcacgacgatccgcgctccagcgtcccgggccctcggagcaatcgtgaggatctgccggatgctctcatcggcccggccggcctcatgcagcaggctgttgacgtaaaaagaccgcatcccgaggcggtgcttcttcagcagaggcgccagacgctcgacctgtgcgacgtcgccgaacgacggctcaaacccgtcaagaccgctggcagccacctcggccagaccttcatcgagcgactggtcgaaattgcgcccttgacgctgatagaacacggtccaggagtacgagttgcaggcgacgtgcatccgctcaccctcggagcccgccgccggacgaacttgagccggcgaaagtgcgatcgcccctgtcgccagaaccgcatccgcaagaaacgtccgccgcgttgtcaatcgatctgccatagtgcaaacctccgtcgccccaatcggggcttgccgcctgcgtgccatcccctccgaaccccgcacgctgagtatgcggccttcgccgggcaaatgcaagggcgcttcctcgcacggacgcggcatggtaggctgtgcctcgtgaatggtcaggtcataaggagaacatcgcatgcgatgcaggatggtttttacccacgtgttcgcaggctgtctggcggcgtccggcagcctccttgccgcaccgcggctggtcgccatcgggccttgtccggcccatgtcggcaagtatgacaagctcgaactgacactgacgccggagcggacgtacgacaatcccttcgacccatgtgaggttgcgatcgatctgctgatcgattgcccgagcgggcgggcgctcgttctgccggcctttttcggccaggattaccaacggcgagatttccccagcgatggcaaaaccgtggcctggtgctacccgatcggtcaagggacgtggaaagcacggttcgcacccacggagacggggacatacacgatccgggctcgcctgaacgaccgtgagggccaatcgctgtcgcagaccatccggatcgagtgcgtcccttccacaaataagggatttttgcgcgtcggccgcgaggacccgaggtttctcgaattcgccgaaggccagcccttcttcgccatcggccagaacctcgccttcatcggcgagagccagtatgtcaacgtcccgaaggccgaggcgatcttcgcggagatggcgcgaaacggcgcgaacttcgcgcgcatttggacgtgttgccatgactgggccctcgccgtcgaggctcccaagagcgcgtggacccgttcatggaaccggcaatcgcccgtggttcccctgcctgaagccgagggcaagtgcgtacaactgcagggccaggacggcgcttcgatcgaggtttcgccctcgcaccgggtggcgctgcggccggacacgcggtacacactccgcggaaggttcaaggccgacggagcggacggtttgcgaatccaggtcggcagacacgattggcgggtgccggcacacaccgccacctggcaggacttcgcagaagaattcaccaccggccccgatgagtactggctgggccacaccacagttgcactttcgggcgaaggcactgcgtggctgaccggtctgtcgctgaaggaaagcgacgacagcgcggagctgctatgggaagcggatgtcaatcgtcccgtgcggggttactacaatccgctcgactgcttcatggtcgatcagatcgtccaggccgccgagaaacacggcatctatctgatgctttgcctgctgacgcgggatctttacatgaatgagcttggcaatccgaacaatgtgccttacgaccgagccatcgcggatgccagaaagttcatgcgctatgccgtcgcccggtggggctactcgaccagcgtcggcgcgtgggagtacttcaacgagatcgacccgggcaagccaacggaccacttctatgaggaggtgggcggctacctcgacgaaatcgacatctaccgccacctgcggaccaccagcacatggcatccgtcggcgcgcgactgtggcctcgcagccctcgacgtcgcccaactgcaccactacttgcgccctggcgaagcagacttcaaagacgaagtccaggccatcctcgaaaaggcggcctttctgcgagagcacgcgccgaacaaaccggcgctgatcggcgagttcggcctggccaccgacaagtggggcctgagcgagcacatgagacaagacaccgatggcgtgcacttccataatgctctctgggcgtcgaccttcgccggaccgtcgggcacggccatgttctggtggtgggagcaattggaccagcaggacgcctaccgtcactatcggccgctggcggcatacctgcgggacatctccttcgagggattgagagcgacaggcgcaactgtgtccgacgcgcgtctacgcgtgctgggctatcagggaacggatcgcacctatctgtggctgtccagccgggacgccacgtggtggaaggtcgtcgcggggcagacacctcaagagatcgaaggtgcgaccctcgaaatcccagacttttcgccgggcgagtacgccgttcagtggtgggatacaagtcagggcacttgcatcaagacgcaccgcgttcgacacgaccaggaccgattgagtgtcgccgtgccggtggtgcgaagtgacatcgcctgtcagatcgtgcgactctgattcgaacggttcagcgtcagacggcaccggccaaatcgttctccaactgggtcaggatcgtctgaaggcagcggtcgagaccggcgaccagcccttccggcccggcggtcgccacgtcggccgtcgcggcgtaggacttggccaggatgatctccgggtctacgccgctttcggtccgcagcaggaagaaacgaatctccatgaccgccttcggcgcgcgcctgtcgcgaaagtcaccgtagagagcggcaatattggcttcgattcgatgcgtgggctcggcgccgctgcccgagccgagaacctgcgcgaacagacccgactgggtcaaccagtcgcgtgtcctctccgtgatcatcacggtcggtgaaacaagaaactcgttgtaagcgtcggattcgtatcgatgttcgtcgagccggtagaccagccccctgccggcgtacgccgcatcgatggtgaaccgtggaaccgccagaacagccttgccttcgcgaacggccggggacaacgagcgagacgtctgaagcaagtagaagcggctgttggccgactgcggcctcgcgcaacccgtcaggacaagcgcgaacatggtcagggccagaaacagggccggccgggtccccttacatatcatttgtatgcctccgattcacgtgggggtttgctgaagatcagctccgaaggacgctccctgagactgtcggtcaggtcgcgcagattgtcggaaatctcccggaaattgccgatgatgatttcaatctctggtttctcggtcgtcaccagccggtcgatgctcgacagcacccggttcagccgcgcgacaacctccggaaggttggacccgcccgcggtccccgtcggcgacgccagcagacgccgaaggccgtcgttcgtgatgcggatttcctgaacaaaccgcgtcagttcggcgctcagttccggcacgttggcatccgcgacggtccgctccagcgaggccagcaaacgctgcgtcgcgtcgttgatgcccgctacgtcgagggcctggaccttctcccgtgtttccgccagcaggctcgtggcttcctcgctgatccgggccagattcgcatcccccaccgccctctcggcggccaccagggtccgctcgaaagaatccaccagcccttcgaaatcaatctcctccagccgggtgaaaatcttttcgagcgagtctttcaacgtcgtgatctcactgggcgccgacggcatgtaggtgtacaccggcgtccacggcacctcgaggatcgggaagcgattcggatcgagatagtcggcctccaggtagccctggcccgtcaggatattcgaattgacgcgaacgcgcaggccgcgagcaatcatcttttgaagcatggcaccggccttttcgacgccgagttcgggcatcgtctctcgcggcaccgcgtagacgacgcggacgataggctggaagacggacaatcgtccgctgtccggcgggatcgcatacacactgccggcgaatgtgatggtctcgacctgaccgatgcgcacaccacgaaactctaccggtgacccgaccgtcagccctgtgatggactcgtcgaaataggtctcgaatctcagcttgtccttcgcaaacacgccggaaccgaacaggatcacggccgtcagcagcaaggccgttgcgagaatcacaaagacgccgatcttgaagtagcttggtttccttcccatcaggccgatccgtcccaatctctctgttgaccggttccaaacatgcctacctcctgattcctgcagccgacgactctcgatggaagaactgccgcacccacggatcgtcgctgcggtcacgaagctcttcgggcgagcccctggcaacgatcgtctgccgttccttgtcgagcatgattacatggtcggcgaccgcgaagatgctcgccagctcatgcgtcacgataacgaacgtgatcttcagggtctgcgacagttcgacaatcaggtcgtcgagctgcgccgcagtgatcgggtccagtccggccgaaggttcgtccagaaacagaatcttcgggtccagggccagcgcccgcgcaatggccgccctcttgcgcatgccgccgctgagttcggagggcagtcgatcgccggcgtcctgaagcccgaccaccttcatcttcatccgggcgatcgtctgcatggcctgtcgcggcaggctcgtgaactcttccaggaccaggcagatgttctcgatcaggctcatggagccgaacagcgcgccgttctggtacgccacaccgatccggcccagcagcgcacgccgctcctcgccttcggcggtgacgatatcggtcccgtcgatgaggatgcgccccgtcagcggccgatgcagtccgatcatgtgcttgagcagcgtgctcttgccgcagccggaaccgcccaggatacagaagacctcgccggcgcccacctcgaaggtcacgtccttcaggacgatgtgatgatcgtagcccacggtcacgtcgctgacctgaatgatcggcggtgcgtcggaccccatcgtcatacccccaagtagtagtacagcacggcgaacacgccgtcagcaaccacgatggcgacgatgccgctgacgacggcgcgggtcgccgaatcgccgacggcgctggggctgttgcccgtctgcaaaccgcgcagacacccaatgccggcgatcagagcgccgaatacaaaggtcttgaccagcccgccgaacaggtcgcccaggctggcggcctcctgaatctggtcgatgtaagccgccacagggaaaccgaacgatcgcatgaccagcccgcagccgatcagaccgaacagctcgttgaacagtgtcagcagcggcatcacgcagatcgcggcaaccagccggggcaaggccaggaactgaacggggtccacgcccatcgtcaccagcgcatcgacctcctcgttgaccttcatcgtgcccaattcggccgcaaaggctgatccgctgcggctggtcaggatgaacgcagtgattaaaggtcccagctcgcgaaacagcaccagcacaacgaggtcggccacgtagatctcggcgccgaacttgcgcataccgatggccgactgaaaggccaggatcagcccgatcagaaaacccatcaatgcgacgattccgaccgcattggctcccgccttctcggcgatcaggaatgtatcggcccagcgcagacgacgcgggcgaaccagaacactcagcaggcggacgaaaatctcccccaggaaagcgacctgcgtgtgaaagcccacaagggatccatgcgagatctcaccgacacgatggatcgcgcggaccagccacggcggcgctggcttaggcggcgcgggcgggcccggatcgaaccgcctcatcagttcggtcagatcgtcccgcaggccctgaatccgaaaacctcgctgccgctgctcctgtccagccttcaattcgagcagaagggccatgcccgccgtatccaagctttccacacctccggcatcgacttcgatggcggaagggtcacactgcgccaccttctgcataacctggggccagaaccgctgtgcgtcggcggcgttcaacgtcccctttaggacaagacgcaatccgcgttcttcaaattgctcgtagtccagacttgccgcacccgaatctaccacagctttccttgcccagaacccttcttcccatccatgttccaacgcgcccaggcggcgccgcactctcacggcccgcgcggcgagcccacttacatacatagctcccacggagcagccgcgaggacctctaactataccgtcgccccagggccgaggcaagttccataaacggctctggtctgagtacttggacgtgggacccatcggcaagctgccgctggcccctgcgacgagatcgaatgcggcaagcggcagaacaagaggggaaatcggggagacaggatttgaacccgattcgtggggtaacagaatcaccacaggaccgctccaattcctgcacagaatgcgaccgaaagccatttgaaggggatttcgagggacagactcttgcacttcccgaacagcgaaatgatactcccgaacacagaataggtgcgcatttggtgcgcgagattgcgtcgggtgaccccgacttggctcagatcgtggcggcctggccggacctgccggaggatgtgaagcggaagatcctgcacctggtcaggagccacaggccgacccctgaggcgcctgcatagaacgtaaccctgtgccggccgggcctctcgtgcgagcagccggcggcgcggaaccccttttgacggaggctgagcgatggaaagtgaacgagacacgatgaccccgcagaggcagccgaaagacctgatcgcgacgtggctggagcagcggccgctggagacgatgctggccgtgagcctgtcctgggccctgtcggacggcgaccacggcgacccggacttgctcaatgctgtgctcgacaagtaccacgaggccctgatggaggcggccaagcagggcgctgcggagctggacgaggaaagcaggatgatgctcggggcatggatggcggcggaggcactgacgggcgagtaagaaggtatcccggggatgtgccgttccctggctctcggagccaagaagtctcgcgcccgggcgcgcgaggaggcaacgggaaaagacaacacgttttgtcgtgtttcggtcccggcccggcaacgggcttcacgattgcggcccggaccccaccggggggagcccccccggcacccccggccccacagtactatctctcgctcttgcggtgcggatctggtaatgcgcggacggtttgtgaatcgctgtggttgacgaacggcccgagatcgggcctcagagaggagccaacatgccaagagacgaatggaagaatctggacggtcaacgaatgaggttccgtgccatcttcgagcggtatggccagaagagtgcctatcgaggagcgcccctcaagacgcttttgtttcgtgaggtgtgccctgtggatgggggcgtccgtgtgaccgatcatctctggttcacggagacgaaggggttccgggccctgggcgtgctgcaccagggggactgcgtggagttcgatgctcgtgtgacgacctaccggaagggctactacgggcgccgggaagatgtgtacaagccgagcggccaagactggcgtttgagcttccctacgagaatcaggcgaaaccctgcgctggacaggcctgtacccgagcccccgtccaagccccacgaggacgctgccgcgagcagaagccaacccgaccaaagaccgggggccttcccacgcgcggagcttctgattccgccggcgtggcgcgaggccgccagccgatgcgtcggaatcggggcactgcgggtgtttggctggctctgtgaatggacggacggcggaagacaaccgtgtgaagcgccgatcatgaggctggctcggctctgcgcaccaccggagcaagggatgctacgcacaaaggccatcaaacgccatcttcgaaagctgagcgaagcaggcatgattagccgggtccggcgccagggagggaaacgcccccagtggtacgtccggccgcccgagatgtggaatcaggccggcgatgccgccgacgagagccagtgacatcagcaaagacgacggacatggggcatcggccccttttgacggaacggccgaaggagatccaacagcatgacggacagagatgtgccaagacgttttcagaggctctaccggctggccatgaccggacgcagccaaagtgctgccatccggtcgttgtgtctggagtgcatggcttacgtggcgaacgcggttcgggactgcaccgacacgggctgccccttgttcgcctacagactgacggggcgcaagacgcccacggccgtcgagacgactcacagcgtcgccccaactcgaatacgtgtgcgattcgcgacggaattagccacgatctggcccggacccgacccaagggccgtctctgtgaattggaacgcccagaaggcccgtggcgagctctgtgggcctctgtggagcgggtcccatgcggtacggtatgtttcgcacggggcgggttggttctgcgaagggcaaggcaaggtaggattcacaggcggcggtcgggccaggacgccggcgaaaggatggtggcttcatgcgtgaggtcagtttcgacaaggacagagcggaggcattgatggcggccaaagggcgccgccagccgctcgtgggggaagggcgggatctattcctgctggcgggcgggctgaaaggggtggcgtccccgccgcagggagagcacatcgaccacctggaactcgaagtcgaacaaggctgccaggacctgctcgccagcgtgatgtttgtgagcacctgggtgctcgatctgcggaccgatgagtacgatgagcacttcaaggcgaaggtggcggccgagatcgagctgacgcagaagccccgatacttggtccgggacctgtggtgattccgtccgtttggcccggaggcgggctgacgcccagcggcgtatggtggacgggtcccctacgacgcggggtgtcttgacaaatgctgccccacggagatcagatggccaaattgccccggatgagggaatcctcatccctcacagcatccagaggcaacctgtgtgtcgacgtgccgttcgaggacatgcagaatggagtgacgggctttacgcaggccgagtgggaagtcgaattgcggctgtgcgaggatacgaacaactccccggttcacccccacgtgcgtggggacaatccgcggagccctcccagtccatgttcatctggcggttcacccccacgtgcgtggggacaatgtctcgccgccgggagcacggcggcggcggtcggttcacccccacgtgcgtggggacaatccgtgtgcgacgttctcgtcggccgggatcaccggttcacccccacgtgcgtggggagaattttgtggtgattgcttggagaagctggctgagcggttcacccccacgtgcgtggggacaatcaaatctccccttatggccgcccggcccacaccggttcacccccacgtgcgtggggacaatgaccgaaaactcccatccagcacactcagcacgcggttcacccccacgtgcgtggggacaatagatacggagcacccacaggcagagaaaccgtcggttcacccccacgtgcgtggggacaatctgtggatcgggcgggtaataacagtcgtggacggttcacccccacgtgcgtggggacaatagcagtcgccgtgtgtacatcgcttgcagtgccggttcacccccacgtgcgtggggacaatctgtgtctgcattaaaagaagtattgccatatcggttcacccccacgtgcgtggggacaataccacggcattgtatgccgggactgggcagacctcaagatgttgatacctggctcggcctacgcttgtctttgtaagccaccaaggcaatgccctcgaagtcttgcagttggcgagacgattcgccttcggaccggaagctgtagccctgcgggctggaatcagaccatatctgaaggacgtagccgcccttgcgcttcttcagggcgttctgccacagcttatcccgtattctggccgtcggacttccaaggaaaaccccagccttgggctcgatcagccagcgagatagctcgcccctcaagctcatcggcacgttctccaacatcatcacgagcatcgagcacctccgcaatatcaggcaagatacgccgtatcagcttggcctgtttgaacatgtctcgacaggccagtcgggttcgtctttcaacgtcgtccttggagccggatacggtctggaacgccagcggaatcgtgatctccgtcttgtacaggtcggccacatcgtagacgaagctcagcaccttgcctgtgtggatgaagccgatggcggggctgtaaccggcggacagaatcgcggcgtggcacaagctgtagaggcaagaattggcagacgacagcgcccgattcagcgggtcggcggtgtaccaactgctctgatcgtagtcgcgcccttcccacttcacgccgcaggttgccgccatttgctcgtaggtcttgcggacccgcgccccttccatccccctgagctgctggatggtcacatccgccgagactggagacgggaatcgcttcaggtacatccggcgtgcgacgagttcccgctgctgcggagaggcatacaattcggcctgccggagcagtcggtgggcgctgtgcgttcctcccgtgccgaaggcgtacatcttgacgccctcctcaccgacgaagcacatcaggcagttgttggccgccagcgccttggctgcttgctgggtgatcgacgtgcccggccccagcatgaccagggacaactggtctatcggaatgagcgttcgtccttcgccctgacgaaagaccaggccttctttgtccttgtccaggccgccgcgctccaggtagaggtgcgtccagcggtcctcgaacttcggcagttcgtgcagatcagccataggttctcctaagcgcgggcaatgcttagcagacccatccccagtcccttggccgggccaatgccagagcagagcgtctgaaaaaacttctgcgtatccgtcatttccagaatcccttcgtactggacagcaaagatcgcgattcgatgggcagatacgccatccgcattacacccatcggctattcgaccgggaaactctacctgaccggcgcgatggacaagagcccgaaaccgaacgccttggctggaccgattccgcattcgagcaactgcttcagcaccttcagattacctacccggaagctcccctcaaacagtacggaccaccactgcatgcgctggctgggctgcggttcgtgctttgaacgccatccgtaagcccaaccggtgacgaagttctccaaacagaccggggaatccgccgcatctcccaacttgcctttcaaccagtcggcgtgatcgaccagcgtcgggcaaatgcgtttgcggctgccgttcggcgatccgtcctgcactttccgcgttggattggcgcgcaggcggaaacgcaccagatcgccgggagcgattcgatgattctcctttgggctgccaattacaaacacatcgtcattctcaaggctcatggtgatccttctggtctgtggtggcgcggccaacaagaatccggcattgccaatcgggcgtccgccatcatccacggcatcttcattcaacccgaaggcatagtgccaatccggcggctcgttccccgccgactggacgatgatgaggggtcgtcggacgccccggctgtgatcgacagggtaatcgatgcggaagaggaatccggcctgatcgctacgggaatggtgcacgtccgctgtatccggctccccgggcaagttacgcagatggtccagtcctgtgccgctgtagggtgcgcagtacgctgcaaggcgttccttatgtgacaccgggaccttcgacggaaaggccatacacaagcgctggtgaactcgatacagatttcgcagccagcgccgggtgatgctccaatccgggcggtcagggttgtcaccaacattgatgagcaggtgggagtggtacatgattcagatatcctcttcttccaaagcctcgcggcgaatcttctcgggagcactgcgcagtgctcgccgccgggtttcctcgctgcggaaacggataatgtcggcgcgggtccggagaatgtcatcgcgccaccgcacgtcgcacgggtcaatccggtccaggcccatgcccatgccgtactcgatcatggtcacggcatcgtggcagagccggcagagagaccgcaggtcttcctgtgcctcattgcccccggcgcggcgataggtcacgtgctggacagtcgtggccggcgacttgcagaagacgcagaggccctgatcggattgtagacgctcagcacgatgcttcttgtactggtcgttattgtagtccgcgcggggacgaggtggtggcggcgtatgctgctggagcgcatcgccgaccgtgaccgtgacctgacctcgtcttaccaatcgcggatgatgcaccggcgggtcgaacgaaaagggtgtgtcgtaccagacctcggcgtcaggcggagctgtatccttgtcatttcttctgcgccactcgatcaggcagggcaactcaatgttctcgtagcgtttcccatgctgatcgcgcggggcatcgtcggcatatcgcggatgccacggcattatctggagcgcagcctcgatatcaccatcgaccgccattgggttggtccatgtctcatccttgcgcggctgggcgaataccggcatggacggtggacacgacttgcgaccgaggtacaacggccacttcggggatcgcaacgcttctgcgaccgtggcgatcaatatcgcatcgccctgcaaagcgaccagaaaactggcatcagccagatattccagtcgtttgatgaccgtaccctgcgcaccggtcttgagcccacctgccgctgtcgtcaagccaatacccgccccaacggtgtgatagtcccaccagcgagcgccgggccggtcgatccgtacacccatcgtaagcgtgttcaaggctggaagcttctcgcgcgcccccggtcgcgataaacccatggcgcagcaaatcagccccagcacacccgatttcgtcggcgagtccatgcttcgacgaatcacaaacttggatgtatcaccccacgcctggagcgggccttcgaaacgcaggaagatcgtccgagagtctgtcatagtctccctcccgccggcgccgtgcttcttttgccgacctcctccatgatagcggtcacgaagtccgggaactttccgaattccttcttctcgtccacaacggactgctcttgctcaggctccctcttgcttttgtcgatccatgtcaggcgatggcgtgagctcggggaaaaccagaagcgttcagccgagagggcatagccgtcgatgagatcatgtgcatactggccaaggcgcgcgatgctctcgccgatcagacctcgcacagacttctccggaaccgggtcggcaaaggcatttgcataacttacaggggtggcggtctcggccttgacctcaaccaagatgccgtcagggtagttgaacgcgccgtatgcgtgttgctttccagaggggttcgcctttgcggcgccttcgaggaagcacctgacggtcgtcgtggcaagctccacatcgccgccaagattcttgagcagctgctcccagtcgatgcagaaatgcttgtagaagcaggccgaattgaacatcgcctcgctgacgtgtcccgcccccgcgtcctggccgggaatgtcgtctgctgccgtgaagtaatccacctcgtttacgaccgcgtgagtggagatggcgtgtgctgcggacagtgcagcttcgacggtaaatttgcccttcagaccttcgaacgggcccttcgcatcaaactccgtcatgcgtccgcacaaggcgatgtccggcgtcttgacgaacttgccgatgacttcggcgaacttcttacctaaatcaccgttaccggcgctcacggcgacccccatttctttgatggctgatcgaggcaggaagaagaggatgtcaaaagtgttctcatccttcaggccgacaccgccctctttgaagacttcccggacggctttgaggtgttcttctttgggctcgttgccatcacggccggccgctttcgcaatctcctcaatcagtcggcgcgtgcgaaccccgccgtctttctccagtgccgctgcgaattccgggctgcgtcggatgcttcgtttgaggcattggctggaaatgcgcgcgcgggtgacgccgccgaagatgcacgtcttgggggcacccagatcgtcccggttgaggttcgacggactgtggttctgaatcatgtggatttcaatcagcatagtcgcctccttgtggttgaacagttgcgttcaggtactcgcacgcccacaggtcctgcggcgtgcggtgagtttcacggcaacgagcgagccgttggtgagcattcaaccggctcttctgccatgtgtcgtccatgttgaactccctgtcccagagcgacaggtcgtcgagcagcagcgcccagtcgatgccggtcacagtctccgcgtggaccacacgacccgcaactgccttggcaacctcgcgcaagccccactgtagtcgtggttcgatgtcagaaaggcttgagcaaatcacggcgtcgaatcgccggcgaaaggtattgcgggcgcggtaatccggcggatcgcacggttcgcatctgccaagcaccgccgggagtgataccccaacatccgattcaggccgaacatacggaaccgaggatgcacaatacagcttggcgatgagccatgagatttcacgccgcggagttcgcgcatttgtcgcacgcagcggccaccacaggccggtgaacagatcaaatcccgaaagcgtcttgtccagcggctggcccgccagccaacgcaggcgagaacgatcgccttctttgagattctccagtctgttgatgaattcaatggtcggggtcatagcgtagctcccttcttgcgacacgcgcctgacttccttgctcttgtcttcttgttgatgagcttctcaagttcggcgtacgcctcggtcatcgccacgcggcgctgaaacgaagaaccgcgagcagtggacgcaatgatcttctgtacgaccggcttgaacgttgagcggaggaagtccctgtcatcgcccgcgacattgcttttgtccaagatggcgcggattcggtcttctgtttctggtgcgagcaacgccaaggcagcgcggatttcaggatgctcgcgtttatgattcggtgtgagctgcttcaacaggtctagcaattcgtcgccaacatcgcctgaaagacgcacctgtgactcggcagacgtatcgggaatggaaagcgtcgttgcgtcttgatacacaaactggttgaccacggggcctatcgcaatgcgcttgcgtccctgctttcctgcggcggcacgaaacgccgacctccagaacctggcgtgcgcttcggcatcggcttccaagcggggaagcgcaagcgcctcattcttcgacaccagaagctggggatccgatccccagaacttcttctgccggaggtcttcttgtccgattgccgcttcttcctttttgttcggcttcttaacgaggtcctggaacatcttctcgtttgtcttcaagacatcatcaagggcgttcgctatcgattccgcgagttgttctcttggtaagcctgcgtcaagtgttcctcgcagtttgtcactgcatgccttctgcaactcggccagtctgcagttgaggatgatccacgcggctttcacctccttctttgtcttggaatcctttgcattatgccccaggttcttgagatgttgctccacgcgtttggcgaacgcctgactttccgttagaggtgttgcccagcccgcagcaaacgcgagcgttgacctgccctacggatggtgggcgcggggcgagcttgatagactgggctgccatagacacgaaaggaactatctatggcagacaagagtacacgaccgaaacgctacagtgaggagttccggctccaggccgccaagctcatcgtcgagggcgggaccacctaccaccaggcctcgcagcaactgggcgtcagcgactgggccctgcggtgctgggtcaaggccttccgcgctaacggccacctgccgcccaaagggcagatggtcccgttggccgaagaactcaaagcggcccggcgggaattggcccaactgcgtctggagaacgaaatcttaaaaaaagcggcggcgtacttcgccaaggagtccctgtgaggtacgcctggatccacacgcaacgggactgctatccgctgaacctcctgtgccgggtcttgcaggtctcgcggagcggctattatgcctggtgtcggcgtccgccctcggcgagggcgcagcggcggcaggagattgcccgggcggcccaacgctcgcacggcgattcgcacgggacctatggttaccggcgggtgcaccgcgacctgatcgaagaccaccaggtcgcctgctgccgggagaccgttcgtcacgtgatgggcgatctgggcctttgtggccggcataaacggcgtttcgtcaagacgaccgactcgaatcacgacgagccgatcgcgacgaatcggctgcaacgcgacttcgccgccacgcgtccgaatcagaagtggctggcggatatcacgtatattcgtctggtcgagggctggctgtacctggcggtggtcctggattgcttctcgcggcggatcgtgggctggagcctgagccggaccatcgatgcgtccctggtctgtgcggcgttggagatggcgttgcgtcggcgttgtccgcaagacgacctggtccatcactcggaccgcggcgttcagtacgcctcgcaggcgttccgcgatttgttgacacgcgagggtctgacgatgagcatgtcacgcaagggcgacccgtgggacaatgcgatgatggagagcttcttcgggtccctcaagaccgagtggatcgacagcgattacgccacggaagaacaagcccgcagggaggtgttcaaatacatcgagatgttctataatccgacccgacgtcacagtgccctgggctatctcagtccggccgaatacgagcgtcggtatgaagccggaccgttgacccctatggacgaggcagcctagccgttagcggttcccgcgcccaccgtccgtagggcaggtcacgtcttgattaggccgcgatgatcgccacagttcgcgcacacccccttctcagcagcgtcaccaagccataacctgcgaggcctccatgcaagaactgtcgccgtttcgaggggcaaggaaggcggcgaatccgacaaccagggcggttccgacgtttggtgtgcgttgtccggaagacttgcggcaagcgtctgcgccagattgtcgccagcgacgattgcatagaccgctgatcccggattcacggatgccggataatatcgattggccgaggcccagaccgagaaccggaggatacccgttgcacagcaggccgggcagaatccataggaaccgtgcagcacatggcgtgtgtgatttactgaatcggctcctggaaactcgacgagcaaatcgccgatgggacgaaaatcgttgtcgtccagcgatgtcggataaggctttttcggagctttctgggatcctgccttctttctctgttcgtcccattccttttgcttggctttcaatagctcggcgagaatggtcttgtcctgatagaaccgctcgccatcgccaagtagattgaacttcttcttatgctcggccagtttgttcagccactctggcggaatcccatccgctctaccttcgagcagtgtgcggtcattctctgtcagttcgcctttgcaccatatcagcaccgccaggaggaaccgcagcagggccacgttgtccatcgggttgctggccgcgatttgcctgatttgaccggcctcttccagggcattacgaattccgacgcggtcgtacctcccatcgcgatagagaaccggaatccagtgttcgtccaacagattgtaattcgctgtcatctcgccctcatttcaatggtccccacgggatcggcactccgaccgcactccgtccccgtggggtgtctgccaatctgcggccagtcttccggcctgtcggcggccatgagtctggccgtgaaaatggcaacgcccgcacgtgtcttcagctccgggaatatcgcaccaaagccgaaaccattcgcactgaacgccgcaaaagtacattccctcagcccgcctccgtcttccttatcgtcacgaatccggcccccgataagtcccaaatcgaaaaacttttccctccgacacacttcgcccatcgcgacccccccgcctgcgtgcacaagcgccgcgccctcgcccatgatggggcggatgtggacgcgaaaattggcaaaaaaaagacccccggcggacctgggtggggcagaggaagagagggtgcaggtgtgggggttgttagggtggtgtttggtggtacaatagggagagcccgtgaataggagaacaacatgaaccgcaggaacgaaggcgtggtggccgagattttggacgcctgtgacgaggagttcggggcccagtttcgccgggaggcggaagccttggccgatgacatggtcgcgaactgcgagacggacagcccgcacacgccggtcgagggtcttcggctgatgcggaaggcctacgcggaggtggcggcgagacaccgggccaaggagaaggccgtccccaccgacagcggcccacgcggactgagtgtgacggatctcgatgactcggatgagttcaggtccggcacactggaccaggttgtcgcggacgtcgcgcgcaagcggcgggccggcacgtggaggcccggagttttcgacagcgagccctgagggatgttaggcgatgatgtttgaccatgacggtttgttggaacggctgccggcggcgcgcgtgaaggcgctgatcgaacgatggaagtaccggatggagatggaggagctggtccggccgcacgcgaccgacatgaacgccgccatgcgccccgtggaccacgtgatgtcgctgctgcatggaggcgcgaattgagagggaggagatcggttatgaccaagaaaacgtccaaggccaaggccaaaaaaacgtccggagccaagaaatcgtccaaggccaaggaaacgtggggcgccaacaagctcccgatggaggagttttttcttctgtgtcagttgcgactggcgggccaactgcacgacggccaggagttgtacaaggccttggtcaagtggggacgcaagcgggggctcgatatggagaaggtgcttgaggcctacaacgaatggcgggtcgagatccgcaagaagtacccgaacggcatcctgacgggcggctggccggagggcttctgatggcgcctctcggaccctggaaatggacgcccgaagtcctggagcaactggctcgggatttactggaatgggcccaggaccccaacgtcctcttcctcaaggagttttgctgcgaacacaacatccccagcgcgtatattgcgcaactgtcggcgagaagcccggtgttcgccgaggccgtggatcgcgtgaacgacatcctcgaagtccgcgttttgcgcggcggactcgaaggaaaactggaacatcacattgtcaagctcgtggcctccgcgaagtatggggtctgcgagaggaacgacctggccgtgtccgccacccccggcccgcccgtcctcgacagcatcgaggcctgcgacaaggccatcgctcaggcgcaggcgacgaaggccatgtttttggagatgatcgcccaggccaacgcactgcccagtgccgtcatagacgggtaatttactaaagcgtttcgcgcgggctcctgccttggttacaccgctcacaccacttgacgaaccgccggtgttaccccatactggccggcgatggaacggatagtcacaccagttgccgcaattatcgctgcccgggtcggccaggccgaaaggctggcctcgcgactatcggcgacatcagcccgggcgtttttttcctggagggggtaacgtggactaccatcgcagactcgtggatctgttgaaggacttgcgggcggcgcgggcgagaaacgacgggccggcggtcgagggagcttatgcgaaactcgccacgcacgcgaagtcaccggggatgctggtccatttcctgcacggctgccgaaaagaatggggggccaacctggagatggatgaggtagtcacttggctggcaggtgagtacaggagcggggtacgcacgctgtgtccagcggcttgggaccatctgagcacggatcgtgtgtttgccgagttggagagatggctggagcgggccggcgaggcggcgccgaaaaccacttgttcggcgacgcactcacccgactttcgctcggtatattggtatggacagacctacacgttcacgcccagtcaggctgcttgcgtgaaggtgttgtgggagtcatgggagaggaagtgtcccgacgtcggtgacgccaccctgcttgaagcggcggagtgcgacacaaagcgactcgaccatcttttcagggaccatcgggcctggggcgccatgattgtcaagggcagaggcaaaggaacgcatcgtctacgggagttgcctgcgaagaggtagacgcgagccccgaaaaaaatcttcacttctcaaattttacacaggtacatgcacaggtagcgcacatccctcctgctatgctcgtggtatgacgaaacacgatgaactactgaatgtgcatggcgttgcccgtgtgttccggctcccggttgcatgggtgcaggccgaggcggatcggggagcattgccgtgcctacgcgtcggccggcgacgcctcttcagtctcgccgccgtgcgggccgcgcttgtgaagcgagctgccgaacggaaggaggtcgcgccgacatgatcccccatgcgcacaaaaaaggccgggcttgcggggcgccggccaggagcaggactacgccacgaggctaccacttcccccccgacgagtcaaccccccgccctcaaaacgccctgcgctgcgatcggacggcgcccgccgtattggcggcacgccaacaggaggctcgcccgtgagcaaggccaagaatactccacccctttgggtgctcgccctgcatgccacggagatgtcggccgtagagttccgcgtttggatgtacctttggtggcgccagggcaagaacaattcaggatggccgtcacaagcgatgatcgccgccgatctggggctgacggtggaaagcgtgcgccggatcacgaagcggcttcgcgtgaccggatggctcctggttgagtggtcgaaggggccgggacggggcaaggagcaccgcaagcagtacaccgtgacacagcctccgaaaaccccaaccagtattggggtttcaatacatgagaaaacccaaccggcgattggggttttggcgacagaaaaccccaccagccgtaccgcgaaaaccccaccggccgtaccaaccaaaaaagtcggtataagaaggaagaacacgtacaagaacacgttcatggcgaatcaggggaaaaaggtagcatacgactgggctggatttgcattcgtcggcatctctaaagacctcgtccgccagtggtccgaagcctaccctttaatcgacgctcgggccgagattctcaaggcagcagcatggtgtcgaaccaacgaacgaaaagccaggaagcgaattgattggatgcgatttctggggggttggatggcgcgagcacaggctcgggccgaggtgcccgggcagagtacggctcaagggcagcaatggtccgaccccgacgacattccgctcgatgctttcagggctggggtagaggcgatagggggcgcatcatgacgcaagtcgatgccgaacgtcggagcaggcccgcgctgatcaccgcgctgaaggcggccggcgcaagcgtagagggcgaaggggggaaggtaaagatctggtgcccgttctgcatcgacatttccggaagcgtcgtcgtctacgcggctcgcgatggcatcgtccgatttaagtgccggcggtgcggcgccggtggtgacctccatgagttgcaggagcgagtgaaccgagaaatatggggaccatactgggttggcggtgagccatcgcctgcccggcccgttgcggtggcggacccggcatctgagttgggcgcccagatcgaggatcagatcgccgggaggtttgtcaacatagcgtggccgtggccttggctcaccggcctggtccaaggcctgacgcctggctcgcgacttggacttgtcggtgccggcggtgcctccaagagcttcgctattacccagtcacttgccgtttggatcgaacgggggatcaaagtcgccgtcctggagcttgagcgcagccggagcttccatctcaaccggatactggcgcagcgtacaaatatcgccgatctgacgcggagcgactgggttcgagaacatccagacaccgttcgtcgcctattcgcggagcatcgtgagttcctcaatcatatcggggaatcgatctacaccgtcccaaaccagttcaccatctcacagggcgccgaatgggtcgagcaacgagcggcccaggggttccggatcatcataatcgacccgacgacggccttgatgcgccagggcgatccgtgggtcgaggacgagaagtttctgtcccgcgtggagcaagcggtcaggatgtcgggcgcttcgttgatcgttgtcacgcaccccaaaaagggcggtggtcgcctgcccgatctcgacaacgttgcggggggggccgcgtgggcacggtcgctcgacagcgtcatctggctcgaaagccacgatgccaaagtctctcgggtcaagacgccgtgcggaacggacgaacggacgcacaaccggaccatgtacctcctgaaaacgaggtctagcgaaggcgagaacatgcggctggcatatcatttcgaaaatggaaaagagccaggagacactggcgctttgacgctccacgaactgggggtcattttgaggagcaaaaaacgcgatgactgagatccaacgactgatcgaactggccctccatcgcctgtgggtggccgaagtgtccgtctacaacaatgaaatttgcttcaacatcgcgagcctcgacgagtccctcaaatcgacatgtcggctctccgcaaagggccggccagtgacgtgggcgccgttcgcgctgtgcgcgagcccggaagacgccaataccgcgtgcgacatcctgcttgaaaatatccgccgcattgcaaaggagaacgggcgacgggcgccacacacaaccgaagaaaaactggcccgcctgatgcggagggccgcttggcgatacacccagaagcagaaaaacgaaccggcgcttgtcggcgccggcgacgaagaacgttgggaacactaaacaaaaggagaaatggacatggacaagcgagaattgttgacatcgacccaactggcggcccggcacggactcgaccgcgaccggatggaattcttactccacgagttgggcctgcgccacgaggccgacgacgggaccacaacatacgacgcgtcagaagtcgaacgacggttcgccgcgcgggacgaagccctcatgcgcgcggcggccgagttgctcgattttgtcccggacatccggacggcagtggagatcctccaccgggcctttttcgagctgcgtctggcgtggctacaaagccgcgcggcgggtgatgtcatcgacattctgcgccgtcagattgctacgcgccttccttcgctccacgccatccagcgcgcccgggccggggccggcgacgtgacggagctggaggtgctccgttgctttgaacacgccatcatcaccggtctgcgcgaacggcgaggacagcggccacccggccggacaaaacaaggagccaagtcgtgaccaacgaaacaggaatcatccgcgatcttggcgacctgtcgccagatacattactcagcgaaaaaacgctggccgcaatgttcggccggcatcgcgtgagcatcaaacgcgccgtcgagcggggcgagctacccccgagcgttcggctgttcggtgaaccgacttggactgtgcgggccttgcgggagcacatcagcagacggctggaggccgccaggaaggaagccgagcacttgcaacgaagaatctctcaaatcagcgcttgacttaattcgattacgtaaagtataatgctatcatggccaacagaaaaaagaaaatgggcaggccgccgaagaaggccagcgagcgactttccgagatcgtcacccttcgaatgacgcgcgccgagcacaaaacactcatggaggacgcgcgcaggagcggtttgtccgtctcggcttatcttcaggcatgttggcaaaaagtgaggcagtagcatggccggagtgaggcacaagccaagcacaagcggtcgataccaggggtttttcatcgaccagacggggaagaaaaaatacttcacgggcacaacaaagcggtccgaaaccctccgcatcgcgaggaagctggaggacgaccatcgacagatccggctcggctatcgcgagccgtcgcaaacacacttgaagcacaggggtcgcccgttcatggaggccgtggccgaatacctcgcttggggacgggcgcagggtgggcacaaaggcagggcatgggcaacgaaacacgcctactacaagtcccgtcacttgacctcatgggcccagacattggaactaaaaacgttgggcgacttggacggcctgctgccacgtgttgaagcaacgatccgcgaactggccgcccgaggcaaaacgggcaaaacaattggcaatctcgtcgaggcccttcgcagcttgtgcaattggctcgtcattcgcggctatttacaggacaacccactggccaaattgagcaagatcgacacgacaccacgatcccagtatcgcgctttgagcctggacgagacacaacgcctcttgaaggtagcggcgccgcacctgaagattctctacgtcatcgcaatggtgaccgggcttcgcgccggggaactccgatctctgacccggcggcacctggataccgtcaacatgggcctgaaactggaccccgcctggaccaagaaccgcaaggccggttttcagccactgccgcaccgccttgtgaaagagctcgaaaccttcgcgggaagcggcctcgtgccaagcctctacgctcagttttttcgccagtacctgtgccctcccgacgccctgctgtatgtgccctcccatccagccagggaactggacaaagacctgattcgggcgggaataccgaagaagaccgccgaggggaagattgccttccacgccctgcgcacggcgttcgtcacatttacatacgaggcaggagccacgcaccgggaggcccaagaactggcccgccacagtaccccccacctgaccgcgaacatctatggtcgcgctcgcaatgatcgcctcgcgggcatcaccgagaaggtggccgacgcggtgctttcgggtaatttaggtgcgaatatggtgcatcaactgcaatcgaatgtcacgcctgcccttcataaacccttgctgtcaaatggtcttacgggggacgaggggaaatcggggagacaggatttgaacctgcgacctctgcgtcccgaacgcagcgctctaagccaagctgagctactccccggtcgtcgaaacatgcagtatagcacgcgtcgcgaaggattgcaagctataacaagtcgaccgggtcgatgtcaacagcaattttcaccgccggacggatcggtggggcgctccgcaggctggtaaacagctttcccatgatcgcggcggtcggcgcctggattacgatctgcaggcgatgaaaccgctgaatccgactgatgaccgcgggcatcgggccgcggaccttcgcctgaaggccgtggtgggcgatgatctcatcgatccgcacacgcatcttatgggcggcggtttcgagccggtcgtacgtctcgtcacgcatcacaatcgtcgccaaacgccacagcggaggcagcgtgcagacctcgcggtgcttcatctcctcacggacgaagccctcgaaatcctgccggagggcgaactggatcgtcggctggtcgggaaaatacgtctggacgaagacggtgccatgcttctccgagcgtccggcccgcccggccacctgcgagatcaattgaaacgtccgctcgttggaccgaaagtccggtaaatacaggcacgtatcggcgctgacaacgcccaccaacgtgacgttgggaaagtgcaggcccttggcgaggatctgggtaccggccaggatatcgatgcggccctggccgaattccttcaggagccggtagtagtcctggctggccatggaatcgctgtcgacccgccgaacccgagcctgcgggaatctcgccgccaactcctcttcgagccgctgcgaacccaggccgatcatagtcatcgccttgccgcacacgggacagtcccgcgggaccagcgtctgggccagacaatggtggcagatcgcatagccgaagtccatatgccggccggtaacggttttcatgggcgcggtcgaacgcgatgtcttgtggaaggtcagcgctgcgtcgcagttgcggcattgcagcatgtatttgcaggaagggcagaagacgaagttgctgtagcctcgccggttcagcaagaggatcgcctgctccttccgcgccagcgtctcggccaggtgcgcagccagaggctggctgagcaggtcccgccggtcggcgacggcatcgcgcgcccgcatatcgaccagcttcatctcgggcatcggcaggtccatcacgcgtctgggaagacggacgagagtgaagctggacctggtgcgactgttgtgaaggctctccagcgaaggggtggcgctacccaagatgcagtgcgcgccggccagttgggcccgtttgatggccacgtcccggccgtggtagcgcggggcggtatcctgtttgtagctcggctcgtgttcctcgtcgacaaccacaatccccaagttgggcagtggcgcaaagaccgccgagcgggcaccgatcacaacatcggtctggccgtctcgaatcttctgccattggacgttgcgctggccggcggtcaggccggagtgcattacggcgatccgcgcgaaccgcgcgctgaatcgctgcaccgtctgggcggttagcgcgatctccggcagcagcacgatggccgccttgcccttccggagaaccgcctcgatcgcacggatgtacagttcggtcttgccgctgtcggtgacgccatgcaggagggtgacgccgaagcgaccggactcgatctgacgcacgatctgttcgagcccgcgctgctggtcggcattcagcacgacctcacgttcgggaagagccatcgcctcgggcaccaccggcaaggcgtgcaggaccttcttcaccgtgaccttgacgatgcccttctcagccagtcgcttgaccgcaggcgcgcggcaatcaaccgccgcaaccaattcgtccatctcgaccgccgagtcaactgtcagcgccttgcgctcgcccaggaaactgacgatccgcttctgtgtggcgctgcggagattcgccgcgatctcctcggcccgtgcgccaagatatacgcagcgctgcttcttgacgccggctgcccgcttgaccgcaccgggcaccatcgccgccagcacctggccgagcggacagacgtaatagtcgccgatccaccgcgccagctccatcaggtcggggccaagcagcggctcggcgtcgagaacgccggcgacccgcttgagacggacctgtcggcccaccctgtcgaaagccctcgcgggcacaacgtccgactcgacgcagaaaccgacctcaggtttgttgcccctgccgaacggcacctcgacacgacgtccgacttcgatgggccaaagcgcatcgggcacgaggtagtcgaattccgtgtccgccgccgaggccagggccacgcggataatgtgcgtgcacgccggctcgggcggttcctgggaggcgaacagactgggcgtcgcgtgcttccttgtcatggtgttcgactcaggactgatatcgcccctctcgtcttcgcttctcggcggtcgcgctgatgacgctggcatcgagcacgtcgagttggattcgcgcgatcagcgcccgaaggtagtccaggtgggggcacggcggtgcgtggaagttgtcgttcgtgatacacgaggacagttgcaccacgatctgctctctggtgattccttcctgcttgccgatcgtccggagcagcagcgtgagttttcgatgcagggcgcgtccacagcagccgccgcaggtcatcgagagcatccggtatgcatggtctttcggatacggcgcaaagccgccggtccgctcgtggaaggccttctcacaaaggtagcccgggcagcgttccttgacgatatgacattgcaccagaacgatgtaccgcttcgccgccaggtcgatcatatcagcttctcacaattgaaatcgctccgtcgcgagtccgcagatgtgatcgccgatggccaggcaggcggttgccgccggcgacggtgcgttcagaacgtgaatcgcgttctgcgtcgcttcgatcttgaaatcatccaccaactcgcctctggggcctaaggcctgcgcgcggatgccggcgttcccgggccgaaggtcttcgacggtcagcgagggcaccagccgttggagctgcgcgaccagccgcttcttcgagaacgtgcgggcacactcgcccagcccgtagcgccagtggcgaaggaacagacgccaggtgccccggtacgacagggcatcccatgtgtcctgaaggctgaaatccgtcttgccgtagccttccctcttaaaggagaagaccgcgctggggccgcactccacgccgccggagagcatgcgtgtgaagtgcacgcccaggaacgggaaggccggatcgggtacgggatagaccagattcctcaccttttgcgccgcttccgggctcaaatcacaatagtccccgcgaaatgggacgatcctgacgccgggatcaacacggtccatccaggcgatccggtcggattggagaccggcgcagttgacgacgtagcgcgtgctgacctgcccgcgagaggtcctgatgttcaggtagaaatcgtgcctgtcgaaggactcgacccgatagccggtgaggaccttgttctccggccggtgctcgcagatcagttcggccaactgctcggccaccgcgacgaagtcgatgatcccggcgctggggacgtgaaggcctccgatgccggcgacggatggctcgatctgcttgattcgcccgggcccgatcttctccaggccttcgaccccgttggccaggccgttctggaagattcgctccatggcgggcagctcgcgcgggtcggtggcaacgatgatcttgccgcagatgtcgtgcggaattttgtattgccgggcgaaggcgatcaattccttgcgtccggcggcgcaggtcttcgctttggcggagccgggcttgtagtagaggcccgaatggatcacgccggaattgcggccgctctggtgggtcgccagccggtcctccttctccagcaccgccagacggacctgcggatgcctctgcacaagcttgtacgccgaggccaatcctacaataccgcctccgatgatgacaatgtcgaaatccgtttccggtcgcatagccgcccgttcatggtctgccgatcacaacgccgcccacaccatacccggaccgcccccacccgtcaacgcgcaacggcggtgcagccgagcaagcggagacgagccggtgctacatggcggggacatcttcgacgtagaggtggccggtgggaccaatcttgaagacgtagatcaggccctcgcggagctgggaatagatgacgttgccgtagatggccttgatgccgtattgcgacagggcctcggggtcgtgggcgaggtcccagatgtgggaccagaataggtcgcgctggtcggcgggaagaagcttgagcaggtcggcgtagcgtttgggctcactgcccatcgtctcgatgggcaacccttcctcgggggccatcttctcgccgtagacacggcgccagatatacagggcgcgggccttgccgtccataaccatctggtccgtgaacttgacgatcagggcatcgaaatgaatgacgtccccctcgatcgtgtactccttctgaaggatcgtctgggtcttgtcctcgcggctggtctcgacgaatcgcagggtcgtcagcaggcgcccatcactctcggtgcgttgggagatcaccttggcatagccgatctgatcctcggcagtcagattggtgatggcgctcttgagctgctggttctcggtgagcagatcgtggatcgtcatcgcgcctcggaagaacccgcggccgaagaacgcggctgctcccagggccaccaggaccacgccgccggacaatacgctcagtcttctcaatgtcgtgcacctcgaatcacctgcttcgagcaggatatgcgattgacttccattgattgtctcatcggcttgtgccggtcaatctctccatttttcaggctcgataagccacctcgcggccggaaacacgtttgaagctaccatacgcccgccccggtagcaacctcaagcggcggtcattctgaggtatccgaccgcgatatccatccggatcgctatggatgcaaggcgaaccagcgtttgacagcgaagtgagaaaaccgatataatgaatattttgcagcttgttgacgatcaccaggcacgacttgagggacaactggaaaccccgtatcgtgcccttgccgcaacgactatgttagcacagaatccgctcttgaagtcaactgcgcatccatcggtccaggtcgcccacggccaggggccgtacgccaatacgcgctcggccctggcggggctggacctgtcgcccgcgcgaggcaagcgcgtgctgctcaaacccaacgtcggccgggtggcaacgccgggcgaggggatcacgacgcatccggacgtcgtcgcggccgcgatcgacgcgctggtcgaagcgggtgcggatgtggccgtcggcgaaagcccgattaccggtgtcgacgccatggaggcgttcgtcacatccggaatcgccgacgtcgcccgaaaacgcggctgcggcctgatcgacatggaccgtcgcccgcccgtcgaggtagccattgagcagggtgtggcgctccacaagctgaagctctgcgccgacgtgtgcgactacgatctggtcgtctcgatcccggtgatgaagatgcacatgcacacggtggtgacgctggcggtcaagaacatgaagggctgcctctggcggcggagcaaggtgcaactgcacatgctggggcccgtcgaaggcagcgacgagaaaccgatcgacatcgcgatcgccgacatggcgtcggtgctgcgtccgcacctggctatcatcgacggtacggtgggcatggagggtctggggcccagcgcgggcgaggccaaggcgatggatgccgtggtcgccggcgccgatgcgtttgcggccgacgcggtggcgtgccggctcatggggaccaccgccgagaccgttccccatctggcgatcggggcggcgcggggctacggcgtcatcgacctggccgcaatctccgtgacgcccgatcattgggaggactggattacaccgtttgccacgccgccggccaacctgaccatcgagtttcccaatgtcacggtcttcgacaggaactcctgcagtgcgtgtcagtccaccgtgctgttgttcctgaagggctatcgagaccagttgttcgactacttcccgtcctggcggcatctgaatatcgccatcggcaaggggaatgcgaatctgcctgaggggaccctttgtatcggcaactgtgccgcccggtccgggcaggacgggcagtacgtgcccggatgcccgccggtcaccagtgagatcctcaagactctcaccggcaagccgtccatcgacagtcgggacggacgcagtcccaaagccgaccacatggacaggccatagggcgcacagagaatcgccccggaaagagtatgcaaaatcccatcgccctacgacttggcagcctgacgctggacgttccattcttccaggcttcgctcagcgggtacagcgactacaccatgcgctcgttcgcacggcgtttcggctgtccattcgcgctggccgatgtgatgctggccaagagcatggccgagccgcgcgtcctgcggaaggcctgctttcggccgggcatcgacgagcatccggtgggcgcccagatcatgggtgaaagccctgcgatcatggccaaggccgcccgcgacctggtggcggtcgggtacgacgtgatcgatctgaatttcgcctgtccggtgcccaaggtccttcggcgcgggcggggcggcgccctgctggcccaccccagaacagtcatcgacatcgtcaagacggtccgcgagaccatcgcctgtccgctgctgatcaagcttcgcatcggcatcgatcacgacagcgcctcgcaggacgacttctgggagatcgtgacgcggtccatcgaggaaggggtggatgcgctggtcattcacgggcgcaccgtcgaacaacgctaccgtgggaaagccgactgggacaccctggctcaggtcaaggcccggttcccgtcggccaccgtcatcggcagcggcgatgtcttcgacccgcgcgcggccgtcgaacggatgaagcggacgggtctcgatgggttcgtcgtcgcccgaggcgcaatcggcaatccgtggatcttccgcgacctgcgctgcgtgtgggagaatcgcccggtcccgcccccgccggacctcgccgagcagcgggcaatcatgctcgaacacttccatcgtgtgctgaacggctatcctgagaaacgggcgatcggttatttccgcaagttcatcgtccgctacgcccgcctgcacccctgccgcaagcaggtgacgatgaccctgatgaaggcggagtcacgggccgccgtcgaggcgggaatcgatgccttgtacggcgatggccaagcctattgaggacgcaacgacattggcgtcagagaggtttcgtgtagaacagcgagccgccggcgccttcatggtattgcgcctgggcgaatcccgccgcctcgtacagacgccgcgcgcgatggttgttctcctgcacctccagggtgagtttgcagcagcgcaattgccgcgccttgtcggcgaccgcgtcgaggagctgccggccgattccccgcccccgacagtccgccaccaccgccaggtcatggatgttgagcaggggtttggcgtggaaggtcgagaatccgaggaagcagaccgcaatcccaaccgcctcaccgtcatggaaggcgaggaagatcagcgttgtggggtgccggcgcagaccgtcgatgaggttgtctcgtacctgcggcgcaagaggccggccattgcccatcggatcggcggcgtacgcatcaatcagttcgaccaccgcccgctggtgcgcgacgcaatccaaatcggcctcgacaacctccaccgtcggcatttctgcacagtcttccatcccaatcctcgcgaccatcggcctccgaacatacccggccgctgcggcgactatacccggaccgcgacggatcggcaagcgagccgcgcgattcgttgccgcccctgctcgacggggtggatttcccgattgcattcgtctgtccgtctgactaagattgccacttcttctttcgaacggcaacgaagatagagaggcaggtttatgtcggacaacgtggtacagaccgtacaggcgttgaaacggggcaccgtggaggtctacaccgagacggacctggcccagcgactggtggaggcggcccaagccggccggccgatgcggatcaaactgggactggacccgaccagcccggacattcacctgggccatacggtcgtgctccgcaagatgcgccagttccaggacatggggcacaaggcggtcctgattatcggcgactacaccgcccgggtgggcgaccccacgggccagaacaccacacggcccatgctctcgccggagcagatcgaacgaaacgcccgcacctacttcaaccaggccggacacatcctcaacacctcgcccgacaagctcgaagtccgctacaacagcgagtggctcgccaagctcaatctggccgacctgatcaagctggccagcagcatgacggtcgcccgcatgctcgaacgcgacacgtttgagctgcgctacaaggccggcgaccccatcggcattcatgagttcctctatccgctcatgcaggggtacgactcggtcatggtccgaagcgacgtcgaactgggcggcaccgaccagaccttcaacaacctcgtcggacgcgaccttcagcggctgaacaaccagccgccgcagatcgtcatcaccatgcccatcctcgtcggcctcgacggcaaggagaagatgagcaagtccaaaggcaactacgtgggcgtcaccgactcgccgaacgacatgttcggcaagatcatgagcatcagcgacgagatgatggccaactattacacgctgctgaccagccttcccgccgagcagatcgcgaccctgctcgatccgaaccagacccatccgaaagaggccaaggtcacactgggcaagacgatcgtctcgcagttctacggtcccgagctggcggagatcgcggcggcagagttcgacaaggtcttcgcgcaggggcagttgcccgacgagattcccgagttccggctgccggctgagccgatcagcatcaagcagctcctgacgacctgcaagctggtcgagaccggtggtgaagcgaaacgcatggtcatgcagggcggcgtcagcatcgacgggcagaaagttgcggaccccaacgccgcgaccacaccggccgacggcatggtcattcaggtcggcaaacgccgctttgcgaggatccgcgtttgacaacagaccgtccgttgcggaagatcaaacgaacgtcacgggagaaggaatgttgtgtcgccgtggaatgtcgaatctccgatcgcaggtggtgatatgaaacaaaacagaagagcagtcattgcattcgttctggccattgtgtcacttccggctctgagcggctgccaagcgcgatcggtccgcgcgccgaggccgcggacgcttcgcgtgttgacttataacatccatcacggcgaggcgatggacgagcagttcgactacaagcgtctggcgaaggtcatcaacgatctgtcaccggacctcgtggctctgcaggaggtcgacgacggtaccgagcgggcttccggcgtcaaccaggcggcgcttctcggcaagctctgctggatgcaccacgccttcggccaagcgatgccgcaccagggcggccgctacggtgaagccattctgtcgcggtttcccatcctcaagacgactgtgcacccccttccctactggggcgaccgcgaaccgcgagcggccctcgaggcgtggatcgagccggagggcatcggcccgctgcggttcgtcggaacgcatttgtgccatctggatgaggagatccgcacgcagcagacgatgcggctggcccagttgtttggcaccgaagatggcgcgcccgtgatcctggccggcgacttcaacgcccggcccggcagtcgcccaatgaacgttctgctcgacgccggctggaccgacgtcctcgctccccgctcgaagatcgactacatcctgatccgttccgccgactcgtggagtgtcgagcaggtgactattgtcgacgagccggttgtctccgatcacaacccggtcctcgcggtcctgcgatggcaaggcgcaggagcgtcaactgctgagaactgaagtcatggtagacgtgggccgagagttctggcaaagatcgaacctcatagagcgcattgtgcagaaggcaaacggtagagaattcggggcagcagcggctgggacggcaacgcgactgatatgcgccggcccgatcgctatgattggagaccacaggaagctgccctgagaatgcctcgatcccgcaaccacagaagccttccagagcagccggctccggaaggcttctttcgttgggaggccttcgccatccttgcgacgcaggccctatgcgtttggggttccgttgacagcggccggcgcaaaccctaagatacgcgattcgatttccgagatttcaaggaccttgacgatggcagacaagaaccagaagaactaccgcgatacgttgaacttgccgcagacaagctttgcgatgaaagccaacctcgtgcagcgcgagccccagatgcgccagcgctgggcgaaagagaacatctacacgcagattcgtgaggcccggctgggcgccccgctctacatcctgcacgacggcccaccttacgccaacggcgacatccacatgggccacgtcatcaacaaggttctcaaggacttcgtcgtcaagtacaagacgatggcgggctttgacgcgccgtacgttccgggctgggactgccacggtctgcccattgaggccaaggtaatgaccgacctgggcgagaaggtccggcagatgagcaagacggagatccgccgcgagtgcatgaagtacgccagcaagtatgtcaagctccagagccggcagtttcaggacctgggcgtgttcggcgacttcgagaacccctacctgaccttcaagccccagtacgaggcgggaatcctcgaagtctttgcaacgctggtaggcaaggggctcgtctatcgtcagctcaagccgattcactggtccgtcgggtgcgagacggcgctggcggaggcggagctggaatatagagacatcgcttcgccgagcatcttcgtcaacttcagcgccacgccggagaccaccgcccggctgatcgagctgggagtcgtcacaaacgaccaggccaaggattccgaggtcgccctgatgatctggacgaccacgccctggacgctggccgccaacctggcgatcgccgtacatccgaatctcgaatacgccgccatctcgtacgagaagcatggacgcaagtacacctcgctcgtggccaccgatcgcatcgaggcggtcgtcgtggcgggcggcctggtgcaaggtcaatacaccgtcggtcccaagacggtccgaggcagtgaactcgaagggcttcgctaccgccatcccttcatcgaggacaacccgaccgacaaggacgcttacatggtgatcctcgccgagtacgtgaccacggaggacggcacgggcctggtccacacggcgccggggcacggccaggaggactatctctcgggccaacggtacaacttggcggtgtattcacccgtcaaggacaacgggtgctacgacgagacggttcctgactggctgcggggcaagaacgtgctgaccgtggacaaggaggtcaacgagcacttggcgcaaacaggccggctgtttgcccagcgagaaatcacccacagctacccccactgttggcgcagcaaaggcccggtgatcttccgcgcgacggagcagtggttcgtgggcgtggacaaggacctgcccgacaccggccgcaacctccgcgcgatggcgatggacgcggtcgaaaaggtccgctggattcccgcgtggggccagaaacgaattgcaggcatgctcgaatcgcggcccgactggtgcatcagccgccagcgaagctggggcctgcccatccccgtcttcacgatgcccgatggccgaacgctgctgacgaaagagtccgtgatggcggtcgcccgacacattggccggcatggctccaacagttggttcaccgactcaccccgcgagattctgggagatgacttcccaatgcccgcagggttcgacctcgaccagctccgcaaggaggagaacatctttgacgtgtggttcgagtcgggctgtagctggtacagcgtcgcggtggcggccggctggccggtgccggtggacttgtacctcgaagggtccgatcagcatcgcggctggttccaactgtccctgctgccggcgctgggcgccacgggcaaacctccctttaagagcgttctgacgcacggtttcaccgtcgatgagaaaggcatgaagcagtccaaatcactgggcaactacgtcaacgcccaggacgagatcgccaagtacggcgccgacatcctgaggttgtgggtcgccagtgtcaactaccaggaggatgtgcgctgcaacgatgagctgatcggccgcacacaagacgcgtaccgcaagatccgcaacacgctgcggtacctgctgggcaacctcgacggcttcgagccagccatcgacgcgattccttacgaccacatgttcgagatcgacaagtgggccatgtgccagttgcagaagctgatcgccgacgtcaccgaagcgtacgagaacttcgtgttccatcgcgtcttctcgctgctgtacaacttctgcacggtggagatgagcagcatctacatggacgtcctcaaggaccggatgtactgcgacgccgctgacgggctgtcacgacgcagtggtcaaacggtgatgtacgagatcctcagtgcgctcgtgcggctcttggcgccgatcctggcccacaccgccgaggaggcgtgggaggccatgccgttcaagcctcaggattgcaccagcgtgcatctggcgaacctgccgacggtcgatacgagcatcgactacgccagccagcaggtccgatggcagaagatcatggcccttcgcgacaacgtcctgcgcgttctcgaaggactccggcaggacaagaccatcgccagcaaccaggaggcgtcggtgaccatgcgatgcaccgacgaagacgccggcgtgatcgaggcattcggcgtcgacgcgttcgcggcgctgtgcatcgtcagcgaggtgaggctcgaacgatccgccgaaacgacgaccgttgtcgccgccaggagcccccacgccaagtgccagcgctgctggaactactggcccagcgtcggcgccaacgccgactatccggacctctgccagcgctgcgcgaccgtcgtcgcctccgcataggcgggaggccataggttcgaggaggccgttattgcttgcgcagcgagaggagcggagcactcaagacccttgagagttccgtgcgcagaccacggagcgactcgtagtcctgtgggctgagatatccgaggcaggaagcaagcgacaagtgatcctccacctctcgcgctgagctgcaggccatgtccaggaaacgaagatagtcggattgccaatggcgtgtgcagcgttcgacgatgtccggagcaacgcagacgaccgcgcggcgcaactgcgccgtcaggccgaacacctcctccgtcggaaacgtcttcgtcattttgtggagacacagagccaccgattcgccaactcaaacgcccgcaattctgtgtgatcgcgcatttcctgtccctccgcccccacatggctatcgtccagcatggaaattaccctccccacgtcgacaccattctatcagattcggagtgtccctgagagcgtggtcaatcgtcggtgcctacagtctctggcctacagcccacggcctgtgagctgctgcgcagctcgcgtgtagacttcgtcgagggtgatgtgctgaatcgcgtgctggggatcacggctcttgatggccaggccccgcgtggcgatgtcacgaccgacgatgcactcgggccggcggtaagggccgacgcgcagcgggttggaccaactgaacatcatcaccagcggcttgcccagggcggcggcgatgtggcccggccccgtgtcgttgctgatgacgatccgggcggagcgcagcacctcgaccagctcgggcagcgaggtgcggccggcgagattcacgatcgggcgcttcgcgtgactctgaatccgctcgaccatcgcgctctcagtactgcttccggtggcgacgatggccagcccgtgctcgcaggccagccggtcggccagcacgccaaaccgctcggcgggccagcatttgctggtctgggcggaaccggggatcagcaccgcgtaccgttcgcgagccagatcatgctgcgatagcagcgtgccaacagcttccgcagccgccggcttctcgggcaggacgaactcgacgccaaggtcagagccccccatcgcctcgatgatcttcatgtagtagtcgatcacatggacccagtcggcgtgccgcggcacggtggtcgtgtagaaccagtgcgcaaactcccggccccagtccggaccgaagcgatgcttgcaaccggaagcccaagccagcgacgccgaccgcagcagtccctggaggtccagcaccgcgtcgaagcgatgccgacgcaggtccgcgatcagagacccgagggctttcatcgcgaacgggcagtaccacgccttgcccagcgtcttgcggtcgaagtggatgatctcgtccaggtgcggatggccctcgatcagcggggcgaacgccggacggataagccaggtgatccgcgcctgcggaaagctgcgacgcagcgccgacaacgccggcaacgccatcacgatgtcccccagcgaactgggcttgatcaggagaatgttcttccatgcactggacataagttgtggattgtatgtcagcgccggtctgcaagcaacgggcgatccgcgatcggccgttgaaatgtccacgcaggccgatagaatgacgtcctgcgacgcgttcgacatgagtatgcacgcggactgtagaggatttgacgcatggcgaaaaagggcaggtatgtgtaccagtggccccggccgatggtaacggtcgatgcggcagtgttttgtttctcgcggggcaaggcgtggctactgctggttaaacgcaagaaggaaccatacaaaggccggtgggcgatcccgggcggcttcatcgagatggacgaggaactggaggacgccgtcgctcgggagttgaaggaagagaccggactgacgggcatacgcctggagcagttgcggaccttcggcacggtcggtcgcgaccctcgcggccggcagatcactgtggtcttcacgggtatcgccggcaaacggcaaacgggcgtgcatggaggcgacgacgccgccgaggccaagtggtttcccatcgaccgtttgccggagaacctcgccttcgaccacgatcgcgttgcccgcgtggccatcagccggctcaaacgaacaaaggcttatcgccagcgcgtgataaagcgcaacgcgtcgtagcatgatcacgtgctcggccaaaccgtgtcaccatgctcttgatggtttccactgaagaccgacccgaaccatcggaaataacgacacgttatacgtagtcaccacaattgcacgtgcccgcgtcacctgctataagatacacgatatgcttgaagtgccggggcgccgcgttgaaggaagacgatgccggtcggagcctggagacctgtgcagacgagggcgcggcaccccaaccatcctgggcaatcccggcatttctgtctgccggcgatgctctgcccgccggtttttgcgactccctgttggcgagaccgtcgcgagcaaggtcgttgcgtacacaagaaggagaaggtgacgaaatgcggcgagagaagaagcgtggcaggccgggagacagcgggcgtgccgcctgtcccccggagaacctgctccgtcgaatcggatggaagggtcttctgctcgtgggatggcactcgacccccctgccgttgcggctggtcgccctgccgtacacgcttatcgtgtatcgcagactcctggccgccagcgacagcctgacacatctgctggttttgcacagcgacaagtatcaatcctcgcttctgttccgggcgctgcgtccccggtttcggagggtccgccgcgtgttggattgcctggaactcaagagcgggccagccacggtgcatcgggagcccgccaggccgtacgcccctgtggccaccgcgccgcggacgtcgtcgcggacccctgcccggctgtttgcgtcgccggcgaggcttgcagattgacacgttgcgatgtcgactctaccatggccctcatgtaacgcaggccatcccaacggtccatggcaggagcatcaccatgagcgaaggcacatccgaagacttcatgcccccggcttacctcaagcaggcgatgaaagcgttcaaaaagcgtctgaagctgacgcgtctcgatgcagagtccacattaggcggaggacctttcagcggaggccgcagttccggtatcgtggccatccagcccccgaatcagtatccgcgtcaagtctgggacaagctcgtcgaaatgggcaggctccgccatgcgggcggcggactttacgagatgtgtcaggacccggagacccattgacgaacaatacgccagccagcagagagggttcggttactcgttcgatccggaaacggcttcccggacctgttggttgaacatccgcaactgaacggtgatcgcgccgagagcccactcgatgtaatgcaggcggtgtgccggcttacgatggcgctcgatcatcagtccctgctgggcggcgttcacaaactgggcgatcacccgcgagctgatctgcgtgggcttggccgcccatcttttcagttgctcgtattgccgctgcaacgcccggtcggaccgaagctgctcggccgtgaggtagtcgccggggttcaaggccagttgcagacccttgagacacagaatcagcggctcgtagttggccctcttctccaaccgaatgaacttgtactgctggatataggtggtcgcctgggccggcgccttgtcgccgatctcgtcgccccccagataccagttgcgccggctgcgtcgggcgaacaccagttcttcaccgagtttgtgctgggtgatctcgtcatggcccatgcgcgaaacccacaggcctccgggtcttcgttcgggccccccgcccaaggccagcaggcatttgacaaaccccaggggcaggatggtctgctccctgacccggctcttgagcagttgaaatgacaggtgaagactgtgtggctcgacctggaaaaagctgaccagctcatggatcaactggttcagcagccagggatcggggctggcgggtcgcgacagatcgccggcaatgctgagccttcccggcgccagttcgagaaatccggaggtccgccttcgctggccggaaccggtgtggtcgtcgatgtagcctcccagcttccagcagagcacgtcgaggtagaagtcgtagaagtaccggaagccgtcgtaggccggatcgaccgctttgcagatgctgcgtctggattcgatcgcgtccggtcccagattgctcagctccaactcaaagccgagtgggatcagccccggctggagattggagcgaatccgatgcaggtgggcctccgccacgcgagaatcgaagatgctccgtgaagcgcgtacggcgtacttgacataatcgatcaggtccagtttctccgacggcatcatgttgaggccccgctcgatgatcaggtccaccacgctgcggctggcgttgatcatccgcagagccgccagcagactgaccgaccgggcgaagtaccgctcgctggtccgcatgtgctccaggtcgaaacggtaccggttctggatttgctcgtcgaactcgttgagaagcacctgccgcagaaccagcgacaggtaattgcgcaggtagggctgcacctccggatcgttgaacagatggcggatgctcgggcggggccggtccagctcccgttccagccagtagtcgctgatggcatcggtatggtagtggctcatgaccaggtcacgctcggtcgtggccagcaactcgcgttcggcctgacgttccagttcggcatcgacggtccgctcgccgggacgcgtgtgcttctggagaaaccggttgatccgcttgcggagccacaactcgtggatgagattgacgtgaaaccggtcgccgaagcgtttccgcatcgattcggcggtcacgagataggcctgggcttcaaccttgccgtgtgcggtatagacgtggaccgtctccctctggtagcgtttgccctcgtaccggtcgatttcggccaatgccgagagaggcacatcatggatcacaaacccttcgattctcgcgtcgggagccttgacggcgtagaaatacacgttatccgggctgacccgtcgatgacccgggagaaaagccggctcggcaaacagcgttttgacgtcgatcttcgagggcttgcgcgtgaaggcaaaaccgctgaccgacttgaagatgcgactgtctcgaagcgatccgtagataaagaggttggcttttcgtctgtgcatagactgcctggcctgcgccggagagccgcgtcatcccctcatggttcctgtacgatgcgccgacgcagttgccagagttccttgaaggctctgagaaccacacggaggctggctccggtctgccgaccggccgtccgcggatagtgatgtactcctctctgcgtaatcgtataccctttccgggcggcccgtgccagaatctctgtgtcgatcagcgccccggtgctttccatcttgatccggtcgaagagggaacgccgatacagcttaaaggcgcaatccacatcgcgaaccttcagcgagaataacagaccggtgacctttgtccagagccacccgttgattctgcggacgatgttatcctgacggttcatgcggtagcaactgacgatatcgtactcgttcatcagcggcagcagcgccggcatctcgccgatgtcgaactggccgtcgccgtccgtgtagaagaccagcttcttgcgcgcggcgcggaaccccgactgaagggcggcgccgtagccgaggttacgcggatggtggatgacacgaatccgatcgttgccggcggccatctcgtcggcaatgcgtccggtctcgtcgacgctgccgtcgtccacgatgatgatctcgtagtcggcgcccagcccttcgagcacacgaaccgcctgctcggccacccgcgccacgttggcctgctcgttgtagcagggaaaaaagaccgagatcgacacggccgactgcgcctgctcacccgacgacgtccgcctgtccgcctgggccatcgcttaccacctcttcctgtcggaaatgaggtctctttcgatcagatagcgtttcatctggttctcgcaggtctgggcgacttggcggttgccttgggcctcggcgacctgcttgagccgcaccatcgccaggcgcgccgcttccagccggagattgtagccatcgtgattggcgtagctggacttgttcttctcgaattgcgtggtgtactcgacgcagatctcgttgacccgctgctggagttcgggatagcgcgcggcaatcaccagcaggtccagcatggggcccggcgatggatcgagatggaacgccttgatgaccatgtccagaccctgctgtctctggctggcctcggcagacaatagaaggttgtgcccgacggagaagttggcggtgaactcgtccggatacgtggtccggccggtaaacatgcctccgaacaactccttgccccgctcggtcgtcacgttgacaaacagtttctgcttgttgttgaggaagaccagacgccagttgggatcgtattcgagggcgcggacgaaatccttgtcgaactggttggccggcatcaggaccacccagacgtcaaacttgttgagttgctcggtcacccactgcccgatctctctcagctcggcggcggtcgggtcccgtccctcgtacgcggcccttctggcggccggcccgcccgccaggatctccgtccagaggtcgaacgtccgggtgtcgtaggcggcctgggcccggccatccatgaagagttgcaggggcgtccgtcctgtgttgggatcggggtcctgaccccaggcgatgaacccgccttcggtccagtagttgaacatgttgcccgagagcttgttctcgcggatgaattgacaggcatagaacggcttggcatcggaggcggtcatccgcatgaagaccgacgtcagcttcgggtccgccggccagtaatccaggtagatcagcttgaacctcagccctacccacaggccaaaacccatgacagacgccaagaccatcagggcggcaacctgccaggcccgcttgaggaacgccaaggcgcccgcctgtctggtacctcccgcggatttgtcagttccgcagaacacggtaaccagcggaaatgacgagaaggccaagagcgttccgaacgccagcagccagaaacgcggctgaatctgcgtgggcgcacccggcaccgggaagaacagccagcgccagaagagcagacgccacaaccccaggacggccagcgcccccgccagcccgagcagaagcaggcgttcgacgagctcatcccgagccggatcgggcagccgagcggcaccacgcaggtccgccagggtcaggatggcggccacgatccgctgcaccagcaacgcgatcactggacaggcagcaaaagcggcaatggggatgaatcgccgggaccgcagcgccatatagacggtcagcgcagccacaataatgaaaacgacgtcgatcgaggcttcggcgggcgcctcggccttcccgccgcgcttcttcgggtattgttcggccagcgccatccgcaccgacaggacggcccagaccagcagagcgagccaggcgaaaatgtacattgtcagaaacggaatggcggtaccaaccgggttcgtccagtccagagcccgatgccactcgtgcacgtcgcgccaacgttccgcgtgcttgctgaccgagatcacaaaggtgtgcgtcaggttcgtcaggtggaacggattgaacacgaccatcgcgacgaacgcgaccgctccggcgccgagcgtgtgcagaagggtccggcgatccaacacgcgaatgcccttctctcttaccgccagcaccgccgcaccgaacgccatggacagaacgaacataccgacgcacgtccagcgtcccccggccgcgtgatccgcaaagatcttcagaatacgttcgttcattgtgttgggcggcgccgggaagtaccgcaccaacaccagaaggaacaccacacacgtcgctacgccgtgcaaagccgtcaacgcgcggtcgccgatctgccgatgcgaaaccgccgcaatgctgccaccgatggccagcaccaggaggacaatcatccagtcgccgataccgacagcgcccgcgttgctctgtgagaaatactcggccaccagttcagcccgacgaccgagaaactgatgggtcaggccatagagaaccagccaggtgagaatgctgtagaccgccaccagccagcgcttcggaaggtgcaggattatgtgccagcccatgaacgggacgagtacgatgaaggcgtagatatagccgccgtgcacgttggaccagaagaccaccaccggcacgatcagccagatgtagagcgcgttcctgtaactggtcagtgccagaatcaggatgaagaccgccaccagcaggttcgagaagccggccgggcggatgtcgaagaaggaccgtccgacgaacagcgcgaaaccggaggcggcagcggccagggcagggtctacgcccagcagccgggcggtgacgtagattgcggcaaccgccaggaaatacacagcgaacttccagaacaccagcgcgtcgaagtacggctcctgctccgaaccgaacagggtggtcaggcgataaaagatgacgtgcgtcagccagttctggttgatccagccggtcggatgccacttgcgaaccgtttcgaggcccaccttctcggtgatccagcgggcccagcccggccaagtcgcgacctcggcctcggtcgggccggcgcggtggctgttggcgctgaaaggctcgacggtatcgacgccgtgattaacaaagtgccgtccgcacgccatcgccacccaggtgtcgccggcggccaccatgtgcgtacaggcgtgaaaggcgaagaccagcatcgccagccagccggcgaccgccacgcacacggaccatgccgagcgtccttcggccgtcaacagtatgtccccctcgccggtctcatttgccgccattcgcgcactttccaacaggtttcggctgatagtatcgtagaagaatactgcttcttccgtatatcgtcaagaacccccgctgtcctgttgcggtttgccgaagactgtatgcgaacaagattcacgtgcgcgcccgcgcatgccgtgccgcccagccggccgctgcgccggtcggcctcgtactgcctgacgctgtgccgactgcctgtgttactggctcagccacttttccaggcggtcgaggcccttcttgatgtgctccatcgaacaggcgaagctcagacgcacattgtcgccgcagccgaacggcaggcccggaaccaaggccacgttggcctgctcgaggagggccgaggcgaattgcatgctgtcgccgatcttgacgccgccgatggtccggccgaagtgcgcggaaacgtccgggaagcagtagaacgcgcccgccggctcggcacatcggacgcccttaatggcattgagtcgctcggccatgtacttgccgcgtttggcgaactcgacccgcatcttctcgatcgtttcctccgcctgcggcccgaaggcagcaatggccgcatactgggcgaacgtcaccgggttcgaggtcatgtggtcctggaggcgggacatcgccttgatgacgtccagcggtccggcggtgtagcccagacgccagccggtcatggagaacgccttgctcaggccgttgagggtcagcgtcctttggaacgcgtcgtcgctcagggccgcgaaactgacgaacttcgagtcgccgtagacgagcttctcgtagatttcgtcggacatcacgcagatgttggtgccttcgagcaccttggccaacgcccgcagctcatcgggcgtgtacatgaacccgccggggttgctgggcgagttgaggatcagcatcgcggtcttgggcgtgatggccttccggagttgctgcggcgtgattttgtagccgttggctttgtccgtctcgatgatcttcgtcaccgcgccggccagcttgatcgcctccggatacgtcacccagtagggccggggcagcagcacctcgtcgcccggatcgagcaccgcctgcatcgcctcgtagaccgagtgcttgccgccgatgttgaccacgatctgctcgggagtgtacttgagcccgttttcccgttcgagcttcttggcgatcgtagtccgcagctcaatgatgcccgcggcgggcgtgtacttggtcttgccttctttcagggccttgatcgcggcttctttgatatactccggcgtatcgaaatccggctcgcccgccccaaaaccgaccacatcgaccccctgggccttcagttccttggcccgggccgtcacggcgatcgtcgccgaagggggaacgctcctggctctctggctgatcttcatcgtcaaagcaccctttctgatggagtttcattctgaataatcggcggctcattagacccaaaaccatccctgagtcaagcgaattcccgacccggtgattggctgccgcagagccaatacggttggcgtaaggaggcgaaaaaaggacgcgcaggttgcgaacccgccctgccggtccgatggaaggaacggcccctcccggctggggtcgagaggggccacgggattctgccgttacttggccggcgtcggctcgaccttcatgacgccgaggtaggtaaagtggttggagttgacgttgttggccgtcggggccagatcgattcgaatttcgccggcgtcatccggagcgatcccggtcaccatcacgaacgcattctcgttgcccgacgggtccagggcgacaaagcccgcgttggcgccggcgaccgtgtagccggtttcgcggttgtcccgaacgcccatgcgtgaggcatagaacgtgaaatcatacgtcagcaaccggtcgagtcccgtcagtttgaagctcgggaacacatcggccaggccgctgaacgtctcggtgttgccgaacaatgaatcgcgcgtcgcgttcgcgggaaagaccgctgaggcgagcgtcccgttggtgttggccccgttgaaccgccggatgatgaccagatcgacctttgtcggaatgtgctcgacagtcaccagagcggccaggcgaccgccgtccacgcacccgacgctctgcgtcacgttgttccacgcgttggtcggatcgtcgttcgtgggagtatccgaggcgccgaaatcgaccagaagaacctccggacgcacctgccctgccaccgtggccccgccggcgatctcattgcccgccagatcccgcaagccgccgacactcaccgtgaagcggcccagaacgcgctgctccagcgtcaggatgacggtgcggccatcggcagcctgttcggcggcaaggaccgcaacggccccctcgttgacgctgtagttctgcgccacggcggccgtttccgggtcaatccgttcgtcgaaggacagtgtaatcgtgtagccgttggtgctctgggccgacagcagaaccggtgcgttgacgtcggggatcacgcgaagaaccgcgccttcgctcagggcgctgtagaccatgttgctgacgcccaccgtgaacacggcgccgtccatgtccggcgtcacaatgtcgatcgtgtacgtgaactcgttggcgtcggcgatcgcgccgccgttcttgtaccactggacgacatagggcggcgtgctctggacttccacctggaacgtggcggactggtaggccaccaccgtctggctggcaggctgccggatgaaaacgatcggctgctgctcggggatttcctcgaccttcattacgccgagatagacaaagtgatatccgttattgttgttcgccgtcggggccagatggatggtgatctcatgcatcgcgtccggcacaatgcccagcgccgtcgcgaccttgtcgacgttgttggcgggatcgagcgtcacgaacgtggttccttcgcctgcgaccgtatagctcgtctcacggacgtcggtgacacccagacgcgacccgtagaaggtgaagttgtacacccgttcgggattgaggcccgtcaacttgaagcggggcgtcacgttggccagcccgccccaggtctcggtgttgccatagagcgaatcgcatgtggcgttcgccgggaagacggtcgattcgagggtcccgttggtgttcgggccgctgccgttgaacggactgagaatctccagaccgatcgacgtcggcatgttcagggtattgaccaggccggaaagatgcccacccgccacaccgccgacggcttcggtcacattgttccagaaactcagcggatcgtccggcgacggaccgttctgtgtgggcgtgcccgacgcaccgaaatcgatgagcaggacctgtaccttgggcatggcccacgccgccagcaccggctctatgatcgaccgccacagctcgtagccggcggcgttcatgtggagcatgtcgctgccgaacagttccggacgaggctggcccttttcgttgagcatcggggtgaacacatcgatgaaccacaggcgcgcatcggtcgcggccagagcctccagacgctcgttcaactgccgcgtgacctccacatactgggcccggctcgggctcggcttggtggcgatgaaggcgacatccgcctgcggcaactgcgcctcgacccgcgcgacaaactgcagatactcaccgtagacctggtccacggactttccgccggacaggtcattgtcgccctcatagaccaggatcagagccgggtcgtagacagcgacgacgcggtcgaaatagtacaatagatcgctcatgtacgaaccgccgaagccgcgattcatcaccgggtagtcggggaagtccgccgtcagcgtggtccacatccgaatgctcgaggaaccgacgaacagcaccggcttcttcggaggaggcgtggtcgcgtccatccgctcgaacgcctggatgtcggcttcgaagcgggtcgggtcttgcgcccggaccgccgcgagcggcaggagcagaagcgatgcgccgacccataccacaaaccgcgaggtgccaccaagactgctgctgttcacatgatgtgtctgtctggacatgaccgaacctcctcatggcgcgttggaatctgctgcgtacatctggccgtgacgtctgccctgtgctcgcatagtatcctatcaatcggcagcatggagggtcaatcgaaatccagggacgttgacaaggggtggccgcacgggtaggctacccgccatgcgtgccctgcggatcatcctgctggcgattctatcctggctgagtctgggcggctgcaaggagtcgtccgagccggtggtgccaatctgggagcaggtcaagatcggcgaactggcaccccagtcgcccgatccgtcgcgccgggcgcaattcctggcgacggtcaacctcgacatctatgccctggacatgccggccgagaacatccgcaagctcgacgatctctggcagacactctcggccaagccgatccagaccaacagctacagtgcctttgcgggcaactccttccgtgtgcgcatgggacgcacgacgatgtgggagcaggttcgggatctgctggcggcagccggggcccaggatgccggaaccacctcactggtgatcggcaacgacgaacccgccgaccttcccgtggccggtgtttccccgaacagccggattcacttcgtcggaacggatttgtccgctcagacggtggaagctggccccggtctgctggtgctgcggcttcgcgagcaggcgattcccggcgcacgcggcgtgcggaaaatcatcgcgtatcccgtatatacgctcgccttgaccagcgcgattccggagctggaagaacagaatcgccgacgggagttctacttcgactcggcggcattcgccgcccagatgacaccgggcgacctgctcgtgctggcgcccgacagctattcgggcgagaccctcactctgggcgggcggttcttcaatcgaccggaaccggtgctgttcttccacgcggaggcgaaagagccaccgaaacgccgtccggcctttcgcgtattcgttctggtctgtacgcgcatcaatgactgattgaccatggccgacaggactgtcgtttcgctggttcgatgccgggactatgaacccgaaagggttgccgaagccatcgagcgtcatttccggctgctcgggggcattgaacgattcgttaagcccggtgacagggttctactcaagccgaacttcatcgccccacggtcgcatcgacaagacgcgacacagacccatcccgcggtgattctggctgccgcacggtttctgaaggacttcggggccaggccctttgtgggggattcacccggatggggagacgtgcagagttgcgccgaggcgctgcagttggtcgagccgttgaagagactgggtgtgcctctgcgacaactggaccggccgactatgcggcgtgtccgcgaaggcggtccgcgagtcgggctcagcgcggtggcgctggaggccgatgtcattatcaacctgccgaagctcaaggcccacggtcagctcctcgtgaccctggcagtcaagaacatgttcggatgcgtcagcggcaagcgcaaggcactgtggcattaccgatacggaggcgactctgcgagattctgcagactgctgatcgatatctgctacttcctccggccggcactgacgctcatcgatggcatcgtcgcgatggagcgaacaggtccgtcgaggggcgtcagcaagcccctcggctggctgatcggaggcaccgatccgctctcgtgcgagaccgtgtgctgtcggctgctcggcatcaatcccgggcaggtccccctcctccgcgccgcgagccggatgcagtttgacggtctggatctcgaccggatcgaactggtgggcgatccaccgggcgaaccatgctcggatttcgagctgccgacgctggctccgatccgtttctccctgtgtcgtgttctgcgcagcaagctgcgtcagatgtggcttctggcgcgcaggcccaagctcacgtcgtccacgtgacgaacagacggcgatggtctatctcggcgtgtcgttgcgccagtagtcggcgtgataggtcgcgccgtccttgttccatatcttcgtgacgatgtcgatgtccccatcgcggtcaacgtcgcccagcgtggcgtcgtgccagccgggattgtcgacgtgcagcacgacaggcgtaaacgtcggactccatccgccggaactgagccagatcacgccgcgttccttcagacccttgggcttcatggccagcttgccgctggattccatataggtgtcgggatcttcctgctcgccggcgaagacgtcgagatcgccgtcgccgtcgaagtccgcgacgccgagcgagtgaaacgagccggtccccggcacatcgcccggctgcgtgggcgggtcatcgagaagatggcgttgccagcggggtcgtttgccggtgtcctcgacccagtagacgtgcgaccagccggtgtcgcagtcgctgtacacgatgtcgttgcgcccgtcgccgttgagatcgacgatccaggagcgcatgctggtcccgtaggacgcgttgggcaccgccagatggggccattcgtatcgccgccaggggcgggacgtgttgccgggattctcgaaccagtaggccgggatgacgatatcgaggtcgccgtcgccgtcgagatcgccgatgccgttgggggcgataccaccgtggttctcctcgccctgtcctacgtcggtctgcttcatgccgtcggccgggtcgtaccacgagacgaccgtgccgtgatacgtgacgatgtcgagccggccgtcgccgttgatgtcggcggcgacgatatcgtgtcccccgccggcgaagtcgtgggccggccaaggcgtgtcagggttctccagcagaccaccggggttctcaaaccatacgtttgtcaggaccacatcgagccaaccgtcgtcattgatgtccagcgccgccgcgcccagggtattggccaggccctcggccgaacccatgacgtggcggacccagttcgcgtcgtccttccgctcgaaccagtaggcggtcttcggctcgcgccgcgagatgaccacgtccagatcgccgtcgccgtcatagtcggccagcgggctgccgcccgtcccccacgccgagccgggcaacggatcggcaatcgtgaaatgcgtgaacaccaggtctgccgcgcgcaccaccgccacgggtgcaacactcatcacaaagacgcacacgcacgtcacggccctgtatcgactcagaatacgagcctgtctgttacggcaacggcttgacatcctcacacctcgctttcacgccatatcctgatccatacttgcggttgcaatcctccggacttcacgagtgcacacttctaacgccatgcgggccagtcgataacaccgtttctcacctgcggcggtgcgatgcggaagaacagctctatcggccaggcgcccagacgctcgaagccggcgggagcggtctgctcgaactgcaaataggcctgtacgcgaccctccgtcttgtaggaaatcttctcgtcatggccgccggtgccgaagacctgatagccggccagaatgcagtccttcagatcgacgtgcagtaattgcggattccgctcggagcagatgattcccgtcgaaggactgatcatcggctgagagaagttcagtacgatcatccggcagtcctcgaccaggacggtgaagcccgcgccgctctcgtgcgtcaggtcccagaacaggcccgcgtcgatcacaacccaaccctgcgcgcccgaaccgagacgcccatcgacatcgccaatcaggagattgtaggcgcccggcgcgcccttgtgcggcgtctcgaggttgggctccatgtagtggtccggccggacgatcacccgatggcccccgccgtcgtcgggcacggcgttcaacgccgcctggatcgtgcggaacgcacgcgcccagatcagtccatcggagttgtcccccacctccgagacatagagagtcacaccctgccggccggcatagcccacgtcacccggcacgggagaagccgccacgattccacagccgaacagaatccagataagacaccgccgcacccgatccataggccactccttcgtgctcgatcacgcctgtatcatacaggcggcacacaccacatgtacagcatctgccggcgaagactcagccgagaagcctttcgccgtagaccaggtacgccgtcgccaggaatgcagccacgaaggtcaacagcaacgagatgccgtgcaggagcaggatgcccagccctctgagccggcgcgcccagagcaggtagatgggtacgccggccggccagaacgcgaagatgccgaccctggccaatggcaggagtggcttacccaggagccttgcatcggccgtgcagtaccacatgaacccgagcgagaccgcaatggcaaacagtaactggacacgaagggaagcaccctcgtcggccgagaaacagagcagtccgctcagtgcacccatgagaagaaaggccgcatacagaaacacgagcgcattgcgacgctggcgtcgccatcgattcccagaagctggttccatcgttcacactccctctcgcaaagtgcgtccccgcgaaacattccgccgtcacaggcggcctgcaagcgcttccagtgggccacacggtgacgccgaccgtctttatagcacccacggtcagaatcgtccactcctttgcgatgtgggagtcacggccccggcaagtccatgaccagcctggtcaccggcggtttcgctcgcggtacttgtcgatggcgacgcgggtatagtgctccaccggcaattcgccgatccggtcgaggtcgatccagatgaagtcctgcgcctcgtcgttgagaatcacctccgccgaatcggtcctgcaggcgaaatcgaagaagataaagtgccggcgtcgccagaaccggtcatcgtgaatgaactcctggaagcagacgaactcgatgtcgcgaatctccaggttggtctcctcgcggatctcgcggcgcagggcctgttccattgtctcgcccagctcgatgtgcccgccgggaacgacccacttgccccgccacttgtgcgagcgcatcagaaagagctggcgctgggcgttgaagatcaacgccccgaccgtcggttccggatatcgctgctcggccatatcaaaccgtctccgctcgtgccttgcgcaggacccagaccatgaagggactcgtctggggctcgaagggaccatagagtagtccccgtatagatggaccgggacgaaacccgctgcttccgccagcgattggaagtcgtagtgcgagtgcagacaggaatggaggtccacagtcatggcggccggaagagagccatcccagcaccgaacgtcgtagaactggctgccgctcaccgatttggacacgggatcgtagtcctccacacacgtcaggtcggtcccggccaacagcaagggaatcgagacacgtccggtgccagccgtcaactccaggactgcaccgccggccctcttcgcttcccgcaggaaaaatgggacatccatgtccgtctggacgtagctgtcgtagaagcgggcgacccgctcatagtccatcgcaggcatcgttcctcactccggccggcccggcggcgggaccttcgcggcttcgtcgtcgagaaccaggacccaatcgcagccgcgtccggaagtcggcggcacgaacgtctgaaagcccacgttgtcgctggtgtgcaacggctcggcgatcccatagcggggatcgaaccacgtcgccttcacacgggtggcgcggatggcgctcaggtgcaccatgaacggctcgccccgtggcgaatagatgaaggcgaatgacccgtcgcaggcgagtgccgcgcggaccttggcgcctcccgtatccggagcattgacgaggatcgacggcgccggccggagcttgcggaacggacgcgattcgaacagcttgcgaatcaggcccatctgaaaggcaccgggatggtccagtgattcgaaccatgggacgttggcccagaggacgggcgcgcgtccgggctgccacatctgccagatactgctgtgtccgtacgtgtgcccgcacgcgccggccagcagtgaccaataggccgcctgccgcacatcgtatgcatcgaaacgaacgttgcgcgcctcattggcgttgtagaatcccaccgatagcatctcgtatcgaggctcaccgtcgagggtgggcttgaccggctccagcaggtaatcgtgatccgtgaacaggccgttgtcgtggtcccgtgccgcgtgggacgattggaacatgttgaagtccagccagtcggctcggtggaagtagtccgaagacagacccggcccgcgcgggtggtacgtgatcagatgggctcccccgtccccctcgcgaaggcccagcgccatcgcctcgacggtggctcgctcggtgtcgttgcgaatgttctcgtcgccaccgagaatccagatgatcgacttgtctttgtatcgccgcccgaggaagcgtccatagaccttcgcgttctcggcgttgaagatgcccgatcccactttccaatagctgccccacgtcggcagcatcccgacgaccagacccgcctcgttcgccttgttgacgatgtagtcgacgtgctcgaagtaggcctcgttgggccgtgtcgggtctttctccaccagcggcagatcgccatacggattcgggtccgtcagaccacccaactgggcgacgactaccgcctgaatgactgtgaagcccttggcggcgcggttggccaggtagcgatccgcctcttcccggttgagacgatggaacaactcccacgcggtatcgccaagatagaagaacggccggccgtcgtcgtactcgatgtagcgccccccttcggcaacgcgcagacgctgcgaagcagcgctcgcggacatgagcatcgccaccagcagaaccgcgaccgccgcacggctggccttcacatccccggcatctctcatggatcactcctttctgaagaaacatgcgtggccgtacactcgcaggcatcgtcttgtgacgacggcccggttcaccccgccgcatgacccgcctgaatggactccatcactctggccagatcgtcgaggatcgcatcctcaacatgcgggtagccgtcgaatgcaccggtcaccgtctcggttccgcccgtgccaaggtgcaccaactcatatcggaggggtgcctttgacgtttgccgcacctccatcgtcagcagcgaacgcccgatccggtcgggcgggggcgatcctttcggtccccagaatcgccacagcaggcgaacgccaagcggagtcgcgctgaggtgggacaactcgatccgcaccgtcccggtctgctccagagcgccggcccaatccgccccggcatcgaccagcagggtgtcaagcatcttgcggacatcgtcacccggagcggtcttgaacgtggctcccggcgagggacccggaaaacggagggtccactcgtaggtaccgtcgacggacgggggtgcgtaagccaattgacgaagcactctcaggcctgccagaccgagtagcagagcgatccccccgaacaccagaagccgccggggccgatgggccgtctgccgcaagtcaggacggttctgaccacctcgtgtgcaatcctcatggatcgtgttatcgttcattccattcccagttccttgttctccgccggcagccgaaccgcctcatcgccgcgtctgcgatgtgtagttcctctgccatccccctactcgcatgccccatgcagactggccttgcgccgtcctgtcaactgcggcacgagagattggacctcgcccagattatcacaatccacaccgatcggaaagccacataaagaccgccggcctgcacgtgccgccctatacaagcgaattgtcgcatagaacatccagatttctcttgacaaccgcccgccgccggtgtagaaacaggaccagtatcggttggagtcgatacgtgggcacggaggcagggatgctgaatgggccacatttctccaccactcctgttttcgtacgcgttttgtctccacgcaaaagggtagtcaggaacgaatcgcattctatgcgcacccgcatggatggttcaggtgcgtccggacggagcgaccttccggagagggtcgtgctctgatgaaaaggaaagtcagtttacaaggaggtaaaggatgaagaagtgcgtattggtactggcggtgctcgcgatgagcaccagtgcgtggggatttggcattggaaactggagcggcagtgccaacggcacaccgctgtgctgcccgtcccccagtccgtgtccgacgccctgtcccagtccaggggccgtcgtcatcggcaacttcgcgggtcaggccggcctgctctacagcagcccgatgaccccggtccgcgtcatgggtgtcgacagctaccaaggggcctggtccaggcaaggccaagtcggctgcatcgattggagttgctttggaagtttcggcgaccaccacgtctatggcggcccggtatggggcattgtcacctacacaccgaggtgatcgtcgagacgctttacgcaagggatatgggcattggcgagagcatggcatgcagattcggcccagccgtgggcccgtcgcatagcccacggctgggatccgccgtctgagcggcgtctctggtaacctgctcgggccgcgacccaatccgttggactgtcatggtgtggactggccaccattcttccttcgctcgatcaggccggcggcgtatcgttgtcgggacgggcatgctgttcggcgactggtcggcgctggcgatccatgaaccgccaccacatgcacgaaatgtctcccgttcggagcttgcgttccgatcggactgatcgagtgcgcaggaatcgcactcacccgcgccggtctacggagagattcgcgcggccaggaacaccgtattgtcacaaggaggtttcctatgaagaagtatgccctgttgctcctgctcgttctggcatccagcacgccggcgtggggatatcatgtcggcatgtattactcgagctcctacatgagcgtctgccactggtcgaactgggacctgtgtccaaacccgtgccctaatcctgacccgtgtccgtgcccacagccgaatccatgtccgaacccgaatccatgtccgaacccgaatccatgtccgaacctgaatccatgtccgaacctgaatccatgtccgaacctgaatccatgtccgaacccgtgtccggacccatgcccgaacccgtgtccgaatccctgccccaatccgtgtcttaacctgaactggtactggtcatggcactggaataactgcggctgcgtgtcctactatcactacagttgcggcgcggggagttatcccaactgttgggcgccgtagccttctggcatgcatgacaagggccggtaccggtcggcaaccgtcagaatcgcatccggcccggcggcggaccactatcgagtacacccgccgccggagccggccgcttggctggctccgggacccgtgctgacggaggcaatcgcgcgccgacaccccagacaatcactccttctcgccagatccgaacacccagacggtgttcttgcccgattgcttggctctgtagagagctcggtcggatcgactggtgatatcctccggattggcgtcggcgtcatactggccgacaccaacgctgatcgatagcgggatgcgaacactttgccagaacacacaagaggaagcgacggcatcgacgatgcgctgtgagaccagggtggcctcttccagcgacgtattcggcaggatgaccccaaactcgtcgcccccatatcgggctgccagatcaatctggcggatgcactccttgatcctgcggctgatttcgcgtatgaccttgtcgcctgcacggtggccgtaggtatcgttgatagctttgagattgtcgatgtccgccatgatcatcgagattgtaccgccgtagcggcgcgaacgccacagctcccgttccagagcctcatagaaggtccggtggttcatcaagcccgtcagaccgtccaacatggcttgtcgctgcatcttctcgaacagcttgatgttgccgatcgaagcgccgatcaactgccccagcaactcgatcaacgcgatgtcttcccgcgtgaaggcgacaggtggtgctttgtccgccagattcaggacgccgacgacgccgtcgtgacagatcaaaggcacgatcgcgcagttggtcgtcgtgtagttctccgcaaaggcccgttgcgaccgcttgatgatcggtctgttgtacgtgtcgatgtcaccggtcaggatcagttccttgctcttgaccgccacgaccatgggggacggtggcgtctgattgagggacacgatcttgttgatgggaaacggatggttgcagcggaccagatgcagaatatggttcgactcatccaggatatacaaagacgcaaaggtcgatccgacgatcgcggggatcttcgtgacacagacattggcgatccggtccatgtccaggctgttgatctgtcgcgccagcggtgtgacccgctccagcagcgagtggtgagccgagggatcgtctttgtggtcgttcgattggtcgattcgttcggtcatgggcagacaatagcaccccgattcagtagagattatggctttggacttacaccgcctcttatcgtccaattctccacggcctgtttgcagaaaactatgaaagggctcgtggcaggcttcggaggtgaaacggagcccgtcgtcgcagtctaagagtccgcatttcctcatgttatagggccttaggatggcagcgggcccggtatccgcaaaggcccatcacgccgggatcgagccatccgaagatttttcctgaaaaatcccaaaaccagttgacaggccgataagggacttttacattttgcaaaatgtaaaatgcgttctctgtggtcgccacagacgggcgcaaggcgttcggctgtgacatgggcaggttgtcaggcgtgaagtcgtctgtggcggcaggtggcgcgataccgtggctggtatatctgacgatgctccggagcgggaggccacctcggaaggatggtttgcccggttcgtaatgctcttgtttctttcgggtgtggtgtcatgcgtagttgtgctgaacaagatacctgtatcatccctgccgcacgatgggcggtcgcctcgccattgtcggactttgtcgaatcgctccggctcccgtgccggcatcagttcaatcccggatcgcaaccatgagttggcagaaagtgagtcgaaggctgcagattcccgccaaacgctatcggatcggcgaagtggtccgatccagtcccttctcccgacagacgattcacaactacaccatcatggggctgattcgcgaagcggaatggaccgaaggcggacaccgcctctacgatgaatcggtattcgaccgtctttcgcgaatcatggaactgagggagaacatgagtctcagcgagatccgtcgcacgctgaacgaagaggagcggacgcagagagcgatacacttcgacgacagtcaccggtccgggcagattgaggccgccccgccgggcaatgcctcgtcctcgggaggaaactttatgtcgcccgaagcaacataggggcttgtcatagatcgccgcgttccaagcacgtgtcaacaccccatggaggttcgccgcttcatggaggtccaaggaagaccgaaaggatcaaggatgagacatccggcttcagtgcgagtaataccattccgtgtgcgtccgctccgtgcacacgggtttatctccgtgagtaccccccaatcggcgccagacgaggtcgaccctcaccagacttgtccatcccagtgcacctcttctttacaacaccacgcggtgcggaccgcctgagaccgccttcccgaaggagtgctcatggatatgcagtttcccatccccgacaacctgacggagttgctcctgaagattctccgcttcacggagcttcgtcgtgccgttttgtaccagaacatgcacaatacgcggacgccgggattcgtaccacaggatatgcccgtgctggaattcgtgcatgccctcaacggcgcgattgccgagcaccttcagaatcagcgtctgctgttctgtgatacggagaacatccgattcggcccgaacagcaccatggagattcgtccgcagccggatctgcacgccaaagcgctgctcgaacagaaccgcgacgagtacattgagctccaggtcggcaagcttctggaaaactccctgaatcggaagatcgccagagaactgctggccctcaagtgtggcaccccttggagcccgacaggactgcccatcgtggagatcgtggctcccgacagccctctcgaagactcctcgacgccccgtgaaaccaccgattgactcgaaggcaatgcccgcaatcatggcgaatcaagccgtcaatctgcagcagacgccggtcagtgatcggccggtggcccgtgtcctcgcggtcaccagcggaaagggcggcgtcggcaagacaaacatcgccaccaaccttgctctctgcatggccgcctccgagaagcgcgtccttcttctggatgcggacatctcgctgggcaatctggacctcctgctgaacattcgcagcaagtacaacatctcccatgtgatcaacggatccaaacgcgtggaagacatcatccaggccggcccccaaggtctgcagatcatctgcggcgcatcgggtctggaccagctcgccgatatcagcgagtcggaacagcgccgcctgcttcagcatctgtccggactgcaacataccagtgatacgatcgtgatcgacaccgccgcgggaatctcgaattccgtcgtcagtttctgcctggcggccgatcacgtgctggtggtgaccacaccggaggtgaccgccatgacggacgcctacggcatgatcaaggtcctggtccgaaaacatttcgacggtccgataagtgtggtggtcaatatggcccagagtatcgccgaaggccgacagatttaccagcgtctggccgacgtggcggcccggttcctcaaggccgacctctattacgccggggtccttctcaaagacgaacgtctgtgtgcggccgtacggtcccgtcagcccgtcgtactggcctatccgaagtcccaaatcgcctgctcgttcaacatgctggcggctcgcctcgggggcatcgattgccgccgagccgatggcgggacgtttttccggagagtctttcagtggctgacctaaagtcccggcctccaaggccgataatgacaggtgtgagtgtgggcgttgtcggagccggcggaccgtccggacccgatgtcggcccacaggcttgtgagcacgacgaaaacggattgcggctgcgacatgtaacggagacaacctgtgaagacacactcagcgacgaagcccgagaagaagctcgacatcgacaaggtgtgggagctgttccacgagactcgtcaggattgctatcgcaacctcctcatggagcattaccgagatctggtcaaatacgccgccgagcggctccacagcaaactcccggacaaagtcgagctcgatgatctcatcagcgccggcatcttcggcctgatggacgccatcgacgcctacgatcccgcccggggcgtaaaattcgagacctattgcgccccgcgcatcaagggatcgattctcgacgagttgcgcagcatggactgggtgcctcgcctggtgcgcgccagggcccatcaattggctcgggccacgcacacgctggagatgcacctggggcggaaacccgacgagaacgagttggcagaggagctgaacatggacatggatgagttcattcgtctccagcgggatgccaatgccgccagtctcgtatccctgagcacgaagtgcggcgacggggacggggagaaggacgtctacgaaatcgacgtcatcaaggacaaccgcagcgaagaccctctgctcgaagcgcagaagcgcgacctgaagaacctcctgacgaagggactgactcgtgccgaaagactcatcatcgtcctgtattactacgaagagatgacgatgaaggagatcggtgcgacgctggacctgtccgagtctcgtgtctcgcagatgcactcgtcgatcgttgccaggctcaaggcccagatgaacacccgcaagaaggagttcgcggtcgagtaaagccgcatcctcatccggaacacatccggtctgatcttgctcacagggaacacttccaggaggaagtgcccgggactggattcgaaccagcacgagccgaagcccaccagcccctcaagctggcgcgtctgccaaattccgccacccgggcaacacaaaccggattatcatcgacggccgatcgcttgtcaactgcgattcgcgcagaatgggaaaaaggggctacggtccacgtcagcaacgcgctatacgccgcgacggtcactccacagcagcacctgcaggcggtgtccgaagcgataccccgtctccacacaccaagcggcaatcgccggggcccttgccagaaactcctgcctggttcgagcctgaggcatcagcagaatacgatccgacggaacggacggcagccgatccaccagcaagcgagcctcccggacatcgtcggcggtctcgaccacgaatttgagttggctgggatacgcctggattagagcggtcagggcttcaacgtccagtcgctggctttcatgagacgcggcgtcagccaactgcgacggcaccgaattggccatcttggggctgatgctcatcaagtcacatgccaggtcgggcacgaacagcccccccgccgtctcgatggtcacatgcatcccctcgcttcgcaggcgctgcgtcaactccgccagtccttccctggcggcgaggtcagcgccgaccatcggctcacctcctgtgatcaccacgtggccgcaggaatgccgccggatcgtctcgaccagatcggtcggagcacactcctggccggttgagaagtcccacgcatactttgtatcgcaccagcgacatcgcaagggacagccggccagccggatgaacacactcggcgtcccgcagaggatcccttcgccctgcaacgaatggaatgtctcggtcacgcgcatcagagactctgttgccggtcaggagaaacgtaaacggccggatcgctcagccccgcctcggcgaagcctttcagccgcagccggcaggcgtcgcatcgaccacagcttcgcccctgggcgtccggatcgtagcaactatgcgtcagggcgtaatccacacccagccgcattcccgtgcggatgatctgggccttggtcatctcgatgatgggcgtatgaattcggtaccggccctttccttcaaccgctgcggcggtggccaggttggccatcgcttcgtaggcggccacgaacgcggcccggcagtcgggatatccgctgtaatcggtcgagttgactccgatgaacaggtcgaacgcgccgagcacttccgcccaggccagagcgtagctgaggaagatcgtgtttctcgccggcacatatgtcacggggatgtccgtggcttccccaagagagcctcgatccttgggcacctcaatgccgctgtcggtcagagccgagccgccaaaggccgccaggtcgattctcacgatgcgatgctcaacgactccgagcaagccgcagaccttcctggccgcctcggtctctcgtcggtgacgctgtccgtacaggaacgtcagggcgtagcaggcgtacccctcgtgccgggcgatcgccagcgtcgtggccgaatccaatcccccgctcaacagtacaacagccttgtcctttcccacgacctgcactcctgagaacacgactcagacgtcttgctccgatcaatcgaccggtcatggtatcgcgtcggaccggccctgtcaaagggtgccgcgcgtgccgtcgagaggccgttttcccgtatccgggccgattcccgcttgtcacattcgcaccgatgcgctatactgactggcagacatgcgacaaggatcaggacatgggtgaacccggcacaatcgagatgttcgacaatccgcgtcccggacgcgagtaccggattaccattcgctgcccggagtttaccagcgtctgcccaaagacgggccagccggacttcggggagatcgtcgtggaatactgccctgaccggtactgcatcgaattgaagagtctcaagttctacttgcagggctaccggaaccgtggcatcttctacgagtctttgacaaacgacatcctggacgatctgagcggcgcgtgcaaaccgcgatggatgaaggtgacggcccgcttcacgccgcggggcggcatcaccaccgatgtcgtggccgagtaccgcgcgcagggttaatcgcttcgtgtgaggtctgaacatgtccatcaaattccactgcgagcactgcggaaagaagatcgatgccccggacaccgccggcggcaagtggggcaagtgtcccgcctgccacaacaaggtctacgtcccccagttggaaagcgacgaggaggagctgaagctggcgccgatcgatgagacggaagaggagcgtaagcggcggcttctggccgagacgttccagctcacccagagcattctccaggaaaaggagattcccgacgccgccatacatgcccagccgacgcagaacgtcaccagcgagaagatgacggaagctatcgtccgctatctgcgtcagatggccgacggcgacctggacagcgcgcagcggaccgccgagaccatcgccagcaaccgtcgcaaggccaaggaaatcctggatcagatgtccaccagcgatccccccgacccgggccttcaggggatcccgccacaggtcctctccggcttgattcgcaacctgcggacccgcctcagttaggctaccctgggaccctctcatacgtccggaaaagaggtctgccgaccggagaacccctcgcctttttccgggccctgttcctgcctgcctcgcacggacggtgccgtttggcacgtccccgaccgtggcgtacattttaaatgtggattcgtacactcggatcgacgtacgctaacgcttggggagacctcacgtggccgaagagagcatcgcggtgcatgtcacgcacgaagccgtgggaaagatcggcggaatcggcgccgtcctgcagggctttttcacctgtccttcctatctgaacgccatcggtcgttccatgctcatcagcccgctgtttaccacggacggctcggtccaggaccggttgggggaggacggagaggtgctgtactcctcgatcgacggcctgatccaccccagctacagccatgccttcggtcggattgagagtctttacaacgtgggtatcgtatacggacgtcgcacctttatcgacaagcaaaccggggttcggagcacccccgaggtattgttgatcgacgtgcggtacatggatcgcggcatgctcaacgaattcaagcgacgtctcttcgaggaattcggcatccagagtcatctgcacgagcatctatgggagtatgagcagtacgtgcgtctggcgctgccggccatcgcggtgctcaaagcgctgggagccgcagacggccggaccaccatcatctcgcatgagttcatgggaatgccgaccgtgcttgcggcccgtctggagccgtactgtaacttccgaacggtgttctacgcccacgaggtcgccacgatgcgccgcatcgtggaagagcatcccggtcacgacacgatgttctacaacgtcatggagcgcgcccatcgtgaccggctttacgtcagcgatgtcttcggcaatcaggccacgtatttcaagcactcgctggtcgaggcctcgaagtactgcgaccatatctacgcggtcggggactacgtggccgacgaactgcgtttcctggcaccggagttcgagacagccgacatcgacatcgtctacaacggcattcccgcccacgagatccgcgtgggcgagaagctggcctccaaagacaagctccagcggtactgcgagaaccttctggggtaccggccggactacgttttcacgcacgtgacacgtctggtccgcagcaaggggctctggcgcgacctgcgcgtgctgtccgagatggatgcagcgctgaggcagcaggggcagacagccgtctatctcctgctgggcacggacgtgtcacgacggcgcagttgtgacatccaccgcatggaatcaacctacgggtggcccgtcgcccatcgtgaaggctggccggacctgtccggcggggaagccgactttcatacggcgatccagcagttcaatgcccgcagcagaaacgtcaaggcgatcttcatcaaccaattcggcttcgatcccagatcctgcggcagccgcatgccggccgacatggagttcctcgacatccgaaaaggcagcgacgtcgagttcggccagagcatctacgagcccttcggcatcgcccagctcgaaccgctcacctacggcagtctctgcgtgctcacaggcgtctgcggctgtgccggcttcgtccgcgacgtaaccggcggacaacccgtcagaaatgtcctcctggccgactacaccgccttgggcaaccacccgtatcatgacatcgaagacctgctccagatcaaccggcaggtgcgcgatcgcattgaagccaccgaaggggcccggctcgcgagggagatattggagcgcttgccccggaatgaagccgaactcgacgcgatgatccgcgagggctaccgtctggcctataacatgagctgggacgtggtggtccgcaagtacctgctcaacgacctgtcgcgagcgtcccagaagcaactcgcctgccataactgaccgacgtctgcgccgccgagcggatcctgctctatcatcgcagggcccccacctgagcaaagacgtcgtagccttcgccgtcggcagtctctgcgatccagaccaccacgtagcgaccgtcagccgccatcgccgcatcgggataccagttgcgagaggcgtcctcaaccttcagagtcgattcgccattcaccagttcgcccgcgccggtgcagagctggctgcgtatagtgcagccgttgccgcttggatcatggcagtcccagagaatcagaaaccggtcgctcccgtccgacacgacgcagggacgtccctggttgccttcgacgcaggtgttgacgagataaggcggcgtcaccggttcggcgtccgcgtcgaacggctgcgcgcagatgtcgtaggggaagggaccgatagcccaggtcacaacgaacccgccatcgcggccggtggcgaccgctggaccgtaccaccggctgttcaggtcgtctgtcaacgacttctccggtcccaacggtgtcccatccgcgtcgaaccggcgaatccggatgtactcgccgtaggggcgattgtacgtgtcgcccatccgaatccaggtgacaacgaatcgtcccgcctcgtcaatcgccacatcaggccatttctgctgtggctcgtcgctgaccctaaacggttcgaccagaggtaacccgtcgggtccgtaaagacggaccgtcgcatagctcctgccggtgtacgaatccccgtaccagttggtccaaacaacgacgaaggtccctgccgaattcatcgcgatctgggggtcggattcagcgacatccgcagcatccgccaccgccacctcctccgtcagggcctctccctcggcatcgaatcggcgcagcaccacgttgcggtcgccttcccgtgccgcgacccatgcgacgacgaactcacccgaaggggccatcgccaccgccggcgtccagttgtccacgtccacctcggagaggtttatcctgaactcgtcgtccagggcgtccccgtcggcgccgaaccgccgaccgaataccccccctcctcggccgtcggaggcgtgactgcgccaaaccaccacaaactggccgttgtcgttcatggccaccgccggatgcgtctggtgttgtaagccgtagccgtttacctggatttgcgcaaaggcgcctgccgccaacgccaggaccgtcccgatggatgcgcagattctccgcctgtacatggtcgtactcccgctggcttccccgtgtcaatggaatctcgtctgagactacacgcgtgtcacatcccacacctcgccgtgggcgtctatggtataagacgcaatcgaacgcactttgttacaggaaaagaagcagaaaaacgagcccgtggtctgcgggcaatccgacacgattctgtcgactcgctgccggcgatcggaggtttctctgtcggacatctccggccaacgctgccggacaagatacagtgccgattcggaatcggttctgttgacgggcgcgaggtggcgtactcatgcccaatcgacaaggtcagcgtttcggtgggaatccactggcgtgaggactaatcgcggtgtggcggtgcggcgccggcgtccttcttcttttcggccttccgaagcgagacgtatgacagcacaatgcccaattcgtagagagcgtacagcggaatggccagcgcgatctgggaaatcacgtccggaggagtgaccaccgccgcaacgatgactgtcaccagaatgacgtacttgcgcacctcgcgaagagtcttcagcgcgaccaggcccgtacgcaccaggatgaagattgcaatgggcgtctgaaaagccagcccgaagacaagcatcagaatcgtcacaaaggaaatgtacttctccagggtccagttggccgccaccccgacgatatcgttgaacgccaggaagaatcgcagcgtcagcggcgcgacaacaaacaggaagaacaacgctccgatgatgaacagcgcggcggagaaaggcaccgcctggcgcacgtaccgccgctcgtgttcatagagccccgccgcgacaaacatccagagctggtagaacacccatgggcaggtcaggatcagccccgaaatgaatgcgatcttcatgtaggccgtgaaggcttccgggatccccaagacccggaggcgcgcatccagcggaagcgctttgccctcggcggcgctgcacttctgctccgtccaggccttgacagccttcacagagacgtcccggatgaaagcaacgcggttcggatcgatcgggggcgcattcgggtccgacgccaggcgctccgtcagcgtcgcgaagaactgatcaagcaaggcgaggctttccgactgcacccgaggcacttccgtttccttgagccgaccacgcatggcgtcataatagggcctctcgatgaaccgcaggatatgcgtgccgaagatcagggcaataaccgagccgatcaccaggccgagaagggccaggatcagccgcgcgcggagctcttcgaggtgatcgcctaaactcattgtgcagcttaggggatcctggttcttcatggcagcgcccatctcggtcgagagcaggagggggcccggtcgggcggcggtcagcttttcaggtcggcgtcgttcaggcccgaagcgttcttggcgtccttcacaacatcgtctttgaccttgcggacgtcatcgaccagatcgtcggaggactccttcgcttcgttgatgcccttcttgaactcggtgagactctttccgacgctgcgtgcgatttccggcaggcgcctgccgaagatcagaagtgcaacgacgagaatgaccagccactcccactggccgggcatccaagccaagacgttttccgtcgaatcaatcatggtcatctcctaagtgcgttgctgcgtgctcctatgtgtgaaatagggcatagcatcctaacgttggttcttgagtcattctttgccctccgcagcagtttcggtacttcgcgtacctaggggaggcgacaacgccatagttgccactctaatcgcatggcagcatcgggtcaaacaaaatatacgacagccgtctacacacggttctggggactgccggggtctgccctgcgaacagcctgggggcgagttttcggatcatatcggcagtctcccgctcggcgtgatatgggacgtttcgagacggttcagcacatctacgcatcgtaaccgttgcggagaaaggatagaacgcaaaaccattttctctaaagacttaagaacgatctcggcctttttttcttgccctggtaccccggtttcggctataatacggtcgttgagattgatggattcttggggggcagaaacgaaccatgagcaggttttattacgaaacttggcttccgttcatcatcagcaagagacgcatcctcattctggccattgccagctatatcgccctgtgctgaggtttgcttgctctgtccacgatcaacctgtctgaagaccggcttccccgcgcatgctttcaccctgcgtgtttgatcgccccctgcttggagcctgccgctccgcattcctgaaccgctcgcacgaccctgagcacgtcctgcatcgccgcaacatcgtgtactcgaacgattgacacccctgccgcggcacaaagggccaccgtcgccgctgtgcccaaaacacgatcggcgggcttctcccgacccgtgattgtcccgatgaatcgcttgcggctcggacccaccagcacacggtagcccgtcgccacaaaacgtccaatctgcttgagcaagagcaggttgtgctccagagtcttgccgaatccgattcccggatcgatccagatccgctcgctcgggatgccgaacgcctcggcccgcctcgcccgaccgaccaggaaatccaggacctcccccaccacctcttcgtactgcgggttggtctgcatcgttctgggggttccctgcatatgcatcagcaccacaaggacctgcgactcgtccgccagccgggccatattgtcatccgcgagggccgtgatatcgttgagaatggtggctccggccgccagggacgcccgcgccacttccacatcgcaggtatcgatgctgatcgggaccttggtctgacgcaccagagattcaatcaccgggattacgcgacgaatctgctcggccgacggcaccgacgcggcgcccggccgggtcgattcgccaccgacgtcgatgatagccgctccttgggaggccatctccaggccatgcgcaaccgccctctcggcatccagaaactgtccgccgtcgctgaacgaatcgggggtgacattgagcacgcccatgatcaaacagccaccggagaaatccaaagagccgcccggccaccgaagcagaccgtcagtcgtcgccttcacgccgccgccctttcaccttaaaaccgatccccagcagcttgcgaatcagcacgccggccggctccggcacaacgaccgtggtgttgtggaactcgcggcgcaccgggtagttcttgcgcagggcatcgaaaaaccgtcctcgggcctcgggtggttcgttggcgatctggcggaggttggcgtcgtcccgcacgatgctgtagaccttctccacagcaagcgcaatggccgcctggtcgtcggtgacatcgccaggcagctcgatcgtggggacctcgggagccggcaggaaatcgcccgcatcgaatctcgtcgggaggccgaagtgctcgcaaagagcctgatagatcatgatcagaccggcgatcttcccgtccagggaatacccggcgatgtgtggcgagcccagatccaccttttcaagcaggcgcacgtcgatattcggctcgttctcccagacgtccaaggcgaccgccgtcagacgctgcgagtcgatcgccgtcgccagggcctgtgaatccaccaccgcgccgcgtgaggcgttcaggaagaccgccccctgcttgagccgggagaagaacctgccgtcggccagatggtaggtcttatcgggaccctcccgcgtcaggggcgtgtgcaacgtgacgaaatcgcagtcgctgatcgcctcgatgggaacatacttcggatcgccggttcgtcgctggaggggcggatcgttgcgccgcacatgcatgcccagggcctcgcacttggcggcgacgcgcccgccgacgttgccgacgccgatgacgccgatggaccggccatcgagccggatcgcgtgccggcgggcgatctcgagcaacgccgcgacgatgtactcggcagcggaattggcattggagcccggcgccgaggcaaagccgatgttgtgcgcatcaaggtagccgagatcgacgtgatcgaagccgatcgtcgcggtggcgacgaacttgaccgaactgccggagagaagtcgctcgttgacctgcgtaatgctccgcacgagcaacgcatcggcgtccgcaaccgtctccggcgtcatgtcacggccccccaggacctctacgtcacccaccgacgaaaaacactctcgaacgaaagggatattcccatctgcaacgatcttcatgaaacctcaaagctcaaaacctgctatctccgtgccgcactgcggacacctggaatcctgaatctcattggccacgatccgatagcccatgcgttcgatcagcaggcgtccgcacctgtagcagaaggtgctctccgaacgcgttcccggaacgttgcccaggtaaacatagcgaagccccgcgtctttgccgatgcgctccgcccgctgaaggctttccatcggtgtgacgttcgcctcggtgtacttgtactgggggtagaaccggctgatgtgccaggggacatccgggcccgcctggcgaaccaggaaatccgccagctgcttcagttcctcctccgagtcgttcgcgcccgggatcagcagggtcgtaacctcaatccaaatatcggtgtcccgcgcgatataggcgatcgtgtccagcaccggctgcaaccgggccttgcacagccggcgatagtaatcgtcgctgaaggcctttagatcgacgttgatcgcatcgagccaatcccgcgcgaagtcgattgcctcgcgcgtcatatagccattgctgacgaagacgttcgccagacccttttccttggcgagccggccgcaatcggcgcacagttccatgaacacggtcggctcggtgtatgtgtaggcaatgctcctgcaaccgctgcggagtgccccggcgacgatctgctgggcggtcaggggctggccgtcaatttcgccgcctccgagcgccgcctggctgatctgccagttctgacagaactcgcactggaagttgcaccccatcgtggcgatggaatagctcctcgagcccggctggaaatggaacagaggcttcttctcgatcgggtcgggattggccgcacagaccttgtcgtagttcagggaatacagcgtgccgcccacattccgccgtacacagcagtgccccaaccggccgtcgccgatcaggcaccgaaatgcgcagagatggcagcgaaccttcctgtcctcgacaggttcccacagcacggcttccttcagtttgccttccttttccatggccaattcccaggaattgcgtttgccggcagcggacccactataaggaatgccccggccgaaatcaacgaccaccggtcctcggcaagggaaaggtcgtctttgacaacaaggacgcggggtcctcgtgcgctgttcagatcgtgcgcatcgggtccatttgtttgaggagcgtctcgtcggggccaccgccgaactgccgccagtagcgttccttgaacggactgcccttcatcgatcgcatgccggcgttgtagagattgccccgcgcgtggccgttgtcggtcatgaagatcagcagcgttcgctcgctgagcctccactcgtcgagtctggcaagcaggcgaccgaagttatcgtcaatgttggtgatcattccataatacgccgcataggccgcagccagacccacatcgagatatggcttctggtatgactccggacaaacgtagggactgtgtggagcgttccacaatgtaggcgaagaagggctcgagcgcctgcgactgccgacggatccagtcgaacgcgcgctcaaaaagacgtcggcgcagaagcccccggtcttgacgaacgtgccgttgtgcaggatcgccgggtcgaagtacgtgttgcccggagcgtcaccgcaactgccggggtaggtctggccgatcccgccggacccgtggatgaagacctcgtcgaagccgcgtttctcgggctgacctggaaatcggtgaatcgaacgctctgggcgtgcagtcggtccaggttgggcgtttggatgatcgggtttccgtggcaggccagctcgccatagccctggtcgtcggtcataaccaggatgatgttcggcctgctcgcggccaatcccatcgtccgggcacatgcgaatggagacgtccgtgctgccacgcccgccagaccggcggccttgacgaaatcgcgtcgggtcatcgccttcatgcctcttgcctttctgctcttcggatctgagctgatccacgttacccgaccaggcccattcggtccagcacgacactgatcgtattgacgaagtatcgaaggcaaaggtatgatccgcccgatatggcagcctggtcgtacaggagtgttcgcagacgcgtgcaggagatcgtggcggtcgcccggccgggcgacaccgtcagccgggtgttcgatgtcgcgatcgtcgtgttgatcctgctgaacgtcgcggcaatggtcttcgagtctgtcgcctcgatccgcgaagcgatggatggcgctttcacggcgttcgagtacgtctctgtgatcgtcttctcgttggagtacctgctccggatctggtcgtgcgtcgaggagccacggtatgctcatccggtattcgggcggcttcggttcgcgcgcagtccgctggcgttggtcgacctgttggcggtcctgcccttctatcttccgttcgtcaacatcgatctgcggatgctgagaatcctgcgcatcatgcggatcgcgcggctggcgaagctcggacgctactcggattcgctacagaccctcggccgcgtcgtcgcgaccaagaaggaacagctcatcagcaccgtgttcatcctgctgatcctgctggtcatttcttcgtgcctgatgtattacgcggagaacgagacgcagcccgaccacttctcgagcatccctatggccatgtggtgggccgtcactacgctgaccaccgtcggctacggcgatgtccttcccgtaaccgtcatcggtcgactcatggccgcgatcatcgccgtcctcgggatcggcatgttcgcccttcccaccggcatcctcggggccggcttcgtcgaagagatggaacgccgcaaacaaccgcgatgctgtcctcactgcggcaaagaactgccgaaatagactggactcggcgggcagtccccgccttcggttctggctggaatcggggcagacgagacgataccatcctgggaccgggcggacagcggtcggcgcgggtgaatcgttcacacagttgcgatgtcaacaggatcaaggacacggaatgcgacagatcggccggctggaaagcgagacgcaggcaaggcagttcggggacttcctctacagccgccggatcgagaatcaggtcgacccggcctccgacggcggctgggacatctgggtcctcgacgaatcccgcctcgaagaggcggcggcgctgttcgagcgtttcgtccagcaaccagatgactcgatgtttgtcctcggagccggcgagggcgcgcggcagcaacaccgtgacaggcaggcgagcgccccgaggcgggcgcgccttgtggaaggccgaaccgccttctacagacctcccgtcggctacgggattctgacgatgacgctggccgctgtcagtgtggccgtgacgctggcgaccaatctgggccacaacgaccgcctcgttgcgtatttgtccatcgcgcactactccgcggatggagattacgtgcaatgggactccagcctgtccgaggtccggcacggtcaggtctggcggctgttcactcccatattcgtccacttcgacctgctgcacatcttcttcaacatgctgtggctctgggacctcggcagcatggttgagacccgcaagggcacgtggcggctgctcgcgctggtgctggtcgtttccgcgctgtccaatgtcgggcaatacctctacagcggaccgacgttcggcggcatgtcgggcgtggtctacggactgctcggctacatctggatgcagggcaaattcgatcccgcctccaatctcgaactgcacccccagaccgtcacgctgatgatcgtctggttcttcctgtgcctgacgggcctgctcggcagcgtcgcgaatgtgggccacgcggtcggcgccgtcatagggattggctggggctttctggaggcccagtgggctgcctggcgccgccaccatcgatgaaaggaccttcacatgagaaacagagtgctcgttggttggtgtctgtcggctctactgtgcggcgtgtgcgacgccgcaaccgagcgaatgttcgacctggccaatgccccagccccgctgttcagcgacccgatctgggatggggccgccgatcccgctcccgtctggaaccagcaggcgggcgaatggtgggtctactacacccagcggcgcgcgacccttcaaccgaacgagggcgtcgagttctgccacggctcggccattgggattgcggcgtcgaaggatgggcggcagtggcgctacctcggcacgtgtcagggcgatcagggccttggcgaccctatcgccaacaactgcagctggtgggcgcccggcatcctgtattacaacggtctataccacatgtacgtctcctgggtcgacggcatctacaaggactggatcggcaagcggttcatcaagcacttcaccagcgctgacggcagagcctggacctttcagtccacgctcgacctgtcctcggaccggtgcatcgacgcctgcgtctatcgggcgggtgacaattggtgcatgctctacaaggatgaggtccacggatcctattcctacctcgcccaaagcgacgacctttaccattggacggtcgtgggaccggcggtcaccgacgtcagccacgaagcaccgttcgtctggccgtggcaggacgcctactggctggtggtggatgcggggcagcgcggcatacgggcctatcgctcgcaggacggcctgaccgattggcagttcgacaacggtctgctcttcgatccgggcaaacgtgtcaaggacgatgccaagggaggccaccccggcgtgatcctgctcggcgaccgacccattatcctttaccacgtgcactacccgccggatcatccgctctaccgcaccaaccgcaccgtgctgcaagcggccgagctcgaataccacgacggcacgatcacctgcaaccgcgacaaatacgccaagccgtaaacgcagagaacgccggccaactacggtcggacggcggtgccgtcggggcggcggacgggttcccagtagccgggatgctcgggcaaggggaacttggcggcgagggtctcgtcgatgtccacgccccatccgggagcatcgttgatgtacatgtagcccttctcgaccgtgggagcgccgggaaaaacctcgcgcgtcttgtcgttgaagctgaccgcttcctgaattccgaagttccagatcgccaggtcgagatgcgcgttggcggcgtgcccgaccggcgagacgtcgccgggcccgtgccaggcactgcggacgttgaaccactcgcccagcgccgcgattttgcgcgccacgctgaaaccgccgatctgcgagatgtggacgcggatgaagtcgatcagccgctcgctcatcagcccgacccactcgtgtgggttgttgtacagttcgcccatcgcgatgggaacacaggtctgctgacgcagcagtctgaaatagccgatgtcctccggcgcgaacgggtcctcgatgaagaacggccgatacgcttccagccgcttgaccagattgatcgcctcgatcggagggatgcgctcatggatgtcgtgcagcagctcgacgtcgtcgccgcacgtcttgcggatatgttcgaacatctccagcgtgcccttgacgtagggccggacctccatgttcgaatcgaccggcgcgccgaaaccggcctccttgaaatcggcctgcttcgacagatgcggcgagccgtagccgccgcgctggatgcggatgtgacggaacccccgctccatcgcccgacggacgctctcctcgatctgggccagcgtgcccccgccgcaatgcgtgtagcaatcgaccgcgaaccggcacttgccacccagcaactgatacacgggcatgttcgcccgcttgcccttgatgtcccacagggcctgatcgagcccactcagcgcattgttgagcaccgggccgttccgccagtacgagctggtgtaggcattctgccaaaggtcctcgatgttctcagcgtcacgtccctttgcgaacggtcggaggtactcgtcgaccgccgtcacgaccgtcagcggccgctggttgaacgtggcacagccaagtccgtacaggcccggttcgctcgtctcgaccttcaccacgcacaggcgaattccctgcggcgcggtgaggatcgcccggacgtcggtgatcttcagcgggggcaagccctttgtcgctctggcgtactctgcggccgaggcgtcctgccgccggcccgccagtccgagcagccccgcagcgccaaatccaagagcccccagcatctcccgtcggtccatccgtacctccttgtcctgattcgtctgcctgccgggccccaactaccagcggatgggatggccggtctcgccctggccgcgatcgacctcgtcgatcttctgcgggccgtacaccgtgacacgcatccgctcgcccaccttcttgtagtgcaacagcgcgctgtctctgtccttgaagtccttgtcgatgaacagcagcgtcgtcagtccgatcaggattacgtctccgtcgaccagaggtgtctcgccggagatccgctggttgttgatgtacaccccgttgcggctcttcatgtcgtaggcgtagtatcggcccgtcttctcgtcgaagcggatttgcaggtgtttgcgggacaccatgttgtccaggatctgaatcagcagggcttcgtcccgaccgatcacgctggtccgatgcccgagtggatagtagtccccttcctgcctgcctgatgtgacaatgagcgatgccatggctgcgaccccgaccttctgcccgtagaaccgacctgcccagtaccccaatcgtagagacccgatccggccctgtcaaccctcgaccgagcgcaaccgttccaaggcccgccttgacgcctccagactgatccggtaatctcagacaggcatatgtcggctggggcactcctggtggtttctggagaatcgatggaacagttgagaagcaaacgcggtttcgtctgcgacatggacggggtcatttaccacggttcgcgtctgctggaaggctcgaaggccttcgtggactggctcaaggccgagggcaagcggttcctcttcctgaccaacagttccgctcgctcgccccgagagcttcaccagaagctgctgcacatgggcatcgaggtgggcgaagaccatttcatcacctccgggatggcgacggcccattttatcgcctcgcaatgtcccggcggacgggtcttcgccatcggcgactcgggactctaccaggccctgtacgaggccgggctctccgtcgatgagaacagcccggattatgtcgtggtgggcgagacgcgaagctacagctacgagaagatcgagaccgccatccaactggtgctgggcggcgcgcggctggtggggaccaatcctgacgtgacagggcccaccgagaaggggatcgctccggcgtgccgggccctgatcgcgccgatcgagatggccaccggacggcaggcgtatttcatcggcaagcccaatccgctcatcatgcgacacgcccggaccctgctccagtgcgaacgcgacgagacggtcatcatcggcgaccggatggacacggacatcatcgccggcatcgagtcgggcatcgacacggttctggtcctcagcgggatcaccaaggagtccgacctggaccgctacgcctaccggccgcaccacatcctcaaagacgtcagcgagctgacaaagtagggtgcgtaccgcactccactgcttcggcacaccccagtctacccatcagtccggtattccaacgctccccggttgtctgtacaatccgtcgtcatggacatctacaatctcgtcagcttcacgggtatcttcgtcccgatgggcgtcgcgtgggtcttttcggccgagcgacgcaacatgaaccggcggctgatcgcctggggcgtcgtgctgcaactggccgtcgcggcgttcatcttcctggtgccggccggagcgaaggtcttcctgctcgtcaacgacggggtcgtccgcgtgattgactcggccggcgccggcgcacgcttcgtcttcggccgcctggccctcggacccggccagactggagacgatggcgaaacctcgctcggcttcatcctggcgttccagggctttccgacgatcatcttcttctccgcgctgatcgcgatcctttattacctgcgggtcatgccgctgttgatcaaggccttcgcccgggtctttacccgcctgatgcggatctccggcgccgaatcgctggtggccgccagcaacatcttcgtgggcgtcgagtccatgctcaccgtcaagccacatcttgcccgcctgacgcggtcggagacctgcacgatcctgactgcgggaatggccacggtctcatccaatgtactggcgttgtacgtcttcagcctgcgggagcagtttccgatgatcgccggacacctggtctcggcgtccctgctctcggcgccggcggccttggtcatgtcgaaaatcctcctgccggaaagcgagcagccccagacgctcggtgttcgcgtcgagccttactacgagaaagacagcggactgttcgaggcgatcgtcaacggcgccaacgccggagtgcgcatgatcgtcggcatcgccgccctgctgatcgccgtcctgggcctcgtggcgctggcggacctgctcctcggcgggctcggagcatggatcaaccccgcgttcggctggcagggacagtggtcgctccgggccctgttcggatacctgttctaccccctaacgctgatcctgggcgtgccgctggcggacgttcgagagatttcgcgaatcgttggagaacgcctgatcgtcaccgaggtggccgcctacaacgatctggcggccgcaatgaagaacggcctcttgcagcactctcgctcggcggtcatcgccacgtacgccctgtgcggattcgcccacattgcgtcgatggcgatcttcgtcggcagcctctgcgccctggcgccgcagcagacgcggaacatcgggccggtcgcggttcgagccttgatcgctgcaacgctggcctgcctgatgaccgcctgcgtcgccggaacgttcttcacggaagggtcgattctgttgggaggatcgtaatgctcgtacggtcgttgagcgattgcgaggagtttgttgccggggacggctcgctgctgcgtgagttgttgcatccggacaagatggaagcggagattcgctacagcctggcacacgcgagagtggcgcgggagaggcgacgaggccgcatcgcctggcctcctcggaggtctattacgtcatcggcggctgcggccggatgtttatcggcaacgaatcgcaggttgtcggcgccggctgcgccgtctacatcccgccgaatgccacccagttcatcgaaaacaccggcgatgatgatctcgtcttcctctgtatcgtcgatcccgcctggcgagagcaggacgaaaaaatcgtcgcggactgaagaatatggcccggattccggttttttttgttgacgccgaaagccaccagttgtatgatatccacataactcaatagtccatcggtgaccgtcagcaccagggacgcactcatggccatccaaacaccagttccaagcaatcgagaccaccgtctcgggtggctgtgggccgggatcgcccctccaccggccccccaacgtgcaaaacaaacccaattatcggccgtttcagcccaagaacagcgattcgaccgaggaaacgaacccgatcgaacccaatctgagccaggctccagaccaccggccgcaggcccgagggatgcatcgtccgacagatcggagggaccacaatgcgccaaacaaagccaatttccgcgtttttggcccaaaaacgcggtttaccgcccaagaacaaagccaatctcagccgaggccagaccgactatgaacccgaaacgccgtattgagggatgatgcgatggcaaggccagacgagggagagaaccagcggcaaccccgcttcagccaggggcagtacgacatgctcaaacgctgctccgacagacaggacatgaccgagtggaacgactggcgaagacagcaccccgaacaggatgtccttctggaaaacatcacactacagaacggcttcatgagaggggccatgcttggtgcctttccgaattctgggttcagcggcaaggttcatctcgaaggagtcaagcttcacggaacttacctcgagcaggccgatttgagttgttctcatctggagcattcgaagcttatcgctgcattcctcggcggagcggatttgcggtatgcatgcctccaagatgccgatttctcccggtttgtcgtggacgggacaaccttgctctaccgctgtgaagtgaacaggaacacgaagtttgagggtgtcgctcttgctgtaacgcgaatctacccagacacaagccaactcctggaatacaacatccgccggatgaattgggagcaatggtacaaggaacaccgatgcctgcgatggccggtgcgactgttctggctggcatctgattacggtttgtccacgtggcgcgtcattgtcagtttcgggcttctcgcatcagtctttgtgattgtctaccggttgtggccgggctgtcttgcggtcgatggggaggccggtgacattcgtggcttcgtgcacgcgctgtacttctcggtcgtgacgatgacgacgctggggttcggtgacatcgccgccaatccggacagcacgtgcgggcaggtgcttctgatgttgcaggtgattctcggatatgtactgctgggggcgctggtgacgcgattcgcggtgctgttcacggccggcggtccggcgtcgcccatgagaaagggttcatggagcgcatgtgcggatgggtgaagaagttgctcacgcgaaagaaaatgaaatgaagtacttggcaacgatcaatgtgtcaccccgagcctgccgaggggtctacccgaggacaagaggcgcgcatggcctttggccagatgcttcgacttcgctgcgctccgctcagcatgacaagagaagagaggcggctctcggacggataaagagggagtcccttgtgccgcgatgctggctgcgttgtgggcgcggtcatgcggtatgagcggcggatggtggactatatgatgacgaccgagacgatggtcacgtttgttgtttacttcgtcgtcctgctggcgatcgggttctacttctaccggcgcaacgagagcatcgaggagtacctgctgggcgggcgcgggatgggtgcgtgggtcacggcgttgtcggcccaggccagcgacatgagcggctggctgctgatgggcctgcccggggcaatctacgtcggcggcctgacgaacgcgtggatcgcggtcggcctgttcatcggcacaggcttgaactggctgctggtctcgcggcggctgcggctctatactcagaagaccaattccatcacgctgccttgtttcttcgaggcgcgcttcggtgaccctaccggcctgctgcggaccgtctcggcgatcgtcatcctgatcttcttcacgatctacgcctccagcggcctggttgcggcgggcaagctcttcgagtccaccttcggcgtctcgtatccggtcgcggtcgtcatcggcggcgccgtcatcatcgcgtacacgttcatgggagggttcctggccgtttgctggacggacgtgttccagggttcactgatggtcatcgcgctggtcgtcgtgccggtgctggcctacgggcgggccgggggctccgccggcatccaggacggcatggcggtgaaggacatcgcacggagcctcagccccgccggcggaccggccgcctctctcgcggtcgtctcggcgatggcctggggactcggctatttcggccaaccccacatcctcgtgcggttcatgagcgtcaaatcgctcgccagactctcccggtcgatggtgatcgcgatggtctgggtattcatctcgctggccggggccgtcgcgatcggcttgatcggcatcgggctgtttcggaccgtgccgggcggagaccccgagaaggtgttcatctacatgatcgccgaagtcacccgtccgtggctgggcggcatcatgctggccgcgatcctctcggcgatcatgtccacgatcgattcgcaactgctcgtctcgtcatcggcgttgaccgaggacttctaccgccgggcgatccaccgcgacgccactccgcgcgaagtcgtcctcgtggggcgcctgtgcgtcctcgtcatctcgctgatggctctgatcctggccctgggcgtgaagacggagactatcctggagatcgtcgcctacgcctggggcggattcggcgcagccttcggacccctcgtgctgtttgcgctcttctcaaagcgaacaagctggccggcggcgctggcgggcatggtctgcggcaccgtcacgctggtcctctggaagcaggtgggtatgagcgaacggatgtacgagatcgtcccggggtttgtcgccaactgtgtggccatcgccatcgtcactcgattcatcgaacagaccgatgagatggtgttgcggcaattcgatgaggtcgttgcacagatgcaagaaaggacacgatgagccagatcgccgtcgatatcgtgctcttgcctgaggcgaagatcgcgcaattggcgatcgagacgaaccgcaagctgatcggcagccattgtcgcgagatcgtgctcgccgagaccacgtgcctgccgcacatctcgctggcgatgggttgcatcgagtccgatcaggtcgatgcgatccagaagaggctcgatgggatcgcgaaggcctgccccgttggcaagctcacggtcacgggggtcgtgacggtgctgaatgcgcggaacgagccgaactcgctctttgccgtggccaaaactgcggccctccagaggctgcacgagcagatcctggagatccgggagccccccctgagcggcaacgtaaccgccgagatgctctgcggcgacgacgaggcagcgccgagtacgctggcgtggattcgggactaccgccgcaaggccgcgtttgaggcgttcttcccgcacatcacgatcgggtacggcgtggtgaccgagcccatgacattcccgatcgattttgtcgcaccacagttggcgctttgccacctgggcaaccactgcacgtgccgcaaggtgcttgcctccgtggccatgcccgatcagtgagcaatcacgctggagacgcggaagaccggcagcagaagcgcaatggcgatggttccaatgatcgccccgagaagggtgatcatcagcggctcgatcactgtcatcacgctctgaatggaggccgccagcctcttctcgtagaagacggagatcttgtcgcacacctcgcccagccgaccggccttctcgccagcccgcagcatctggatgatgccgggcgcaatcagcttggcacgctcggagatgagaatggcctcggaaagctggtacccatcctgaatcttgtcgtccacttcctcccagagttgctggaagtagtaattgtccacacagccctggatcacgcggatcgcgtccagcaggcgaacccccgtgttgaccatcgtggccatgatccgcatgctccgcgtgacgaccatgtccacgaacatggtcccaatgaccggggtccggattttcatcccgtccaggacgcgccgtcccgaaacggtgtgcgaccagccgtacaggcccgtgcccagcaggatggcggtggtcaccagcacggccatcatctcgccgttgcccagaacatgactgatatgaacgagtacctgggtgagcttgggcagcgccgcttcccgggtctcatagatccgcatgaaacgcggcagcacgaagaacatcagcgtgccggtggcggcgattgccatcagtaccatgatcagaggataggtcagcgcgccgaggatgcgtttgcgtgtgtcggcctcgaagttgaggtatccggtcaggaccgacagcatctcgaccattcgccccgaagcctccgaggctttcaccatgctgacgaacatcttgttgaacgtgttcgggtagcaggtcagggcgcgggaaaacgtctcgccgcccttgacacgatccgagaggtccagaataacggctttgaatcgcgggtccgcggcctgttccccgatcgcgtcgagggcgtcactgagaatgacaccgctgtcgagcatgaccgccaactgcgtcgtgaagagaatcaggtcgccgctcttggcgcgcacctttcccatcggtcccgggtccgccgcacccggcgcggcaccgccggagcccggcttcggttccggggcccccgccgccgacgtatcgccgtcggggccggtctttcgcatctctgtcatcaaggtcgccataggcccacttcgctattccatcggtctcaggattcgcccatccccgtcgtatccagagccgtgattcgcaatatctcttcaatcgacacgatccccgccttgaccttttcgatgccgtcaaagtgcagcggcgtcatgcccttggccaaggccgcggcccggagcttcttggcgctgacgcgttcattgatcatctccatgatttcgtcgtccggcaccagcagttcgtggatggcgatgcgcccggcatacccggtgttccggcacttcttgcaccccacccctcgatagaacttgcaggtttcgccaccctgggcctgtacggccttcttcagactgggcggcgggtcgtattcggtcttgcagttcgagcagattttgcggaccagtcgctgcgccagaacgcccttgagcgaagcgctgaccagatagggggctactcccagatcgagcagacgggtcaccgcacccggggcatcattcgtatgcagtgtcgagagcacaaggtgtccggtcagcgcggcctggacggcgatattggccgtggcctgatcgcggatttcgccgaccatgataatgtcggggtcctgtcgcaacaggcttcgcaaagccgtcgagaactcgaaaccgaccgcggcattgacctggaactgattgatgccggagatgttgcattccacggggtcttccaccgtgcagatgttcacctcttcgctgttcagctcggacaacgcggcatacaacgtcgtgttcttgccggagcccgtcgggccggtaacgagaacgatgccgttgggcacctgaatgacctggcgaaaacgcaggagattgtcgtaggtgaaaccgagcgattccaggttgtagaggatcttctgaggatcgatgacacgaatgacgaccttctccccgtgattgcccggcatgacggagacgcgcagatcgatcggacgaccttcgaccaggacgtgaatgcctccgtcctggggaagacggcgctgcgcgatgtccagttcggccatgatcttgattcgggagacgatcgcggcgtgcatctgatacggcggacgcatcttctcgtagagcttgccgtcgacgcgataccggacgcgcagccgcttctcatcgcactcaatgtggatgtcgctggcattctcgcgcaccgcgttgtacagcaggtagttgaccagtttgaccacgggggattggccggccacctcttcgagattgctgatgtcctgcgtgatgctctcgatgagcgtaaactcttcgagcccctcgtcgtcaataatatcgtcgatcacaaacacgttggcggccggcaggtaggactgaagcgtcgcccggatgtctttggtggtcgagcagacgacccggacgcggcacccgctgatccgctcgatctcgtcgatcagaaagacattggtcggctcgttgacggccacagtcagaacatcgtggaccttgaacagcggcaaaacgacgtgtgcctcgagaaactcacgcggcagcagctccaccgccttgggatcgcacaacttcgggctgacctgcgcgtagggaaccccataggcctcggccagggccgccgcgatctggttctcgctgcaatagcccatctcgacgagcaattcgcccagcagtttgtgatggcccttctcctgctgttcggccagagcccggtcgatctgctcctgactgacgacgcctcgtgccagcagaagctggccgagctgcatcttgttctcaagcagaatctgactcataccctacggtccccatgccctcggcgatcaggcaaagctgcggacggcctcggccaactcgacgtgacggtcgaattcggtctggaggccggtaatctcgaggatcttctcgatggtctcatcgagtccggccagccggagctgcacgcggttctgccggcagtattgccgcacccacagcaacagctccagtccctgactatccacggcgctgacgttgctcatatcgaccacgatccgtttgcggcccgcggccacggtctgggtcatcgtgtccttcatcgattcctcgatgtctccatcgagttcaccctgcaactcgatgaccgtgacgtcgttgtagttctgcaggttgatcttcatcgcaacaaagtccctatcgccgtcgtcccataatcagcaaaatggcccgcaccgtacatcgccgggccgttttcctgtaacatgtcccacagatggtagatatcgctctccaggaagatgcggccgatcctctcgtcgaactgtgttcccaggcccttccgaatctcctcgagcgcccgatccagggtcatggcatcgcggtagacccgtttggacgtcatcgcgtcgaagctgtccgccagtccgaggatcttggcggtcagcgaaatctggtcgcccaccaagccgtccggatagccctttccatccacgcgttcgtggtgctggagcaccccgggaacgatgtcgcgcatctgcttgatgccgcgaaggatcccggccccgatggacggatgacgctggatgatctcgcgctcttcggacgtcagtctgccgttcttgcggagcacgttctcgtccacgccgatcttgccgatatcgtgcaggagacccgccaggtagatccggtgaatctgctcgtcctccagaggctcctgttccgcgacgcgttccgccagccaccgtgagatgaccgcgacgcgctcggaatgcccccgggtatactggtccttggcatcgatgctgtccgtcagggccttcaacgaaccgaggaacagttccttgagatcgttgaacaggcgtccgttctcgatgaacacggcgcagccactggcaacggagccgaagagcttcatgtccgtgctgtcgaaatcgggcttgtcgatgcggttgacggcgaccatgtatccgatgatcgccaccgcattcgaggcacgaaccgttcgacgcgaatgctgcggctccttcgcgcacagcggcaccgcaatgatgttccggatgctcgcaggccattcataccggaatggcctgtcgatcgcgctgtccagcagagcctcctggcctcgacgaatctcttccgtgaggcgactgtgcagcagagcggccgtgcgggtgtccagatcgatgagccccgacccggcggccaccatgaaccgcttctctccgtcgatgacccgctccagcacgacggcgattccctcgaccagaacgatgtccgtcaggctgtcgcaggccagttgaaggaaggtgctgtccgactcggtgactttcatgtgcgtgctgatcttgtgcagcagcaccagttcctcgtacacctgggccagttccgtacccatcttttccatctgcccgtcgctgcgcgcggagagctggaaattctgcgccatgagctggagcatttcgcgcaggcaggccgagaaccggaacgaatcgctcgtccggctctctcgcatcccgtcgcctggccacgcgccggcctccggcgggccctcatcggcgacgatcacgcccgccaggatatggtcggcggtcgccgcacaaggcaggcacaacggaaccgccagcagcttccgacggtcgcagaactcccagacgcggccctcacaacgttcggccggatgtctggccatggcttgcgagacggcgcgcgccgcctcctccatcgcctccggatcgctgtcgaattgccccccattgcgcaggaccaccatgcggccgtccgggtcaaccacggagacattcacaccaaactgcacaatgcgctctccgaaccgctccagatcgcgtcgttgcagacaggtcagtcctggtgtcgttctggtcagcatggccctctcagggttcctcaccgtatgccgtgcgtcgtccatcgtcgcggccgtggaatcagttcttcaccgcaaccgcacgctgatagagaatgtcctcgattgtcttaagcagttccttggggctgaacggcttgctcaggcactcctgcacgccgagcgcctcctgcatctcctgactgatcgcgaagctgcgtgcggttaacaggatcaccggaatgtgcgtcgtggcctcgttcttccgcagcttctcgatcagttcgagccctgtgacgaacggcatctggtaatccgtcaccacgatgtcagggttctcgcggcatgcgagttcatacgcctcggctccgttgttggccgcaatcacctcgtatccgttgttgcgtaacttgatcgccacgacatgaataatgtggatctcatcatccgcaatcagcaccttcttgcctgtcattttcatccactccaaaactgggtttcgggaatcccctctccgtgaagaggcgtaaactccgccgttatcgggtcgtgccggccagttcggcggccgccagaggcagctcgaatccgaaggtgcttccaacacccacctggctggtgacgaacacacgaccgtcgtgtactttctcgacgatctgcttgacgaggttcaggccgagaccggtccctttggcctgcttgttgttggcgctcacccgatagaacttgtcgaacacgtgagcgatctcgtcggcgggaatgccgacgccggtatccgtaacggtgacgcggaccacctcctcgatctcgttcacctccgtctggatccgcacggtcccgccggggggagtgtacttgaccgcgttgctcagcaggttcacgatcacctgcgagatcatatccttgtcagccagaacctggtcgtacacgatgggtttctgccccgtgactgtgattcccttctcctcggcgaatcccttgatcatctgcatctgctgttcaatcagaatcgtcagactgaccggttctttctggaccttgatcagtcccgactcgattcgtgagacattgagaatatcctcgatcagccggttgagccgctgcgcctgagtctgaataacctggtagaactccttgcgcgtccgctcatcgtcggcctccccgtcggccagcatctccgaatacgccatgatggaagccagcggcgtcttcaattcgtgcgagacgtgactgacgaagtcgttcttcatctgagagacttccttttctcgcgtgatatcatgcagcaccgcgaccacccccaagacccggtcccgctcgagaacgcatgagacgatcgtgtcgaacgtatggggaccatcgggccggacgaactgcatctcgcgacgcgtcgcctccgtggcgctttcccggcaacgctgaatcaactgaacgaaatccttgtgcgccggctcgatgctctgctcaagcggctggtagcgcgcctgctccgggtcgaacccgaagagctgggcggcggccgcgtttgccatcagcagccggtcggactcatccaccacgagcacggcgtcgcgcaggctataaatgatcgcctcggtgtgctgcttctgtcgatcggcaagttgagatcgaatgcggaggtcgcccagttcggcttccagcgtgcgaagggctttctggccttcctggaggcgtgtctgaaccgtcgcggccgcccgctcgacggcttggagatccatcgagccggccgcgtcgcaggaaagctgccgggctatggacgcaatcgccccggccagccgatggtaggccagacccaggatgatcacgcccacagccccgctgcagcaggcgataagacgccacgcaacgagatggttgcgccaccctactccgatgccagaatggaaaggcccggtcagggccgcgatgcacagcgaggccatcaccatggcaatcgcggcccagactaagcgtctttggcgtctcacaacaactcctccgaacccgtagactacgggcatgaccttcgatcagggaagacgcgtcagcgtctcttccagttccgggcctcttgctgatcaatcgcctgttggacgatgctgtcgatccgctcgagttcctcgggatcggtttctacgataatccgttccctcagccgcagcgcctccagatacgtcggacgcatcatcagcgcgaccttgacgttgtacacggcgctgtcgacatcaccttcgagatagtacttggccgctcgggcgtaggcatcctccgccatgcgggcgcgatcgaggccctgcaggttgtgcttggcgccgtccatcttcagccggatatcgtcggcacggtccgcgccgccgacctccgaaggctcttcgatgatgtgaggcgtcagcaggatgatcacttcttcccgcagcgaggtgtcgtcggtgccccggaaaacggctccgatgatcggcagactccccagcaagggaacctgcgcgcgcgtagccgtgatgctgtcacggaacagaccgcccagaatcacggtttccccgtctttgacgatgacgttggtccgcaactccgtggtggtttcgtccggaatcccctgggcgttcagactgccgtcgctgtctttcggatagatgtccatccggatgtagccgtcgctgccgatgtacggccggaagatcaactgggtaccggtattcaagaaggccaccgactgcgtggtcgaggtctgggtctgggtcgtctgatccagatagcccagcttcttaccgatcagcaccgagccttcctgcttgttgaccgccaggatcttcgggttggccagcagcgtcgtatccgtgacttcttccagggccgtgatgatggcctggacgttgtcggacgagaatccgacacgcagaccgccggccgcgttgggaacccggaaaccgctggtttcccagggcgtaccctggcctccgacaatgttcgccggaaaaccggtgacagccacgccgctcagaaggttccagtccacaccgaactgtgtctgttcggtcagccgggcggccagaatggtcgcttcgaccaggacctgcttcggccgaatgtcgatctgcgcaatgaccgactcggccttctcgatgttctccgggaagtcgaagatcacgatcatgtcgttggtggccgtgttgtcaccgccgccgccgccactgagagaccctccacccgaacccgtgctgctggcggaggagatcttctcttcggcggcctgtgtcttggtgatctgcgcgctggcgctgagcaccgggcggatcagcttctcggcctcttccgccgtcgtgtagtacagcgtgatcaccttgtggatcatccgttcggggtcttccttgatcttcttgtgttcctccttggtgcgaatatgaatcaggttgccgtcctgcaccgggacgaacttgtcgcccagcatggccgccagcgcctgttcaaacgtcacatcccgcagttccggacaattcaagggccctgtcacactggccgaagggacgatgtttttccggcacagcttggccagcagacgcagcccgtcccgcacatcgccgtccttcttgaacgcgatgaacttgatgacgactccgtcgccggagaagtccacctgggcctgatcgggttcaatggccagcgtatcgagcgtcgtttcggacgtcggtgccaccggatcgctctcggcggccgtcaggggtccggccaacagggccagcaccgccagcacgcaaagccgtcggccccaccgggcctggcaagatttcacagttgttctgtcgtaatgcataaccttactcctgttcttccacatcctgcttggttgtactgatttcattatcgttctaagaccaatgcgtcactttcttacgtcggtgggcgacgacagcttcagcgtccactgtcggtcgcggcaggtcacaagcacggcattttcttgaatctgtactacttcgaatgcgtaggtctcggagccgtctcgaagagtgatggtatccccgaggcgtaccaatcgatcgtcgacgaacgcctgcgggtccgcactccataacacggcctccagcctgagggtcttggccaatttgtcgatcacgtcattggttcgagtgggtgtcactggctgtacttctggaacaggacccgtgctctgtgaatgggataccgtggcaaagccgctccagtcttgtgtcgtgaagaagtctctgtgaatgcggtcatgccgcccgggctccacgggcaagtggacgaggcgcacctgcggctcctgtttcgacggttggtccgtctgcgacgcgggattcggaccggcttccaccccgcgcggtctctggccggtcaggacgcggaaccacatcccggccatcacgaccaccagcgccatcgccaggcccgtcttcctgccacctcggatcaggtggctcgtcatccgggaaaccgagcccaatggattggcggcattacgcttcatcgttcacggcgtccgttcatttctggttcgcggacaggctcgcgtcctgcgtcttccgcgcccgatagaagataaccgcgtccgcctccatggcgacgctgccgttgaaggccttcgtgttggccagggtggtcttctccatgcggaccagccgaccgaggttctgaaggtcctggaagaatccgaagattccgttcaggttccccacacacttcatgtggaccggtatacagatcaggtcacccgagacctgttcctgaccgagcaccacatcctggtccgacaggttgttttccgtcatgatccgggcgatctgtcccaggaattgccccagggcactttcattgggaatccaatcctcatagttccgggcataccgatcggtctctctcagtcgcgcggtcagggacggcagcacgtggctgtgcgcctcggcggtggagatcaactgcaggtgacgcgttttcgcttgccccagagactggagcctttcgcgtaacggcagatacccgtacaggacgaagtccgccaggaacaggccgccgatggcgaacacccacaactgctgccgactcagccaggaattggatcgtctctcgctcatcacgtgtcccgctcctcatagttggccagatagcacgtgatctcaaactccgtgacactgatcgagcgcgtctccacacgtcgggcctcgttctcactcgtacgcgaacccgacgattcgccagtaccaatctgaatcgtgttgtcgcgatacagcggatggaccagttggaagtacggggactcttcgaaccgacggaccagcgcccccacttcggccgaatcgaccgcgattcccgccagggccacccgaaaccgcaccctccccagagaggccgtcttggcggtcgcacgcgaggggctggcgctacgcaccgcggtcttgtcccgttccgaggtcttttccgcagcggccaggggctccgacgtgaactccagacggctcaagagcacccggtcgccgatgatgtaactgatctctgccagcaccgccgccaggtcgatgcgcgcatcgacctgctccatcaacgcgaccttggcctggcgggcggccaactgctgtgtgaccatgttgtactcatgcaccagaccttccgcccagaatcgtcggtcctccagcctggccagatccgcgttggcgcgcgcgatcctgtgcgtggctaccgcgttgtatgtcaccaaggccagaaacaagacgatcagcgcggcatattgccgcctcatgtgaaggcggcgacgtctgccttctctatgccattctggaagaaaatcgatctctttcactaggatgcaccttccagtatggattccagtccgacatccgatttcaccagggacacggtggaagcgccccatcccttgaggcacagcccgaccgccagcgagaagtccgccgccggatacaggtcttccatcgcgaccccgaccgacgtcagatcaaacccgcgcagcggttcggcgatgtccgtttcaatggccaggtggtgcctcatcacgctgagcaaggcctcctcgtggacaccacctcccgccatcagagcccgctcgactcgtttgccccggaacgtcaccgtgtaataccgaagacacaacgagatctctccggccagttgctccgcggtgccgtgcagcgtgtcaacgacgagccggcgcgtcgccgcatcgaccgagtcgtcggacatcatctggcggcgcaaggcctccgcatcggtcaccgagatcgacagcttggccgcgatgtcttctgcgaaccgggcggccccgaacgccatctgcttgacgaagcaaatctcgccggcccgccccaggacgatcgtggtgtaccgatgcccgacatccaggaacatgatggtgcgttccttgtcctcctggcgccgcatcacccgctcaaaacaacgaaacagcgcgcagggcgatgcgtcgatgcccgtcggttgcaggccgacctcttccagaagggcaatatgaccgcggatcgcctcatcgtcgctggcgaacaggatgtattcgttcttgagttcgtcaccctgtcgcacgttccccgccagcacatagctgatggcgtcgatcttcgggttcagcgcgaatcgatgggccgcctctttgcgaagcgtctgctccacctcctcattcggcatctcgggcagcctcaccgaggtgattctcagcttgtctgccggcaaggctgtgacgacatcccttcccttgaaggcgccctcggccagcagacgccgaatggccggcgccacccgctgtcgccatgcgttatcgtcgctcatatcattcagaccgacgaccgctctgccggcagcaagcacccgaaccccatcgtcggacaccgccaactggatcatcttgacgacactgtgtccgatgtccagcccgatgggcaggatcttctctttcctgtttatccagtgggacagtcgcatatcaaaatcactcattcggaaacggagatgaatcccgtcacaggttcgaccgtcacggtccgggtgaaatccccggcatgtagagtcaccacaccttcagcaagcaaacctaccgggctgccgagcggatcgaacgtcacggcatcgccggtgaacgtcgtactgtcgatctccacccgatccagccttccatcggtggcgaaattgaccacgtactggctcttcttcgtgatcgggtgcttgaccgcctcatcgaccgcgtccacaaccttgcggatttcgtagctgtcgttgcccacgttgaacaccaccttgtgccgctggcccgtggtgatggccagactcttggcgtattcgaggtcggccgccacaatgccggcggcggcgcgtatctgcatgctcgccgcggaagacatcatgggcaccgcgatcgccgcagagattcccagaatcacgatgacgatcaacagctcgatcagcgtgaatccggcacaagaccctgcggcctgcccaacagattgtgctgtcgtattcctacccatggtcaactttacctccgtttctctttcgacctgccggcaagtcggcttaacctgcgatcggaccggtccgccgagatatgcgaggattcgcacggccgccgcaagatcaccggcgcgaccgccgtctgctatccggcggcgagatcccaggcagtccctacaggcgtcagaagcgccttgcgacgcggtcaacgtcctgaaaaaagccctctcaaccgctacgtgttgtcgcgtcaaacaggcggcctgggcaaagcctttgacgcacgcgcgtccgccgcaggctgctgcaactcgggcttttttcccgtcggcctccagtggaccgataaaccgttttgtgttctgggacctgatcatccgctgtgccatttcactcttgccgggaatcgatgcttcggaaaaaagcccctcccgccgggctccagtcttcccgcttccccgaagcccacgtgctgattgctgcccttgtgggcgatgcaaccacattcagctcggagccgctcgaatagaaggtccagcgcccgatcagggacgcaccgttgtacacacttacgtcgtccaattgtcccttgaagacattatcacccgtgcggtcggcgccgatgttcaggtgcccctttccaatcccaggcgacgtcgacagggtgcccgaggcacgttcgacccaatcgagataagacttcatatcgtttccccggcggatcacactgacaccgtgccccccgtcggcaaaatcagccaacgtgattcccgtgtcccacctggttgcggttgtcccgtgcaggacaatgagtctggaagcagattcgtcgaactgaagcacccagtggttcacgcttccggttggatcagtcttgcagaggactccggcccacggattctgaacgagctcgggcttgagccacaccatcagtgtgtagtcgccggtcagttgcagagtcgtttcatcgtccagcgtctgaacgtactggtcctcgccatcgagttccagcaagccgttgccgggccacgtcggtatgttccgcaaaatagcctcgttggggaacccggcggaatcaatcgcggcctcggagatctcgccagcggcgaatagcgcgccgcggatctgagccttggtgccatgtcccacgagaacgtcgccgtccacacagacaaggccctcgatctgaaggctggtggcgccgtgaaggatgaggttcccggtcacatacaccgccggcaggttcttggcggcggtgagccttgctccactgcctttgatgacgagatcgccctctaccagcaacatgccgttgacgacaaccgccccgctgagggtcaaatccccgtcgcaccgccagatctttggcgagctgtagcttccggcgctgaccgtgccgggtccaatggaggaggtcacgtagtccggatggctgtagctcgccgtcacggggggccacgtcagtgccagactcccggcacccttatacgttccgacaatgcctccgctcagggcgccggcgaagaggtcaccgtctacggccccggcagcacccagattggtgaacgtcccaggcgtgtacacgtcgccgatcatgctccaggttgcgcgaaaggacagatcggttccgctccagatgccgatggcggggtccaggcgaacgacggcggccagggcgcgggtggccaccttctcgcctccgcagagccgatacgcctcacacgtgacatcgaaggtacattcgtcgctcggatcggcggcaacggtcacgtcatagaaatcgttcgtgttcgggtcgagttggcgcatcgtgcccccggtccagaacggaccttcggcgtcctgtggattcaggagcaatccgcgggcgtgttccagggctgagaccgccacctgatccaactcggtgcgaacggccatgttgtgcccggaggccaactccatgtcacagcgggcgatgaaccccagcgacaacagggtgatcgccatgatgatgcccaggaccagcagcagcgccacgcctttgcgggaagatcgagttgtccggggtcgcttactcatcatcgtcctcggttaccagcccgtcggccgtgttgttcagcaggtggccggcccaggcccgcagggccgcctcgatctcgtacttgtgaacgccgtcgttctgggtcagctcaaacgcgatcgtcacccgccgggtcgacggaggagcaacatcccagccaaactgcacgctgttgcactcagacaggagcggctgggaaacgcccgcataactgttcatcacatcggcctgactgaccgaaaggacacctccactgaaggtcacctccggattgctggcggaagaagaacgcaccaggcaaagcgcatcgtgcgtcgcggcgcagtcgaggaagaccagctcgttgacgttgatgcgcccgtcggcgttgtagtcgctgcgccagatcgccagttcggtgtcggatgcggtcaggaccatccggcagttttgaaccacgtcgagaatgcgcaacgtcgccaggcgaagctggccctgcgacagcgccgcatcgccgccggccctggccgcactgctcatcgcgtaggccagcgtcgcgacggccgacaggatgatcccggtgatgactagggtcaccagcaactcgacgagcgtaaacgccttgatgttcccgtttcggttcatgcgatctttgtccggcacgtgccgttctaccctcggacgccttggccgccctgccgggcctcgacatgacaagagggcgcggatgtcaatccgctccccccgtgaatcgccgcccgcaatcggataggagtccgcctcaattcaaatcactggactcacttactgatcagacgatagatcgtcgccacatttcgcccccgatacgccacgcagaccctggcgaggatgaatctcggcgcagcgtcgtcgctctggccgggcacacggacggatttgcacgaggcctgccggctgtactcggcatacatcggatcggtgccgtcgcctacctgcccctcggattcgaggtgggtggcgtacaggcccaggatgtcgtcgaacggggtactcacgatccgctcgatcaggtcgttggccagcctcgtgccgagcgtgcggcgcacgccttccgcctggacggtcgcaccgcccgcaaacggcagcagcacacccgtggcggcgatccccagcagcacgatcgcgaacgtcgcctcggccagcgtaaaaccgcgccgaaccgcgatgcctcgtcgattgggatcaatagtcatagtatgctcttcccgcgtcgtccgtaccggagttgtcgggtcggatttcgcccgtctgcgccttgtagatccagccatggctgttgtcggcggcggccgggaaatcctgtccatcggccagcatctggatcgtcgccaggccgttgaacgggtttgtcggaatcttcgacagatacggtccgtatttgaagccgatggtccctcgcggggcggtctgtccctcggcgttgctcgacagcagcgcctgatcggcaaagaccgcggcatccaccgccgagccgggaccggccgtatagcccggcgccacctccagatgatggctggtgtacaccaacacgaaccgccgcagcatgttgaggctggttgccagcgtcgtggcccgcgccgaggtgccgctgttcgcaaccgccggaatgaccacggccgccacgatacccagcagaacgaccacgaccagaatctccaccagcgtgaaggctctccctctacacatggtcttcctttcgattcacacagcacaccgccgtgtatgggtaaaccgaatgggcacggagcccttcggagaatgttcttcgtttcgacgcatcacaagcccgcatggtgaacgctgtcgttggcaaagatctcgccggtctcgggcacataggcccagccggcgtttcccggaacgggaacgtccttccggtcacgcaccacaacgatggtcccgctgccgttgaacggattggcgggaacctcttcgagatacggaccatagcggaacacctcgtcccgccgggtccgtggccggtctgtcttcacggtcccgtcggcgtcggtgcaatagagcatctgatcgaatcccagatcgcaaacgatcgagccgtcggccgatcgcatcggcggcctgtcgccgtgctgcaccttgtaaagttcgatctgcgaacgcagcaactggaggtggttgcacagatcgtccatccgattctcggcgatgcccgcccggctgaaccggggtacgacaaccgccgctacgaccgccagcaccatcaccacgatcgtcgcttcgatcagcgtgaacgcccttcggcaaaccatcccgtccctcctctttcctcatgtggccgcaggcatgcagcccttcggcatcggtggtacgaagaaggctgaccggctttcggcaacggccttggcccggtcagcctgattcatcaaacctctatgtcaaccagctatcagattgttgctggcgatgacacagatattctggcggtgttacagcgaggcgtgcggcgtgccgctcgcggtggatccatcgtcgttggggtagatctcgccggtatcctcaaaatactgccaaccggtggtattgtctccgaccgcagcaggcgttccggaggcagccatcgccgcaagggtgttcaggtcgttgaacggattggcaggaactctttccagatacgggccatagataaagccgttggtggcatcacgcaccttgctgcctgcgccctggatgttcccatcgatgtcggtgcagaacgtcatctgctgctcaaaggtggccaaggccggtgcattatcgttgtgctgaaccttgtacaactcgatctgcgaacgcagcgactggaggttgctgcacagactgttctctttggcctcggtgctggcctgggtgaactgaggaaccacgatcgcggccagaatgcccagaatgaccacgacgatcaggatttccaccaacgtaaagcctctgtttgccttcattttgttgtcctcctcgttgtgcgtaagaaaaagaaacatggaaaacgatgggttgattcgacgttgttcgtcgcttgttccgtgaaccttatcgaccgaatcgcaaggtcacttgatttgccacttttcttttgagccgcagaccctttcaaaaaacatgaccgtgtgaattccctgtctccgaattacatccaacccctgttccgtttccttatggatttcggagcctttaactttgtcgcccgaaaacaggtcgggcggcgttatctgcggcccctctcagtccatccaaaccatagaaaacaccccccgcacgtgcaaaactacagacgaaaaaaaaagcgtagggcgagcgtccccactcgccttctcccgacttgtcatgccaaccgagaccctcggcccccttcttgtctttcccgccgcaacgtcccctctccttgtcatttcgaccgcagtggagaaatctggcatcgcatggccacatgcagtacgatggtgtcatgccgatggggaaagtctactacgtctatatcgcatcgaaccaatctcggacgctgtatgtgggcgtgacgaacaatatccgacggcggatcgccgagcacaaggcaggcgaaatcgagggcttcacccgtcggtaccacatcggcacgcttgtgtacttcgagccgttcggcgacgttcacgcggccatccgacgcgagaaacagatcaaacactggcgacgggagaagaaactggcgctcgtcgccaccgagaatcccgactggcacgacctgagcgagggatggttctgaactgcggcgcctgcacgaggaggaacaggccgcgtcaaagtggccctcaagagacccagcgtacaccgcgttcatggccagacccctcgactgcgctcggggtgacaaagagagccgtggccgcagggtccctttcccttgccgtttcgaccggagcatcccccctctttgtcatttcgaccgcgatgcctctccttttgtcatttcgaccgcagcatcccccctctttgtcatttcgaccggagcgaagcggagcggagaaatccgtccatagaccaggcccaggcacaatctacaggcaaatggtgggcacgccccaccctgcggtgtcacagcatggcattaacagacgtggagatactcgggggcatcggtgatgtggatggtgcgggcgcgcggtccggcgtgcgccagggtgatgcgcacagggtttgtagcggcaatcgccggctcgacccggtccgcccattcaatcagcacgaccgattccggatagcacaggtcgtcaaacccgagcctctcgaactcggcgatcgaatccaggcgataggcgtcgatgtgatagaggtccaggcggccggcatagtggttgaccaggacgaacgtcgggctgctcacctcccggcggtcggcggcgccggcgccctcggcaatgcccttgatcagatgcgtcttgccgctgccgagcggaccgacgatcgcgatcacctcgcctccggcgagctggcgacccagggcccggcccagcgcgatcgtctgttccggcgaattcgatgtgatggtgacttccctcatgagtacaagctcgcccgtcgtggcgaaagtccgaagcacgaaactcgaaatccgagacaaattcgaaacccaaagcacgaaggccccaaacgccggcggcggtcagacgttcgtttcggattttccgtcctggacattcggatttgtctcggatttcgtgcttcggatttcggatttcagaattcggtcgccagttgtgcgggatagtaataccccatcgtctgcgcgacgacacccatgcgatactgatgatcggtcagcagacagggacgcctctcgtgcgtcggaatcgtcgtcgtatagatgcgcagctcgcccggaacgctcgtgacgacctcctcgcggtggtcgcccaggcagtccatcacgacgatcacctgtccttcaatcggctggatggtgggaccattccacttcccgatcgcgcggccgaagatgacctctttctgcgggtcggcgtcccaccagagcggccgcggcgtcaggggccgctcgccgttcgcttcgatcaactcgcccgaggcgctgtagagccagcgcttcggatagtcgcgttcccccgcgagcacctccatcccgggatgctcggcgagcacgtcagcggccatgccctggccgtgcagatggaacgtcggctccttgtgcgcccagagtttgcgccccgtccgggcgtccaccacgcacatcccatcggtctgctggcgcgtctcgaagccatagaagatctccaggccgggattggacggatgaatatccgcgacgtaacagacatcaggatggcccatcgccagcgaccaaagccctttgccgttgtcgtcgagaacagcggcgccaaggaccagctcatcccgcccatcccgatccacgtcggccgcaatcaggccgtgcgaaccctgcccggaatacttcgtctgctcctgcgtcgagtcccaataccacagccgctggaggtccttgtccagggcttgaaccttgatcaggttatacgtgccccgctgcataaccagcgaggccgtccgtccgtccagatacgcgacggccaggaagttgcgacagtaatagttatagtcggggtacccgtcccggctgagccagtcggtccgggccacgatgcgtccggtctggccatcgagcttgaccaagtattcaggaccggtctgcacgaggcctttctcgtcacgcgggtcgccttcgcccgccttgcagtacacctccgccctgccgtccccgtccacgtcatagaccacccagggcgagtaccagatgcccgcctcgatcgaccagcccatgtcatgccgccacaggagcgtgccatcccgacggtaggcctcgatcttataggtagtcgtgctgggcttccagtagccgggccgctgataggggtcggtattgaaattcggctgcttgatgaggaattcgagcgagccgtccccatcgaggtcaccgatccccaccttctggaagtcgtaatcgcccgccagcggaatgcggatgtacgacggcgcgtccttgccgatcgtgacgtgcgcggtctccttgacaggcaagccttcctgcgcgtggacgcgaagctcgtagcgtcgctcggacgccgccggatcccacgcacccttgtcgatgaaattcgtcaatcgctgcggcgtcccggtgagtcggacttcggacgccgagtcgtccgtgcgaatgagcgcaaagcacgtctggtcggtgtccgtcgccagcatccgccaactgagaaaaaccgatccatccgcgcgcggtacggccaccagcccccgatccagatgttccgccccgccgcaaacaaggcacaacaacaggacaatgggtgccgcgacaaccgctcgatgcgttccttgtgcgtgcttcatattggtctttccattctgcgccctcattcgggcccgctcaaatggtcgtatccaccgggcaacagctcgatgagcttcccatccggcatgcgaagctgcatccccgtgccttcgacgatccggccgattcggacaagcggcgtcgggtcgtcccacgtctgcaacagccgggtgaaatcgtcgggcgccagagtgaaaagcagttcgaaatcctccccatcgtgcagcgccgcccggagcggatcggccagggtcctggcatcctcggaaatcggaatgctcgccacgtcaatgatcgccccgacgccgctctgctcgcagatgcgattgaggtccgtgctcaggccgtcgctgatgtccatcatcgagtgcagagtcaccgtctgcgccatgcgcagggcctcacggacccgaggttcaaactccagatgctttcgcaggagcgagccgccgagcgagccggtcacgcagacggtatcgccgactctggcgccgtttcgccgcaccggggcgttcgtcgaccgcctgctcagcatggcgacattgaccgcgaagggatgatcgtggcgccacgacgtgatgtcccctccgatgagcggacagtcgtatttctcggccgcccgcgtaatcccggcgtgaagctccttgagctggcgcgccccgaacggcggcggcagcgccaccgccacgaccgccgccagcggcacggtcgccatcgccgcgcagtcgctcaaactggcggccatggccttgtagcccacctgttcgagcgtcgcggtcttcagatcgaaatgcgagccgtcgaggagcatgtcggtggtgatcagcaccgacgcggtctcattgaggcgcacctccgccatgtcgtccccgatcccgatgggaaacgcggccggatcgatgcggctctgctgccggaaccatgccgtgatatcgtcttcgcgaggtctcatcgttcagcaagatgtttcttccagtaggcgatccggcccttgacttgttcgggcccggccgcacccgccgacgcataacgctggaccacatgccgcgccccgagatactcgtacacatcgcagccgacttgcgggcagtgttcctggaacgtctccaacggcacatccgacaaggagcgcccgtctttctcgcacagcgacaccagcgccccgacgatgccgtgcgcctggcggaacgggacccccttgcccaccagatactcggccagcgccgtggcgtcgaggaacccggcgtccaggccggcggcgatccgggcggtcttgaactgcgtgtgcgccaccaccgcccgggccatctccagcgaggcacggaccgtatcggcggcggcgaacaggtgaatcttgtcctcctgcaaatcgcggttgtagcccgatggctggcctttgaggatcgtgagcataccgatcagcgcgccgtacagcgagccggtcttgcctcgcatcagttcgagcacgtcgggattgcgcttctgcggcatcatgctcgacgacgtgcagaaggcatcgtcgatccggatgaaatcaaactcgttcgaggaaaacaggatccaatcctccgcgaatcgggacagatgcgcgccgatcagagcacaatcgaaaatgaactcggcgcagaagtcgcggtcgctgatcccgtcaatgctgctgtaggcgatgtcggcgaagcccaactgccgggcggtgctgacccggtcgatggccagcgtcgagccggcgatggccccgctgccgagcggcgagacgttcagcaggttgcggcagttggtcaggcgagtgaaatcccgttcgagctgctcgacgaaactgagcagataggcgccgatgacaatcggttgtgcccgttgcaggtgggtgtaggcgggcatcaggtcgttgtcatgcttggcggccaactggacgaacgcctgctgaagctgcacaatcgccgcctgctggccctcgatctcgtcgcgcagccacagccgaatgtcggtggccacctgatcgttgcggctgcgcgcggtgtggagcttcttgcccggctcgccgattcgctcgatcagggcggcctcgatcgccatgtggatgtcttcggtggtcttgtcgaaccggaatcgccctgcttcgatctcctcgctgatctcgatcaggccgctcttgatggccttcagctcggtcggtgtgatcagccttcgctcggccagcatcgtggcgtgcgcgatcgagccgacgatgtcgtatttgtagagccgcgtgtcgtacgacagcgactcgacatagttgatcgtcagctcatcgggcttggcggccagccgcttttcccagcttcgttgcctgtctgtcatcgtaaccactccagcacgagaggctcttgccggccgcgtctcatgccctcgttgtgccgagacgctcgaccattctccgacccagttcgtgacattgctcgatttgctcgggcgttcctgcgaatttaacgtccacagtcggctcgatcagatcgaggccgttgtccttgacaaaaccagccatcgcctgaaccgcgcccccggcccatccgtgactgccgaacagaccgacgatgcgtttggcgatccgcttggtgctcagcagcctcagcaacgcatccatcggcgggaagacgctcgcatcgtacgtcggacagccgaggagcagacctcggtaacgccagatgtcctggatgagataggaaacgtgggtcgtcgagacgttgtgcatccggaccgacttgagccccgcgtcggacaggccgcgggccactgcctcggccatgatctgcgtgttgccgtacatcgaaccgaagaccagcacgacgcccggctcggcctcgtaacggctccaccggtcgtagaggctgatgatgtggccgggccggctccgccagatcgggccgtgcgtggccgcaatcaccttcacattcagactgctcagtctttggatggccttctgcaccatgggcgagtatttgccgacgatgttcgagaagtaacggaggatctcgtcctcgaagtactccaggtgaacctggtcgtcgaagatgccgccctccagacaaccgaagccgccgaaggcgtctcccgagaacagaatcgcgccggtgatctcgtaggtcatcatggtctccggccagtgcaccatcggcgtcatgtagaaccgcagcttgcgccgccccaggctcagctcgtcgccgtcgttgacgatccggacgttgtccttgatcccgtaaaggtcctggaggaattcggcggtcttcttgctgccgaggatcgtcatggcggggaagatccgccgcagcacaggcacgctgccggagtggtcaggctccatatggttgatcgccagataatcgatccgccggtccggacccagaagactcttcagtcgcaccagatactcgttcaccgagaggtccttgacggtatcgaccagcagggtcttttcgtccatcaggagataggaattgtacgagaccccccgtgggaggggccagatggattcgaacaggttcgtcttccggtcgttcatgccgacccagtagacgccgtctgcaatgggtattccgtgtcgcacggcattgcctccagtctaaagaacacggatttgccgtcgtcatcgcgcgacccgtgcacgcgcacgtcaccgccggactttgcgcgcgtcacgatagcggaaacaggcgacacggtcaaacaaaaccgccctccggcggagccggcggctgttatggggttgcagacaggtgttcttcgtcgtattctggcgttccgctcgcgggctgcgagcggcagtcgcgcaggccagaagagaatagacgaggcagtcatggcatcacttctgataagaggctgcaagcgatacgacgacgcccgggccgatgggcgcagcaatatcctcatacaggacggctgcatcgcctggatcggcgccggcgagccccctgccgcggccgaacaggtgctcgacgccggcggccggcttctggcgcccggattcatcgacgtgcacatccagggtgccggcggcgccgacgtcctggacgccacgcccgaggcactggcaacgatcgccaaggcgtgcgcccgttgcggcgttacctcctacctggcgacgacgatctacaagccggggcagaagaatcgccacctggaggtcgccgccgagtgcatcggccgcgaccttggcggcgcccgcctgctcggcatccacctcgaagggcctttcatctcccaacgcaagaggggcatgatccagcccgactgtctgacagacccaagcccctcggccctggaggcgattctggccaaaaccggcgacggccttgccatgatgacggtcgccccggagctgcccggtgggctcgaaatggccagggccctggccgatcgcggcgtcatcgcttcgctgggtcacacccacgcgacctacgacgagacgcttgccggtttcgacgcagggatcaaccacgttacccatctgttcaatgcgatgccctctctgcatcaccgggaccccgggcccttgggggcgatcttcgagcggtcggacgtgacggttcaggcgatcaccgacggcgtgcacatccacccgtcggtcctgcggctggcctttgcagcattgggaccaagccggttcgtcaccatcacggacggcatgcaggcgctcggcctgcccgatgggcgatacacgtacaacggaattccctacgagacccgcaacggggcggcccgatacaaagacggcacgttgatcgggaccgccgtggggctcaatcagatgctggcccgcctcgtgagtatcactggatgttcggtggcaacggcgatccgtacggcaaccgagaacccggcatccatcctggggcttgccagaaagaccggatcgatccagacgggatacgatgcggacctggtgctcctcgaagaggacctgtcggtctacgcgacagtcgtgggcgggcggatcgtctaccggcgggacagcgattgaacttcagggtgtaacgacgacgtcggccagcgccgcaagcgcctcgtcgatgtcgctccgctcgatgccgtagtgcgtgacagctcgaatccggcccggcgccgagcagagcatcttgactcctcgttccgccagccgcgatacgagcacctcggccgacagcccttcacgcaccacgtcgaagtacacaatattggtctgcacagcggtgagatccacgttcaggccgctcagcccagcgataccccgagccaggcaggcagcgttatcgtggtcgtcccgaattctgtcgatcatcgtatccagcgccacaatgcccgccgctgcaatgattcccgcctggcgcatgccgccgccgaggatcttgcgggtgcgccgcgcctcctcgatgaaccgcttcgagccacagacgaccgagccgaccggcgcagccagtccttttgacaggcagacgctcacggaatccacgggctgcgtaagggctttgacatcaacgcccagcgcaacagccgcgttgaagatccgcgccccatcgagatgaaccgccaggccatgttcatgcgcaaagcccgcaacagctttggtgtattccaccgacaggaccgccccgccgcatcgattgtgagtgttctccaggcaaaccagacgcgttcgcggaaagtgcacgttgtccgggcggatcgccgctgccatgtcttccagacgcaacgttccatcccgctgattgggaaccgtgtgcgggtggatgcccccaagggcgctgatccccccggcttcgtaatagaacgtgtgcgactggtccccgaggatcacttcgtcgccccggccgcagtgcgtcagaacgcaaacgaggttgcccatcgttccgctggcgaccagcagagcggcctccttgccgacgagatccgccaatcttcgttccaatcgctgcaccgtcgggtcttcgccgaacacatcgtcccccagttcggcctcatagattgcctgcctcatctggggcgacggcagtgtcacagtgtcgcttcgcaggtcgattgtcttcatatcccggctgcccgtcatcaggtggaaagcactatgccttcctgggaacacggacgatagcagtcgccagtcaccctgtcaatccgcacctccggccggaggcgccggaccgggcaatggccctttttttgctttgggccgggccggacacggcgtaggatggtggcatgctgattgtggcacggaccatgtacatcctcggcggattcctcatcctcggatcgctggctgcccatctctacgcccggatatggctgcgcccccgcaacgactccgagctggacgagatctactacgagttcgaggacgaggaccccggatacgccagatactctcgctggctcagaatgaccatagccgccggcgctctgggcatgctgctgatgttcgtggcggtcgctctttagtccggcggaccggcattctcatctcgatggagggtatggcgagcgccgattgcctgaaacggaagaggcagactctccgcgagaagcgtccgcctcgtgttttttcattgccccgtgacgacgaatcagccgatccggatcaccgacatcctgccggcaacgtccggccggctctattcgaaggcaatacccagaccgatgactgcgtcttcgagcgtgcccttgcggtcgactcgaacgacacgacctctcttgatccgggcatactgccccttcttttcggccagctcatccgtccgcgggaagttcaattccaccacagagccccgccgaatcggcgtggtcatcggaaccgtgataaagactcccactttactgatgttggcactgcggccgttgaagaatcggcccgcatcgggaagccacacactgaccggccacgacaggtcggtccgagtctccctgcgttgttccactgacgtctccattgtctgtgtctcctttctgagtggctaatccaacacagggcattatcgccagcgtgaatatggggtgtttaattcaaatagaaagatttctgacacttgcgatggattgttcagtataaatggcatggcgtggggggctggcccgtattatcgggcaagaacaggacggcgcagtgtgccgggttcttgatgatatcggacgttttcatgtcctttctcaggcaacgagcgacctccgcctcgattcgaaacgcgttggagacgatttgacgactgtatggagaatgccggttaagacaccctgcacagaggccgacatagcgtgcgggccggatgtcccgtacgggtccggcccgggaacggaatggccgatggatcgacaacagatcaaggcccagtggaaggagcatccggcatggcccaggcatgtggaatcagcagcgcaacggacctcagcaagaccagcgagacgtcctgccccgaccttctgcacaccctcgtgtggaacgccatcatggacaatgccaccgacgtgcacctgcactgcgtggacgaaggcgtgcgtgtgatccaccgggtcgacggagtcatcgttcccaaggcggtactgccgccgacggaaggccgacgcctgctcaaccagctcaagagcgccgcgggtttgaccgtcgtacgttcgttcacacctctcgaaggccagatcgactggcacgacgaggatacgacctgggagattcgcgtgacgctgacgcccgttcgggaacgcgaatcggcccacctgcgactgctgagcctgcccaaagacaactgggacctctccggcctgggtttctgcgtcgccgaccgcgacaggattgcctcgaccgtccgttcgctcagtggcctggtcctggtgaccggcccgaccggatccggcaagaccaccaccatgtacggcctggcgtcgctgatggacctgcaaaccacgaccacctactccatcgaggacccggtagaattcaagctgccctacgcccagcagatcgaggtggacgagcaacatggcctgaccatgcacgggggtctgcgcacgatcctgcgcatggaccccgacctgatcctgatcggcgagattcgcgataaggactcggcgatcgtggcggcccgggcggcattgtcgggccggctcgtgctggcgacaattcacgcccgcgatgcggccggagcggtcgatgccctgcactacctgggcgttcctcatcacatcataggcagttctctgcggctggtgatcgcccagaacctcctgcggcaggtctgcggccaatgcgcccagccgcgagagctggacgaaaccgagacagacgtcttcgcgcggttcggcatggatgctccgaagcaactgctgcacccgggaagttgcgccgaatgcggctggtatggctacaagggacggaccggaatcttcgaagtcgcaccgattgacgatgagctgggcgccgtgattagcgcgggtgctcgacatcgtgaactcgtcgaaagactccgcgccaaaggcatccggtcgatgacccgggacggactggccaaagtcgcctccggaatcaccacgatggaagaaatcttccgtatcaacgcctgcacgcgaggcgaagaacccgccgggcagaaggacaatgccgaaccggtcgaagcgtcggtgggttagacccgccttcgaccagcggtgcaatccttgagcaaaccccctcaacggtccaagcgtatggaccaagggcatgactgcccgtgggggttggtacatggacgttcccaggaaacgtggcttcacgttgatcgagctgctggtcgtcgtcgcgatcatcgccctgctgatcgccattctcctgccggctctgcacagggccaaagaacaagcccgggccgtcatctgcctgcacaacctgcgccagtggggcctggccacctcgcaatacgctaccgaattcgacggcatcctgtggctggaatcctatccgctcggtggcgacgtgcagaccatccccggcgactggatggcgatgttgcgcccctattataaggatgtggacaaggcccgcgtttgcccctcggccaaccggccttccgtcgactatcagagcacggagatgcgcgggggcatccatcatgcttggggccggccccgccaggcgtccgagccaagttcgcgtgacttcatctccaaggccgatttctggggcagttacggcatgaaccgctggatcaccgatccggtggagaaggaccagcggtactggaaatacgcctttgagcggaacaccgaggggattccggtctttgtcgactgcatccactggcacctgcggccccaggataccgaccggctgccgagccagccgctggtggtcttcagtgatttccccgagaatggccagaacggcactcagatctggcgcaccttcctcgaacgccacaatcacgccacacaggcctgcttcctcgacggctccgcgcgcaaaatccctctgtgggaactctggaatcagcgatggcaccgccagttccgccgacaggaataccaccggtccgacttcccgttcctgcagtgatcgaccgcgccggtgcctcgaagccaggcatcagccccggccaacgctgcgattcaatgtcgggcgtcttccaggtgctctaaggcctgaatcccacggtcttcgtcaacacgcttgacgcggatgtactgcccttttgggtggtgccacaggattcgggcggcctcgtccaggctgtgatgcgtcacgagtttacgcgggtcggaccggtgcgaatcgccgcagtcgcactggccgcgctgccggtcataccaccagagttggaacccgccgaaaccgcaaaactggtcccccttgataccgaagacgcgttggggatagagcaactgcttgatgggtgttttgtctgcgacctcgatcggcttcatcgctctggcccgcccaagcaacgctcccctcagacagcccaggaatcgaagcaggatcacatcgaagttcggcaggcatcgtatgcccgagagtcaatcctgtctcatcctggtggcctcaggccagacgcagattacttgtggacttgtgccgtttcggcttgcttctcagcgggacggactggataatgggagcagttggaggccaaaggtgaagcagcggaacaactatgatgaacagagctattgtgcgcatcacgatcgtcggggtaatccacctgctgatgtttgaggccctctgccagtggtccgtccactggcgcgagagtagcgaggagttggtgggtctgctgctgcagctgctcttgctcgtcggcctggtctgggcggcgtctgctgcattcggcaaggcgagcggacgaataagacgagtcctgtgccgagccgtcctcgtcgtggggcttttcgccggcctctataccgtggactatttctacttctggcacatccgcccgaatctcgggctgtacgaagagcctgattgggtagcccagcacccgggcttccagagatcgctgcaagcgaggatcgaagccaatctgtggagttccgcgaagaaggccggcacatccccgtaggtgcacgtttcgcctgcgcgggtttgctctcgtcatcgaaatcagtctggacaagagttgcgcttccgggaaggcgtgcgggccagttgaacgaggtagccgtagatcgcattggtgtggttcgggtctttctccatcatggcttccggatgccactggacgaacagacccagaccgccgtcggtccgttcgagggcctcgaccacaccatcgtcggcgagggcgacgggcttgagcccttcaccgatccggtcgaccgcctggtggtgcgaagagtagaccatcgcggtctcggcgccgaggagtcgcgccagcgtgctatccggcgcgatcgtcacacgatgatagaccttcttgtggttcacatcggtcccgaccagcgaggggatatcctgaatcatgctgccgcccagaacgacgttggtgaattgcatgcccaaacagactcccaggaccggcttgccgctggccatccagcgggcaatcagcgtgctgtcgaaccgggtccgtcgctcgggcagcacctcggtggtctcgtggggcgtctggccgtacatcgaaggtggaatgtcgcgcccgccgaccagcaccaggccgtccagctcctgcacgtaacgatccaccgcctcttcgctgtcgatcggcggcaggaccagcgggatgcccccattgcgaagcaccgcttccacataggatatgtcgacctcgctgacctggcgcttctcgtcataggccgtcgtgataccgatcaacggcttgcccgagacttgggtacgcgggctctgacagccggggacgcatatccatgcgaccaacagcaataagacagcgacttttttcatagacttgcctcaaacgcatcctctgggatcatcgttgcagcgacttggcgacggcctcgacacagcgccacagacgcagcagattgccgccccagattttgcggatgtcgtcgtccgagtatccgcggcggaccagttccaccgtgacgttcagcgcctcggcgtggttggcgaatccgctgacggcgccgccgccgtcgaaatccgtgccgatgccgacgtggtcgatgccggcgatgcgaaccgcatggtcgatgtgatcgacgtagtcctgaacggtcgcgatcggaaccgtctcggccaactcctcgtagcgacggtagtactccttcagccggggcctcatcattgcacggcgttccgtggaccacttctgtcgttcggcataagaggggatgcccaactcgtcgcggagtcggcgaacggcttctttgcgttcaggcgtctccggcttcaggtaggcgtcgagagccacgatctgaatcacgccgccgttgtcacgcaaggcccgaagctgctcatcggtcagattgcgatcgtgcggatggaccgccgaacagcccgagtgcgacaccaggatcggggctcgcgtcgctgccagcagatcgaagaaggccttctcggagacatgcgaggcatcgcacatcatgcccagctcattcatgcgtcggaccacgcgtttgccgaacgccgacaggccgttgtgaacggggttcggttcgctcgacgaatcgcagatctggttgtgctccgtatggcatagggtaacgtaccgagcgccccgtgcgtagtactggttcagcaggtcaaggtcttcgccgatggggaagccgttctcgacgccgatcatcacagccttcttgctggtgtgaatgacccgctccacgtcgtcgggacacagcgccagggcgcagcggtccggatacatgcgctgcgtcagtcgctcgatcgcctcgaacttgctctcggccatccgctgcgcttcagcatacgtctgggcgctccattcgggtgcttgccggacgtaaaccgccaggaagacgccgtcgacgcctcccttggccatcttgaccaaatcacatctgagctgaggatggtcgacgcccgggtcgagatcagccgtcgcgtaggactcgtcggcgatgtccacgtgcgaatccagggtaatcgcggtctcgtggatcgccctggcccgggtgacaatctgctcgtcagtcattggttgcttgagcgctgcgtccatcccttccagggccgaaagatagagcccataggagaaattggtgagcagttcacgtgcgccgatcgggtcggtctcgtagagccaccgcaccgcgtcctccagaggcttctgcatcgcaaccgcccggctttcgatgcgtcgggcctgcattctggcagcggcgacgacggcccgcccctgccgctctgccttctcgcggaagttcaagaacacccagaaggcttcgcgcggatcggggacgaacgacgcgccgaccttgcggtcgtaaacatcgctggtcggctgttccggctgggtgcgaaagccggccgggaagtccgtgatgccgaagtgaaacggcagatagatcgaggttcgaggctccgcgagacatacccaatacacgaggccaatatcgcggggcggttcacggcgtaattgcgcgacgaagctggtctgcgtcgcgccgctgcacagcgcacagccgaagcccgaggccggcgatgattccggctggtttccctcatcgtggcgaaggatctccatgatgtccgtcacgccgagcttgcgcttcgggaccacggagaacggcaggtcgaaacccggtgcaatctcctggctggcgacatacctcagtccggcccactgccggcccgcattgttcggatgagaggccgaggcgggatcggcatagaccgcggcaaagtcaaatggcccgtcgctctgcgggtcgtaccacccgcgttcgacggcgtacgtaacgatgtccgtcgaagccagaacgttgtcttcgtccgaaagatcaacctggcggatcgtgtacgtgttagcgaccatcgccacctcgtcatcggcgacccgccgggccagccagtgcttgccctggacgacgcagaacagccagccctcgttggggtcggcaatgacgtatgtccgtcctgaagcgacataaccgaaccgctccaccagccggcctgccagcaacacgccttcgcgcgccgttctcgcccgctgcgcgatcagccttcgcagcatccagccgatgccgccggcggtgatctcgggccggtcctcgcgcgaggggcagccgtccgaagtgacggtcaggccccattcgttgacacaagtgtcggagtagagcatgccgggcatctccgaccagagataggcccaggtccgctcgacctgctccaacacaccaccgttgcggagcaccaccgtggcccccggtccatgcgtctgcctgggcaccttgtagtggttgaccacctgcggcgggtagtcgtcctcattgtgacctaccagaacgcagccgtcggtcgaagcgtccttgcctacgacgatggaaaaacacgcgccgcacggggccgcccacaatatcagcagcgccaaggcgatcaggataaggcctctgctcttctcgaccatgttcacaacctcccgttgttcatgggaccgataggattcactctcctgccggcgcacggcgaaccggattctccgtcgaggccaccacaacggcacagacagcatccccggtgacgttcaccacggtacggcacatatccaggatgcgatccacgcccaggatgatcccgatcccctccaaaggcacgccgatactgcccagcacgaccgccagggtcacgataccggcgccgggggtgcccgccgtgccgatcgacgccaacgtggccgtcagcacgatcgtcaactgctgggccagactcaggtccatcccgtagagttgggccagaaagacggccgcgacgccctggtagagggaggtgccgtccatgttgaccgtcgcccccagaggcagggtgaagctgcaaatgtgccgggagaccccgaggttctccacggcgcactcgatggtcacgggcagcgtggccgagctggaagcggagctaaaggcgatcaactgagccggacgaatgcctcgaaagaaccggcccgcccccaccttgctgaacaacctcagggccagggagtacaccagcagcatgtgcaccagaagcccggccaggaccacagcgctgtacctggcgagcaccgccaggatgtgcaggccgaagtcggcgacgactgccgcgagcagggcgaagacgccgagtggcgcggccttcatgatcaggtgcaccatcatcaccatggcgtcattgacggcctcgaagaagcgaatcgccggcccgccccgctcggcaccgatcagcgtcaggcagacaccggtcagcagcgagaagaagatgatctggagcatctgtccttctgcaaaggcccggatcggattcgtcgggatgatgttcagcagaacgtccttgatcgaggccgattcacgaggcgcctcgccggtggcgttctgctgtgcagcaccttcgatcagcctgctcttggcgttctccgccaggcccgagcccggctgcacgacgttggccagcagcagcccgatggtgatggcaacgacggtcgtgcagagatagaaaccgatggtcttggcgccgatgcgtcccagactgcggatatcacccaggctcgtggtcccgaccagaagcgaggcaaacaccagcgggacgatcaccatgccgatcagccgcacgaaggccgttcccagcggttcgatatacgtcgcgacgaataaaccccaagccagacggttcgccaacaggccgaatgcggccccgacgacaatcgccagcaggatcttcgtatgcagttgtagcttgggtatcgccatccgagctttccgccagaagttccggcatctgcccggatcatagccccgcctgccgcccccgtcaaagaagaaccttcgtcacaggcacatcgcgcctccgccgaccaaggtaccgctatccagccgcagtaagggtccgccggtgtcgcgatccctgtgtccaccagggaagttgtcacatggcactgtcccgccggacggcctgcgatggattccctttgggacaccggatgggggcatggtagaatatggaccacaacggaaggacgccgggcaggtttggagcctgcgcgacagcctggcccatgacagaaaagaggacgagaaggaggtggagaatgcggtgcggtagagattccggcaggtttgtgggtggcttgatgtgcgcgttggccctggtcctgatcgcgggcgccgcgcgtgtggaagcggccgggccggacgatctggccaagacgattgagcaaacgctctccggcgttcagcgaaggatcacaaccgagccggctcgggcggagaaggaactgctcgaagcccgcaacctgctggcccaactgaaggaggcggcaccggaccatgccaaactcgctgccctggtcaaacaggccgaagatctgacgacgaaactggaaaggcggctcggacggcccgtcggcggcagtgcggagaagaaggaagaggccaagccggccgaaacgccaaatccggtgccatcagacctgcccaatgcggtcgtctcacaactcaagagactcgaagacacgctcaatgcagtggtcgcggccctggagaagaaccagttgcagaccgccggcacgaaactcggccaggcgcagaagctaatggacgagatccagagccgatatgggcagaagatcccagccggcaacgcggagttcaaggccgccaccgaccggctgatcgccgtcgggacgcagtacgaccaagccaaatcgacggcggatgccgcggccgcggcggcggccgaagccgcgcagcagaaggagactcaatccaaggaatggctggccaagttcgctcccttcttcgatcccaaaggcgaccagtatctgctcatcgggtcgtccttcaacaccgcctcgcaggccgatcaggaaaagtgccgtcaagcctacgccaaggccaacgagctgatggccgcctacaagaagaccgagttcccccacggcaagacgcaggaactgctttaccaggagcagtcactggccggaaagctcgttatctacaacgagggcgccgctcgcgcccgccaggaacaggcctgccgaccgtgggtcgagaggctgcgtccttatgtcgacgtcggcgcgggcagtccgaagtacctgatcgacggcgtcacgctcagcgaatccgacatccaggagcgaaccaccctgctcgccgaggcgcaggcgctttggcccgagtacgagaaggccgaattcccacacggcaagacagcggaactgctgtccctcgaagagacgatgaagcagcgtctgcgggacatgcccgaagtgctccggcgaagccgggccctgctttcggccgatatggagaaggaattcgaccgcatcctcgcctggctgaaccaggacaccggctggcaaagcgatccgaccaagaagcccaatctcgtgatggagcgcgacgtaacgcctctgcaacaggcgatcgaccgctatgccggcaccgtcggacccgacgacgccaagctttccaccctcaagcagaaactcggccagatcaaagagcaggaccagaagaaccgtgccgtgcgagccgagcggacctatatgaacgccgaccgttcccaaggcgagggaatcgacgaactgcatcggaaggccgaggacatcgtcaaggagaaatccgcctcgggaaaggccctccgcatcaccctgccggcggaaaactggcaggaggaaagcgtgctcgaatggacggataccacgcgcacggagttgcggtaccgcatcacgcgattcatgaccgcccaggcagccactgagggggccgatggtaaggtctacctgcacggcgtacatctggccaacgatcggaactccgatggaagctggggccctctgtacggccacatcatgtggtcggattggatggccgaggcgaacgtgaacaaagaggctcccaccgctcgatagcggcatcggcgtgggatctgatcgcgtccaggcattttccttatgggcttccgccgttcgtgctctataatggggtagatggaatggaggtaagatggtccggcaccgccgggtggcccgaaccacatcggcgacgggactccataggtcttcggcacactgacacaagcagagttggaaggaggtcccaccatgagtacgtcgcgattgatcattctgttgaccgtgggcctggtggccgcacaggcttgggctgtggacaaatccctggtcttgtacctgcccttcgacgacggcgccggcaccaccgccaaggacgcctccagttacaacaaccccggcaccgtcgtaggcaatgccgcatgggtcgccggccagaagggcacggccctggagttcgtcagcggctcgcacgtgacggtgccggagatcccggagtacgacgtaaccgccgaggtcagtctgctggcctgggtcaaggccaccacggtgccgaactggggccgtgtgatcgacaagtcgcagtggcagaccaccggcttcgacttggtcctgactcagaatgtcggcctggcccgcctggagtttttcgtcaacaacaccacctcgttggcggatgggcggaccgtggtgatcgacaatgaatggcacttcatcgcaggaaccttcggcaacaagacgattcgcgtctacgtcgatggcgagatggagggccaggcccagtccgtcgggcaggtggacatcaatccgaacgactggccgatcatgatcggcgcggaaaccagctcgaacggcggccagcaattcttcggcacgatcgacgaggtcgcgatgtacagccgcgagttgtcggcggaggagatcgcggacatcttcgaaaacggcatgcctcaggcggagaccgcaggcaatcctcggccgaagaacggcgctgtcgatgtgccccgcgacgtcgtgctgggctggacgccaggggcactcgcggcatcgcacgatgtctacttcggcacttcaccggccgacgtcgagagcgccagccggaccaatccgatgggcgtactggccagtcaggggcagtcgggcgccacgtatgaccccgctggaccgctcgccttcgggcagacgtacttttggcgcgtcgatgaggtcaacgccgcacccgacaatacaatcttcaaaggcgaggtctggagcttcaccaccgagccgttcgcctacgcgatcacgaacatcgtcgcaaccagcaacggcacctcggaaccggattccggtccagagaagaccatcgacggatccggcctcaacgccgccgaccagcactccgccctcaacaccgacatgtgggccgccaccaccggtggcgccgagcccgtgtggattcagtacgaatttgatcaggtctacaagctctacgagctttgggtgtggaactacaacgtcgtcttcgagatgatgctgggcttcggcttcaaggacgtcacagtggagtactccaccaacgggacggactggaccgtgctcaccgacgttcggtttgcccaggcgacgggcaagacgacctacacacacaacaccacggtggacctccagggagtcccggccaaatacgtccgactgacagccaagagcggctatggcctcaccggccagttcgggctcagcgaggtccgcttctactacctgcccgtgcagccgagagagccgcaacccgcttccggggcaacggatgtcgccatcgacacggtcctggattggcgcggtggccgcgaagcagtattgcacgaggtttacctcggcaccgatcaagccgccgtcgttgacggaacggccctggccggcaccacaagccagagcagctacgatcccggcacgttggacctggccaccgagtacttctggaaggtcgtcgaagtcaacgaggccgaagccatccgttcgtgggaaggcgcggtctggagcttctccacccaggaattcctcgtggtggacgatttcgagagctacacagacgacgtcgaggcacacacgaccatctacgatgcatggatcgacggctacaccaacgggaccggctcgacggtcggctacttcgacgccccgttcgccgaacaggacctcgttcacagcgggcggcaatcgatgccgctattctatgagggcaattcgcgggccgacttcacgatcgacggcgcacaggactggaccgcaggcggtatcacaacgttcgtgctgtacttccgtggcgacatggccaacgcccccgctcagctctacgtgacaatcaacgggaccaagatcgggtacgacggcgccgccggcagcctcgcaaccgcgttgtggaagcagtggaacatcgatttggcctcgacgggcgttaacctgcgaaatgtcacagaactgagcatcggcatcgacggcgccggctcaggggtggtgtacatcgatgacatccgcctgtaccgcgtggctccggcggcggtgacgccccaggacccgggcgctgcatcgctggtggcgctgtatgcgatggagaataacgtccaggacagttccggcaacggctaccacggcacggcgttcaacgaccccacctacgggccgtcgctggccgggcagggccaggcgctgcagttcgacggatttgccgattacgtcgcattgcccattggtccggttctgagtgcgctgaccgattcgacgttcgccacgtgggtgaacttctccaataccggaggcgattggcagcggatctttgacttcggcaccagcagcacggccggctatatgttcctgtgcccgcgtattccggccggcccgatccggtttgccatcgcgcgggccggcggcagcgagtcggtcatccagacgaccaccttgctgcaaaccggctggcatcatctggcggtcgtcatcgacggtgccaatatgcaggtgcaactctacctggacggcgacgtggccgccagcggcccgacggcgactctgccgaaggacctcggcaacacgacgcagaactggttgggccgctcgcagtacaccgccgacgcgtacttctccggttcgctcgatgaattccgcatctacaaccgggccctctcggccggcgaagtccgctacctggtcggggatcggtagacattcgcgtccgtgtcgaggacgcgacaacgtggatcatcaaggggcctgcgccgctggggcgcgggccccctgctgtttccgctgcgggcggatcgtccggtcttcgtcgagcaaagacgcgttgccagcaagacccacacaaggtatcctatgaccgtgaccaatgtccggagaccgtcaaccgagtcctgtccgggagatcgcgatgcgcagagttgctctcatactgctcgctgttctggccgcctgttcacgtgccactgcccaggaactggcagcgtctcgcctcagtccatccgtgcgtctgctgcccgggccggtcaacggcgtctgcatcgaacgcaatggacacaccctggtcatctatggcgacccatccgggacgcttcagcaggcggacatggtcctgttcacacatagccggcgcgacgtggtctgggcaggacgggacctcgtccagcgcggtgccaaggctatcgtgcctgccgccgaagcggccgcattcgcaggaccggaggagttctggaacacctttgcacgcgggcgattccatgactaccgtcagcagacaaccaaggttcccgtagtcccgttacgagtggaccgtacggtgggtgacggcgaagccctggcgtggcaggacctctccgtgcgcgtgatgggcacgccgggctacacgcggggcgccgtcagctacctgttggacgtcgatggcatccgctacgccttcgtcggcgacctgatctacggcgatgggcaagtcctggatctctacagccttcaggacgaggtccccgacctgcggatcggcggctatcatgggtacgcagcccgcgtggttcaactgatcgcgagcttgcgggcaatcgcctcggagaagccggacgtgctcgttccggcccgcggaccggtcgttcgagccccccaggcggccatcgcgcatctgatcgatcggcttcaggcggtctatcgcaactacctggctatcagcgccgggcgatactatttcagccgtagctatgacggtcttgcggagcgcgttctcgggacgccgcacggtgtgccatggatgcgactggcgaccatcgacgaggacccacccggctggatgttgtgcatcggcaactcccggcttctgctctcgcagagcggcgccggctggctgatcgactgcggctcgcaggccatcatcgatgagatcggcaggcggcgcgatgccggacaactgacatccctggaaggcgtgttcctcacccattaccacgacgaccacaccgagaagatcaacaccctcctgaagaccttttcctgtccggtgttcgtcacgccactggtcgccgacatcgcgcgccgcccccaggcctatcgcctgccctgcctgacgacggaatcaatcgcggacgtgaccgtggtccccgaccggcacacgagacgttggcgcgagtttcagttgaccttctacgactatccggggcagaccctctaccacagcgccctgcttgtagagcatgacaacggcgagaagcttttctttctcggtgattcgttcacgccatccggaattgacgattattgtctcctgaaccgcaacctcatgcacgaaggagacgggtatctgcgctgcctggacatcctgggtacccttccagacaactgcatgctcgtcaacgagcacgttgcgccggtctttcaattcgacgggccacaattggcgttcatgcgtcagacgctggtcgaacgcaaggctctcctggccagtctgtttccctgggacgacgccaactacggcatcgatgagcagtgggcccggatttacccctatggacaaaccgctcgccccggtcagacggcggaggccgagatacgcctgttgaaccactcggatcgcgcccacaagtacaccgtgacgccacacttgcccgatgggtttaccgccgaaccggaatccgcccatctaacggtcgagccccggacggaaggtgccatcaccatacgaattgccgttcccacctcattggtcccgtcggtgtacgtggtcaccgccgacgtcgcgttcgaccgctgggaccttcgccactggtgcgaggcgctcctcgaagtccagccgtagcggcagcccaaggccccaaaccgatggcagacaagggcacccggctcccatgccgccaccaaacccccgccgattgggtgagaccgtgcggccatcgtgcgcggaatacagtttgacattcgacgcggcaagccgtatactggatgcccgcagagaagggaggtttctgcggcattctaccgcacccgtgcggcgagtgcttcctttcctcagttttcccatggatgtggtagtgatggcgacagttcgtcggtcccccgcgactggaaggcggtcgcccgatgtgcaaggagtggggtatgcgaagcgaaaaaagaaaagccacaatcaaccgatacggcattattctgagcagtctgtttctggcgatggccgcagccggcccgacgatggtgcaagcccgctcggcttacgtgatcgcggagatcacgaactccgccgaaccgctgcctgttctggcgtatgacatcggtccggacggttcgctgacatttcaggcccgccagacgattccgtttcgagccggcggcgccgtcggcatggcgatcgactgggaatcggggtacatcttcatcacgtatgagttttccaacgccctcgagatcctggatgcgcgaaccatggcggacgtgggcacggtcgtcgcgccgggcgcggaaaacctcgccggggtggtctacgacgagacaagaaatctcctgtataccgtcgaccgagccaccaacaaactctatgtctacacgtggaacgccagcacaggaagactcgccctgttcccgggcgcgccgtttgccctggagggatccaccgcatacggaatcgatctcgacgaggccagaggtctgctctacaccgccagcggcaaccggacgattcgcgtctacgaaacctccacatggtcccttgttcgagagtacgagctcaatcgatcggcggtcagcatcgccctggacttgtacaacgagctgatctatacgggcgcgggatacttcggcgacacctcgttgaaccagtacaacatgattacgggcaagagcaaggcggtttcggtggatgagaccgccggagtcatgggcattgccgtcgacccggtcagcaatctggtttacgtgaccacgggcctgagcaacctgcccgggggggacgatttgctctgctacgacccgaatctggttctggtctcgtcgatccttgacatcggtaatccgacggacatcgtcattccggccagggacatcggctacaatccactcggtttcgtcaagcgcatcgccacggacgccgagccggacgaggaggaagaaatctacgtcagtgcgggcgagacgatcacgtaccagctcagtttcgcaaacctgagcctcatacgggaagtgtccatcgtcgacacgctgccgagcgaagtgacttttgtagaggccgacggtgatggtgataccggacgctacgacgcggcgacgcacacctacacatggctgctgccgtcggtggaagcggggtctcaaacctgccttgaactccgggcaaaggttgacccgcgtgttccggccggaacgcggattcgcaaccgggccacgatacgaacgcgggtcatcccgcctacgtccgtcagcgtcgacgcactggttcggggcggtgactggaagcccctgacactgagcaagagtgtgatcggagacagccggcgagaagatggggtcgcctacgccaacgcgggcgaaaccgtttcctatgccatcgctttctcgaacgagaacaacaactatcctgtgaccaaggtctcgatcgtcgacaccctgccgccggagatgacgtttgtaaacgccgaaagcacctcgggtaccgcttcgtatgatccggtgaatcacacttacacgtgctcttatgcctctctggcggccggcgcaacgggacagatcaccctgacggcgcaaatccgggacgatgttccggccggaaccgtcctgaccaactcggtggtcctcactacgaacgagacccaaccgaccaccgccaccgccgacgtcaccgtatggccgagccggttgcagccgctcggcctgaccaaaaccatcactgccggggggaccgagccgaaagaagatggcacgcgctacgtcgggatcggggagaacatcacgttccgcatctgctgtgacaaccgggacaacacggtgcccgtggaggatatcacgatcctcgatttcctgccgccccaattggcatttgtcagcgccgaaggagacggtcagttcggccactacgacgcccagacccacacgtatgcctggtccatcgcctctctggcggcgggcgagagcatctgtctggagatcgtgacccaggtcaaggccgggacgccggccggaaccgtaatcgtcaaccgagccaccgtcgacaacgatcagatcgaagcgaccacggaccagattgaggtgacggtcaaaccgatcgatcgagtcctcaacgtcgccaagcggatcagcgacggggcgaccatggacgacagcaaaacgcaatacgtgggaatcggaaccgagatcacctacgaaatctgcttcgacagcaacggcagcagccatcgcatacagggtctgtctctggtggacgtcctgccgcccgaagtcacgttcgtttccgcagacggggacggcatttacgggtcctacgatcgggataagcatacctacacgtggtcgtatccctccctgctacccgattcctcggcctgtgtggagatcgtcgtgggagttcgcgaagaaaccaagccgggtacggtcattgagaactcggtgacgatcgacagtgacgaagccgagccgcaaaccgcccgcgtgacggccattgccacgcaggcgaagcccaagccgttgctgttgaccaaaaccgttaccggcggcgtccaggggatgaacgatcaagggacgatgtacgtcgcagcgggccaggaggtcacctacacggtgtgcgtacaaaacgacaaccatcagcgcgtcagcaacgtgaccatcgtggacacgcttccggctgaggtgaccttcgtcacggccggcggggacggggactccggatcgtatgaccgcgccaatcacacctacacgtggcggtatgccacactggaagccggagagaaggtctgtgcggacatagtcgtccgagtcaacgacgacgcacgtccgggatcgacggtcaccaaccacgtccgagcggcatgcgatgaggtcctaccggccgagacggacacggaagtcacagtggagttggagccgcccatcgtgaccaagacggtaatggcgtctgcggacggcaaagtctccgcggggtgcgtccatcccggcggcgaagtcacgtacgaaatctgtatcgagaacacaaacgacgctgtcctcaccggcgtgttcgtggtcgaccaccttcccgacggcgtgacgttcgtccgcgtcgaaggcgacggtggctccggatactacgacccgccgtctcacaccttcacatgggcgtacccggtgctgcggcccggggcggtgcagtgcgtgcggttgacggtccggctggactatgacctcacacccggccagatcgtggtcaactccgtgagtctcgacgcggcggagactccggtcgtgaccgcgagcgtggaagtctgcgtgggtgacgcgccgttgccggtcgcgctgacgttcagcccgctgatcctcggccgcaccggctacaacccctcggactgcctcactgccctgctcgtgttcccggccgacatcaagcagagcgatatccgactggaaacgctgtcgcttgatcccggcaacatcgccgccggtgcgcgatccgtgacggtggccaagggaaaggtgcagatccgtgccacctttgatctgatcgaagtcctcgatgcgattcccgacaacggaatcacgaccttgtacgtcggcggcacgttgcagtccggactccccttcgtcggacaagggacagtgctcgtggtggccgagaggcctttctagtacggcgtccgcagaaatcccgcttcgtaatgaaaggagcttggaatgagaccgagaacgacattcgttagcctctgcatctgcctggccgtcggggttccgtcggctctggcgggcgccccgctgggaccggcgttgcccgtcatgcagaagggacaatgggccttcggaatcgagtacgcgtacgagaagatcgacgccgaagccgacggaagctgcaccgaaagcatcatcggcggactgtccgagaagtatcaccaggaattcatgatcgatggcatgaagaccaacatgctgttcgcacgcatcgaatacgctctgtgccgggactgggacgtgttcgtccgtctgggtgcgtccgatgccgatgcagacatcaaggcgtccggccccggcgtcgtccttgggggtcggggtggccaagtcggcttcgacggcagtttcggcttcggcgccggcgtgggcacccgcgcgacactctatcggtgcgggtcctggcgcgtcgacggcctggcccaggtgacgtggctggacccggacgacagcgatttccggattgccaatcccgaggaccccggcgaaatcgccacaggtaccgcgaagctcgactatcttcagacccagatcggactgaccgccgtctatcgaggcgacgcctggagcgtatgggccggccccttcctccagatcatcgacggcgacctcgatatggacgcgcggtttgtcttcgacggcgtgacccaaggtcggatctgttgctccggcgatgtcgaggaggactcgcagttcggcctgagccttggcgccaattgcgaggtgaataagaacttcatcgcctggatcgaaggccagttcacgggtgattcctggctggtgggcatcggcgggatgatccgccccgaccagtttttcggcgagtggtgacaaagaccgtaagggcgaataatcgttcgcccccgcaaatggtcagtcgtccttgaatctcttcatccactgcggccagtcgtcgggccgcacgccgccggccttcgtccagggtccggccgtgtcgtactctcgatgccacttcagcgcccatagctgtttgagccccaccttgcggaccgaccagtccatgaacaccgcgtggattccgccccggtgccggtccatgcagacgttgctgctctcatacaagagcgggtccgcatcctcatggggcggcggcccgtccagcgtcccgctgtagatcgagcggcaacagtcgaagacgagcggcgcgttggaggcctccttcacgtcgggcgtggtccagcaggcggaattgggcctggcttcgtccggctgccggccgaggcccacccaactgttgacgccatagctgcccagaaactcccgctccacctcgccccagcccccttccgggaggcgttcggccccccgcacaccccgccacgctcggaatctcgcgcccgtcatgccattggacgagggcgtcctggccatcggacacagccagatatcccgatagttgccgaactctgtgaggaagatataccaccagctcttgacccagacggtggccggctccggcttggcccatcggtcgacgaatgtcagttcgttgaagaacttcccgtcgttcgctgtgacgtaggtgttgagcaggatgccccactgccgcaggttggactggcaggtcatggccgctgcctgcttgcgagcgcggtgcgtcatcggcagcagaatcgccagcagcagcgccagaatcgcgatcaccaccagcagttcggtcagcgtgaacccccagcgctcgcccttccctggccctttgcgtcgaggcgaatccgcccccgcccgtgatgtgcgtccaatgcgcatcgcatgcgtccatccgaaacgccccgatcctaccggcgccggaaccgacgcgtcaaggaccgtggatagacttgaccggccgagacggcggatatagcatgcttctgctggcgaggacaacgtgaatggatcgcaccgtacccgtctgctcgacgtaaaaactggagtcggcgccaaacgttaatctctgcacggaggtctgttatggtgtcaagaacactgtcgcagcgtgtgggtctgggtttatggctcgcctcgatgctgatcgctacaaccgcccaggcacagtacaactactatgggcccggcgtgattgtgattcaccggtatcggcccgggggatggctgtactacggtccgaacacctacacgtatgtccagacaaacccctatgtatatggaccgctggtcagtacgcgttcgcggccatcctaccgtcggcccattcagatgccgatcccgacggatatcggggttggagccgtggcgcccaacccgtaccaggagtattacagcccgcacatcccgcgctattacaggcagcaggatcagattgggcagaccgaaaccccgctcgcacccgctccccagagcgacccggcgccgggtcccgcgatccgcgaacggacaccggcagcaaacgaatccgagcctgtcgtgccaggaagcgtagcggaatcctctccggccgcgcctgaacaggtcgggccggcaagaaaggacccgctccaaccgggcccgccgccgcccagcgagcaaatccggaaacctgcaagtcgaaagccgatccgctaccgttgaagatcgcccggggctcaggtttcggacagcagattcgcttctggctgcgaatccgaaatcggcaatccgcagtccgtgaccgggtggtggggccaggaaagttcgtgcaagaatctctgtggcctcatataatcactgattatgaaactgccagaacttgagaaacccgagaggtacacagggctgtacatcttcgatttcggcgaccaggccggggtcgggtttacagccgaggaagtggccgagctgctcgaaagcgaacgctatcgtgatggcaaggtctacaagatccaccgggcttacccggacggccgactggagatcagaggtgtccccgcccagatgtttcagttggagtctggaatgctcttcttctccacgacgcaggagcaggcgacaagcgatttcaagcgtctggtcggtgcggcggttgccgccgcgcccccctgccgggccaaggtgcacatggctcggtacgccgatgacaaattcgcagtggccctgatctatccggcggaatatgaagaagagatcagcgcatggctgctggcgcgcgcctaccggactgcgggcgcggccgaagggggaaccggggccgtcgagcggtactatcgtgacgcgccggaggttctcgaacggcaccagctcttcggcgtcagtgaggctgtcagccgcaccggcgatgagctgctcctttcactccagcgggcggtgcagaggtgatggcccccaacgtgctggggtttcgacccggaaccggcagacccgccaagcggtccgtccgcccgtggcggatcggccgccttgctgcggctattgctgcgctgtttcggcatgaacctcctcgcgtcggaccggaggacctcaggaagtacgacttcccgacagccacgcaacggatgggcgtgcgtttcagtgagcgcatccgcgacgtatttcgattacggtggctgaagaggcggttctgaggtttgcctcgctcgccacggcgctcgtccctctctcatgcgcacagcgggacctcgctgagcgtccagtactgcccgatcgctcggacggcttccacgaaccgatcacgggccggcgatttgaccatataccccgccacccccagtgcaaaactctcgttgacgatctgtccatctcccgaaggggccaccacaatcacagggatcgtcttaagattctggtcggacttaagcacccggaggaactccagaacgtcgcgtcccccggcaaggccgtcgaaaacaatgaccgccggctccagagcctgccctgcggccagacgcttcagtgcctcttgggtgtcgtgaacctgcaccacctgacgggtcattcccaactcgtccatcgcctccttcacagtcggcgagcgggcctcgggactctcgatcagcagtatgggcttggcacactgcaacgtctctctcgcccccatggaactcatacagacaactcctcaccatcatcttgtgacccaatgcctgcacccatcactgtacagaatcggctcaatccgagacccaatgaacgggaaagtcggccggagcgttctgagattgcctggtcggccaagccttctaccaatccgttttccgggcaatcccagccttttccctggtcccgctcgcctcgtgagccaatcggaccagttccaccacagaggaggcggcggtcttggataatacattcgttcggtgaaaatcgaccgtcttggggctgatgccgagttcgaaggcgatcgccttgttcgatttgcccaggaccaacaggtccatcacctgacgctcccgacgggtcagatcctccatccgcgactgaaagctctccgaccgctgcctggcggcgcggatgcgccgatccagttccaccgccctctgaatgctgtcgagcaatacctggtcgcggaagggtttctcgatgaagtccatcgcgccggccttcatggcttccactgccatggggacgtcgccgtggccggtgatgatgacgatcggaatctccatgttcaactcccggagcttcgcctgcagttccaggccgctcattcccgacatccgcacatccaggaccaggcagcccggctgcgatggttcgtactgggccaggaattctcgtgccccgctgaacgtctggacgttcagaccgatatcctcgatcagaaggcacagagatcgacagattgcctcgtcatcatcgacgacaaacaccgtgggcttcgcgctgctcatgctcaactccttccgccggtaacgtaaatcggaaaacggctcctgagcccgggtccgaccggacccacagccgaccgccgtgggcttcgataatccgtcggctcaaggacaaaccaatacccaatcccttgttctttgtggtgaaaaaggaatcaaagacccgctcaatcaactgcgacgaaagcccttggccggtgtcggcgaccgccacctcgacttcctcgccattcttgacggcgcgtgccgagagggtcagcctccgcagcggaacccggttgccgctcatcgcgtccatcgcgttccgcacaaggttgagcacgacctgctgcacacccaccgcgtccgcccgcacgatgggcaagtcctcggccagatcgcgcacaaccgtaatcccgagccgggcgatttcggtctccaccgtgctcatcgcctcgttcaacgcatcgcgcagatcgaggctggttcgccggggctcgcgtttcgccaccaagccgcggatgcgtttgatgatgccggccgcccgttcggcctgttcggcgatctgcgcgatggagtcgcacagggtcttcctgtcaaagggctcccgtccggccagccgcaggcaccccccagcgtagttgacgatcgcacagagcggctgattgagttcgtgcgcgagacccgaagccatttcgccaagcgtattggcgtgccaggcacgggtcagttccacgcggtggttttcggccgcacgggccgcctgcacgcgttcactgatgtccctcgccaccgccaggatgcgatcgcaacctccgattctggcctgcttcagattcacctcggcccagaagcagcttctgtccttcctccggcacaaccactccaccacctggggcccttcctgtaccgccttggtgaaccattttcgcgttgtgcccgcccggtcgaacagcggttcggcacgcaggtcccccacgttcatgcgctgcaattcctcataggaatagccgaacatgtcgagcccgctgcggttcacatcgaggatggtaccggcatcggggtcctggacgaagatcgcctcgttcgccgcgttgaagatctcccggtagttgcgctctgaggcgatcaacgcctcttcggcgcgcagccgggcaagggtcgtacccatctgcgctgcaatggtctccagtgccggacgcgcctgtcgaggcacggcatcgcagcggttcgaggcaaccaccagaacaccgaccagagcatgttcgttgcggatcggcagcgccgcgtacgaggagagctccgccttcctctgggccggactgagtggcatgtgtcgctcatcggccccgtagtagaccggtttgccttgtgccagcagacgcatctgggctgaactggagcctatgctcagcacgttcggcgtcaggcggtccgacgtgccacagtgcgtcaggagcttcatcgcgccggaggtgtcctcgacgaggtagaccccgccgcagtctgcctgcgaggcctcgatcgccgcttcgagacacaaacgagcgcccttacggacctcccccaccgtattcaaccgcacggccagatcatgcgtgattctggacagatgctctgcccgcttgcggacactgatatcgcgtacgatcgcaatcacttcgtgcgggccgcatgccaccagcctgcattcttcatcgcagatccccatcggcgtctgcaactggtattcgagcgtctggatttgcccggtctcgagggtccgctcgatcagctccgtcagtgaccgcgagaccggctccggaagcacctcggcgacggtcttgccaactaattcgtcgggcgggaagaacagaacctgacgtttcgccgcccggcaatcgcgcaccacaccatctcggccaagccggaagatcaggtcagggattgcatccagcagcgcgtgtgtctgcgactcgctctgcatgagggctctctgagccagcacacgctcggtcacatcggcgcacgcggcatggatcgcgggacggcctcggtactcaatgcggcaggcatgcagctccacccaacggaccgtcccgtctttacggacgatctggaactcgtagttctccggaaggggttctccgtccagacgcgcgtgataattggccaccacgcgctggcggtcttcggggtggatgaagtcccacacttctgccggtgatttcgccaggatctcctcgacggtgtagccgctgattcggctcatggcccggttggcaaacacgatccgctcgtcctggatgacgaccagtccctggagcgagtggtccacgagggtccgataggcctcctcggcgcgtcttcgatcggtgatgtcccgcccgatccccaccaaaccgatgatttccccctgctcgttcctcagcggcaccttcgtcgtcaggtaccagctctttgtcccgcagctcgcgtcgagcacacatcgttcgtggttcatgatgggtcggctgccggacatgagctcctgctcgtcccgagcggcccgttcggccacatccttcggatcgaagtcgtaatccgtcttgcccacgatcccctcgacgctggtcacacccttctggcgaagggccggcggattgcccagaacgaagcggccctgccgatctttcacgtagatcgcatcgggcaggttgtcgatgagggtgcgcagcaggttccatccggtgttgttctcggaatcgatacggaccgcgtccgtgggccggaacgcagggaagcacttgctcgccccggcggcatcgcctgcatccggccgttccatcggacagtctctgctcggtctggagcgaagctgtcggagatctcgctgcgcgcgaaggtgtccttccttgagccctgccaccaccgcactgacgagcaccaggatcagtgagcgaagcacgtccgatgggatagccgcatccaccgtccccccggtaaaatgcgtagtagccacgcaggccgccgctaccgccgccacggcgaaccctcgccagccgaaccacaggcacgccaacacggcgggaacgtagagcacgtgggtcccgtcaacgacgcccaccggcaggcaacgaccgcaccagacaagcacgcacgcgctggccagacccacgcccgcaagcacaggccggtaccatccgtgcccatccccgaccccgttcggcctccgctcatccatgctgaagacaacctgctcgtgggcccccaggcccgtccatgcactcaccgcccagccgaaggcattcctctggcgactggagtatcctcctccacgctgttattgtcgagacaaaaccggcggacttgaaccggcccgctgaggaatttccagcctgcccgctcccacccatattcgcgggagagaatttcgcgccagatcccgaactatcttgaacgtctcgcgtaatctttattggacgttgcgacaaaaaacccgtacaatgcccgaatcggcttgtatggttgctgatacgagaaagtagaactacaatttttctcccctccggaaaacatcgggtagcgccttgctgctcgatgttttctttttgcggacctccgtcattttgcccggccttcccgatctacctcgcttccgccatcaggcgtctttgccatggcacttcttgtatttctttccactgccacaaggacagggatcgttacgtccgatcttcggttgctccaaacgaatctgcttgaccttctgctcgccctgcggcgcctgggcggccgcacgctgcctttccgccatcgcaaactgccccacttcgtcgtgcgtcgtctggctgacgttccagacgctgcgcgcccgcgttccggcttcgagatggacgcggaatacgatgtccgtcacccgatcctcgatcgactcgagcatctcgttgaacatccggtacccttcgcgtttgtactcgaccttcggatctttctccgcgaaagagcgcgtccagatactgtctttcaggtggtccatcgcgtacagatggtccttccaggtgctgtcatacacctgcaacagaacgtatcgttccaggtctgccagttcgcgacgcataaactggcgcccgacttcagtcaggcgcgtcttcacgtccgcaccctcatcgaggtcgtcgggcgtcaaggaggcctcgaaccgggcattggcccattcgatcaactgctcgcgggtcaggccacggaccttgtcggtcagttcctcctccagctttccgtcgctatagctggcactgagacgcatcaaccgctcgtgtacgtctcgcggcttggcgctctgcaaccactcgacggacagatccgcgttgtacttcttgttcgcccactgcgccagcgactcgaagccgtagacgttggctccttgtgcaccgtaggccatgctcatcgcgaattcgacggggtattcaatctcgcgtcggcggtacttctccgccgtttcggcgagcatcagttcgcggacctccctggcgtttagacccttcagacgctcgatgtccagcttgagatcgaacttggcccgcgcccattcggtcaggcgccgaagagcgaaatcggcacggagaaaatccgccaagggcgagcaatccctccgatcgatctgctcaccggccgcggcaacaagctgttcctcgatctcctccggcgactggttcttgaccttgccggcgctgagattgaccttgaatgccgacatcgcccacttcgtcaggcccgccacgtcccacgtaccggggtcggagtagtcttccagatactcccccagagacaacgcgatgttgcttcgcgccgcatctttggcacgatccttgatcagggcttcgatctctttcggctcgacctcgatcacgtcggagagcttcagctcgatatcgaagttcgtccgcacccactcgagcatgcacctgtacgcgtattccttatcgagcatggattcgcagtggctggtgatcgtatggtcgatcatctcctcgatcatcgtccggagattgcgaccttcaaggacctgtcgccggcgcgcgtagaagatcttccgctggtggtccatcacctcgtcgtattcgagcaggctcttgcgaatctcgaagttgcgctcctccaccttcttctgagctttctcgatccccttgctgatccggctgtggtagatgggttcgccctcttcccatccgatccagctcagggccttgacggtccactccggggcgaagatgcgcatcaggtcgtcgtcaaagctgaggaagaactggctcgacccggcgtcgccctgccggccggcgcgtccgcggagctggttgtcgatccgccgggcctcatgccgctcggtgccgaggatgtgcaaaccgccgatatcggccacccccggaccgagcttgatatcggtccctcggccggccatgttcgtcgcgatggtcacgttgccgcgcatctggccgttgcgggcctggtgctgctggcccgccttcagaacaatctgtgcctcgcgggcgtgctgcttggcgttgaggacctcgtgatcgagcccgtgccgcttcgtcagcgccgtcgagagcaactcgctcttctcgatgctgatcgtgccgaccaagaccggtcgcccggccgcgctgatctcgttgatctcctcgacgatcgcgttgaacttctccggcatcgacttgtagatcacgtcctggcggtcgtctcggatgcaaggcttgttcgtcggaatcaccacgacgtccagcttgtagatcttcatgaactcgtcggcctcggtcgccgccgtaccggtcatgccggcaatgtcgtcgtacaacttgaagaaattctgaagcgtgatcgtcgcgagggtctgcgtctcctccttgaccgtgaccccctccttcgcctcgaccgcctggtgcagcccgtcggaccactgtcggccgtgcatcaatcggccggtgaactcgtcaacgatgacgaccttgccgtccatcaccacgtagtccctctccttttcgaagaccacgtgcgcgcggaggctctgctgcaagaggtgcggccagtcgatgttggtccctgtgtagaacgaccccatgcccgcgatgtcctgcgccgccttctcgccttcgtcggtcaggcgcacctgcttgcggtcgaattcgacctcgtagtactgggtcgcctgcgccaggcgggactgggccgcctcgatctcctcctgggccttgtcgatggcctgctgggccttgtcgatccgcttgctgtccttatccttcttggcctcggaaagctcgccctgtgcattggcaatccttcgttcggcggcctcgatctgcgacttgatccggtcgtagccgctctggagcgagatcaactgccgggcaatctggtcggccttcctgtagcgcgtgacatcgtcgaaggccgggcctgagatgatcagaggtgtccgtgcctcatcgatcaggatggagtccacttcgtcgataatggcgtactggaggggcccctgcaccatctgctccagcgaggtcttcatgttgtcgcggaggtagtcgaaaccgaattcgttgttggttccgtacgtgatgtcgcagaggtacatttctttgcgttcgcggccggcggtgtccatgtcggcctggatcgcaccgaccgtcagacccagcgcatgatagaccggccccatccactcggcgtcgcgtttggccaggtagtcgttgaccgtgacgatatgcacgtgtcgtcccgtcaggtgcacgagataagccgccagcgtcgccaccagggtcttgccctctcccgtagccatttcggcgatcttgccctcgaacagcacgttgccgccgatgagctggacgtcaaagtggcgcatctggacggtccggcgggccacctctcgcacgacggcgaacgcctccggcaggatctcttccggactccttccggccgccagggcggccttgaactcagccgttttggccctcagcgccgcgtcgtcgagctgccgcatccgctcctcgaacgcacccgtctgctccaccatacccgtgtacgacttgaccagacgctcgttccgcgagccgaagatcttcaggagaatcttgcttactttctcgaaagccatttcgttaactcgatcctctcggcaaaggcgccgttaccgccgtccgacgcggttcagtttttgaccctcgtgacgtacaaacccgtgcgggtgtccacgcggatggtctcgcccaccttgatgaacgggggcaccgtcaccaccagccccgtttccagggtggccggcttcgtctggctcgtagccgtggcgcccttgatctcgggcggggtgtcggtcacctccaggtccaccgtattgggaagggtgatgataatgggtttgccctcgtacatgctgacctggagcggcgtattgggcttgaggtacttcgggccgtcgccaaaggcatcgtcgtcgagagtaatctgatcgaacgtctgcaaatccatgaggacatgcccttcgttcgaggaatacaggtattcgtagttgcgtttgtcgagctcgacctcctcgaccacttcctcgctgcgaatccgcgcgttctgaatcgaaccgtccgtcagactcttgagcttggtctgatagacggcgccacccttgcccaatttgacgtgatcgaaatcgacgatcgcgtagagctttccgtcgatcttgacggtctggcccttctgcatttccgatgccttcatattcggctccaacagccacccgggtggatgttctcaagacttcgaacgcaaagcacttacagccgggtcagtatgccagaatcgccggggcctgtcaagaaacctgaattgggcccttccagacgccagcgggatgacagaatcaggccggaagagtatgctatcggctcagcgagcggttgtggcggccgcgggcagacaagacggtccttgcgtgggattggcacaatgctcggtgcaatcgcaggcgacattgcgggctcggtgtacgagaatctgcggaccaaacacaaggacgtccggttgttcggaccgcagtttacctttaccgacgacacggtcctgacggtcgccgtcgccgatgcccttctgggtgaccgcgactacggacgcgcgatcagatcttacgcccgccggcatccgcgacgcggctacggaccgggtttcctccggtggatgctgacggagggcagcgaaccatacggcagctttggcaacggctcggccatgcgcgtcagtccggtggcatgggccttcgattcgcaggacgacgtgctgcgcgaggcggccaggaccgccgagtgcacgcacaatcatcccgagggcatcaagggggcccaggcagtggcactggcggtctaccttgcccggatgggcgaggacaaggagtcgattcgcaggcacgtcagcgaacaattcggctacgatctttcccgcacggtcgatgcgatccgacccgactacgcgttcgacgtaacctgccagggctccgtgcccgaggcgatcatcgcgtttctcgactcctgctcgtatgaagacgccgtgcgcaacgccatttccctgggcggtgacagcgacacccaggcctgtatcgccggggctatcgccgaagcgcactatcgcgaaatcccagaggagttcctaaggcaggtcaggagacagttgaccgacgatctctggggcacggtgcggcacttctacaggcgctacggcatcccacagatcgccgagcgcatcgaagcgtccggcctgccatagcctcctctctctgccaaaggggttttcggttgataatccgtgccgcccaaggtatcacagcgtcatgaattgacactcggccgatccgacctcgatccacctcgatgtacaggagagcctttatggacaagcatatgaatcgacgggaatgtctcacggcgatcgggctgtcgggactgaccgcgggactcggattgaccggcgcgccggcgtctcatgcccagggcgtcggggaatcgagtggattccagagttcggtcatcgacgctcataacgttcaggacacgcgcacggccgcgacgatcgtcgacggcaaagtgatccaaccgcagcgagagctgccaatcctccatcaaaccgacgtgcttgtagtcggaggaggctcggccggggtggtggccgccattgccgcccggcgtgccggcgccagcgtcacactggtcgagcgttacggccacttcggagggctctggaccggcgggcttgtcgtgctgatcatcgggcacatcgtcaaaggcggaaagcaggtctgccagggaatcggcgaggagatgatgcgacggctggacaagctggacggcgcgatcatcgaccgccgtcccggcgttaaccccaccgtcgatgccgaggctgccaagtacatgatggtcgagatgatcgaggaggcaggcatcgacgtgttccttcactgctggggcgtcgatgccatcgtcaccgagaacaccgtgcgtggcgtcgtcttcgaaagcaaatcgggccgccaggcgatcctggcccggaccgtggtcgacgccacgggcgatggcgacctgttcgcggcggccggcgccgagtttgagcatcgctctcacaacgtcggtctcgtctcacggatcggcaacctcgaccgggtcgatgccgagaaggccaggcaggctccgaaaccgaagcatttgggctcggccacccctgtgcccggcgtcaactgggtcaacctgacgggtccggaagtggacgggctggacatcgcgaccctgacacggatggagatgaatcaccgcaagttcatctggaacaacgtccagaggacccgccagacgcccggatacgaaaaggtctatctggtggagaccgcgccgcaactcggcgtgcgcatcacccgcgtcctcaacggcctgaatcgcgtccggctgtccgacctgagaaatgcgacgaagttccccgacgtggtcggcgtgggcggctcttcggccgcgacccacggcgaatggcagattccctacggggccctggtcccgacgaaggtggacaacattctggcggccggccgctgcatcagcgtcgacatgggcatggccgacctggtgcgtctggtgcccaactgcttcgtcaccggccacgccgcaggcgtcgcggccgccgtagctgtcaaggacaactgtcggccccgcgacgtggacatcgcgaaggtccagaaaatcctccggcagcaggaggcctacctcgggtgagtcactttgcggacctcaacgggcaatcagaccggacggataccgcagggcttcgccacatccgatggctggtccgctgcctgtccctggttgcggccattcttgttctgctggcagccaggcagtcccgatggccggtgctggtcccggcgttgagtccctttatcgctgtggggtcgctcttggcgacacgcgtggtagtggccacagcgtgcctcggattgggggtgggcttcatcgcgatgctgcggccccgctggttctgccgatggatttgtcccctgggcctttgcgtcgacacagcaagccgattgggccggcggtgcggccgaaatcctgcgaagcggttctcacccggccggtggatcgtgctgctgaccttggcaggcgcgtgcctcggctatccccttctgctatggttggaccctttggcggtattctcgggggcgtttgggatcacaggatcgcggacaggctggctgatggccctgcccctgtttctggttctgacgacgagcttcgtatggccgcaaatctggtgcggcagggcctgccctctggggacgtttcaagacgtactgagccatctggccaggtacgcacgcacaaagcgcgaagggccttcgcccgaacggtggaatccggcgctggcccggcgaacggtgctgggagtagccgccggtgccacgctcgcggcgattacgcggtccagccaaagctccggaccgcgtccgcttcgtccgcccggcgcgatcgacgagccggagtttcgcggcctctgcgtccgctgtggcaactgcatccgggcatgcccaacccacatcattgagccgtctctcggtcatcacggactggcagctctcttgacgcccgtccttcacttcaaagagaattactgcctggtcgattgcaccaagtgcatggcggtctgccccagcggtgctcttgtgcggctgtcccctcaagacaaaggtctgaaaccgataggtctgcccagagtggatatgagttcatgcctgctggcggagggtcgagagtgcaccgagtgccgcaggtggtgtccgcacgcagcgatccgctatgcgtggtccgaaaccgaatacacgctgatccccgagatcgatagccggaaatgcacaggttgcggcgcctgcgaggcggcctgccccacgaaaccaaacaaagccattctcatagccgcgatggaaaagaaggccggcggataagctttcgcaaacggcgtcacttgtgcctctttttcttcgcctggagttttcgcgtgagcttgcgggcgttgcggcgaggcttgcggtccgattcgcgccgcgacttgcctcggccttcgcccaacggcgcaacgggcgcgaggttcaactggcgtccaggaacgttgaccgaaatgatgcggacgtgcatgggctggcctaaatggatttcctggctactgcgctcgccgacgacacactgggcggccttgttgagcagccactcgtcaggccccaggtcctcgaatttgatgagaccttcaattccgaacttccgcgactggacgaacagcccgaatccggccagaccggtcacgacacaatcgagctcttcaccgatccgcttgctgagcatttgcagggtcagcacggcgacgaggtcgcgctcggcatcctcagcccgttgctcggtgaaggtaaggtgcttgccgatagccgcaaggtcctgaccggcggccacctgcttggcgacgtcgatccgatcctcaagatagtactgcaattgccgatgcaccaacaggtcggcataccgccggatcgggctggtgaaatggcagtagtgcgtcgaggccagggcataatggccgatgtgcagcggcgcgtactgggccttctcgaagctcctcaggacgaccaggttgaccgccaacgaacgttcggcgtccttgacagaatccagcaggtcctggatcgcccggcggtccgggttgcggggcatgggaaagcccatcgtgcggagcagcctggagagattcctgatgctcagcgcatcgggctcggggtgaatgcgacgcatgaacggcacatcgagccggtccagcagcgacgccacggcgtcgttggcctcaaccatgaacatctcgatgatcgtgtgcggatagctgttgtcggcgggatgggcatcgacgacctggcccgactcgtcgaagtccagctcgggctcgggcaaatcgaggtggagcatgccgttgtccacccggcgtttctcgatccgtcgggcgagtgcctccatcttgccaagcaacgtgatgacttcgggcttggtgtctttggtgtggcccttgaggatccgatcagccagttcgtaggtcaggcgggccttggagcggatgatgctgttggcgaagcggcgatacagaatccgggcggcgtcgtcgtaggtgatgtaaacgctcttggcaaaccggggctggtcgggctggagactgcaaatgccgttgctgaggacctccggcaacatgggtatcgtcttgcccggcaggtagacgctgttgcctcgaaggcgggcttcctcgtcgagcggcgaaccggccgggatgaagtggctgacgtcggcgatgtgcacgccgagcacccagttcccgtcggcgtcggtctccagactgatcgcgtcgtcgaaatccttggcgtcgggcgggtcgattgtcacaatcactttgtcgctgacatcttcccgctcggcgcccggttcggcgccgaaggcggccgcggcgctgcgcgcctgctccaggcactcctcgtcgaacgcgccgggcaggtggaactgccgcagaaccgcttgaatctctgtctcgtatcgcccggcgcggccgagcacctcgacgatcacgccccgagccaggtactgctcattcgggtacgacaggatctcgacgacaaccttgtccttctccctggcgttcttggccgtaacatcctcgacgacgatcggctcgatgaaccggctcccatccggctgaacgatccacgcctccggatgcctggtcagggtcccgatgaactgattgtcggcacgttcgagcacctcgatgatctcgccggtataccgggtctcgcccccccgtgtgcctttgcgcgttgccttggcgatgacggtgtcgcctgtcatggcatcgcccgtgctgtcgggagggataaacaggtcgccgtgcgcgtttgcttcgagcggcacgacaaagccgaaccctttggcgttcttgcggaaggtgccgacgatctggcccgccatggagggcaaagtcacaaggttgccgcctccgatgacgacatgcccggcgcggcgcagctcttcgaaggccgccttgaactccggataggcatccgcctgcaccccgagcgccctggccaattgggcgaccttaaccggggtgtaatcggcatgctgaagcaacttgacaatccggtctcgatacacattgggcataggccactccaacgaaagcagcacccaatcgatctcgttctcgactgggtgctggcactttcctgcagcgctaccgaattggcaggctacggggccggaggtcggaccggccgcagccctacggctgactggtctgccgaccggccttcaacgcgttaagtttcttggccagccgggatttcttccgcgccgccgtcttcttgtgcatcgtgctggtggaagccactttgtcgagcttcttgactgtggcccggaattccgctgtcgccttctcgacgttcccctcgctcaaagcggcttcgaagcgcttgacctgcgtcttgacctggctcctgcgggcccgattgatgactcgccttttggcgttctgcctgactctcttcttcgctgataacgaatgtgccacgttgttctcctggtcgtttccaaaacgcgattacaaaactcactgagaggttgattctctcgatccggcgtcgcccgggccgtccgtccgagccgatttcaactccgcccgaagccgatctacccgttcactgacatccttgtacccaaagtcgagctgggcgatcctgcggtacagctccagtgcctggtccaggttgccctgcgcctcgtgcgctcgggccagattataccgcaactccttggcggttgcatcatcttttatctcgtaggagtcgattgcctgtgaaaagacatcgatggcgtcggcgtaccagcccttcataaagaagcagtagccgatcttgtccatggcggcaatccgtcggcgcgggtctttctgggcgtcctggaaaaacggaatcgcctcattgtaccgctcgccgcgcatcagccgcaggccatattcgtacttggccgacaggtcggtggggtagttctccacgcagagccggtaatgctccagctctgtgcggctgagggcctccgtcagttccctgacggcggcttggaccgcggcatcggatggctccgccttcagttgcttcctggcgtcccggagcctgcggcggccctgccggatgcggagcagacctgcccgttcctggaaccggaagtccttgtggcgctcggccgcctcgctgagcaattggatcgcctcattttccgcgtcctcctgctccagatccgccagggcatcggccagattgaacacgttctgggcgacgtccggctccttggcgtaggcccgccgggcctcctcgacggcgctgagccggtagtcctccgtcttgaccatccggtcctgggaatacagcttggcctgggtctcggggtcccggatcgactggcggaagtcgccctcgaccccgtatttgcccttggacatcgtcaattcggccgagaggttcttgaactcgtcggccagctctttgtcgtcgggcttcatccgcacggcccgctggcaggccgccaccgctttgtcgtactgccccatcgctttgtagcagtccttcaacaggatgtaggtctgcacagacggcttctcgatggcgttgttcgtctggaagatcaggttggcgatccagtgggcggtgcggtggtatccgccttccaccgccgccttgagcatcgcctcggcgtagggcgtgtggtcggggtctttcgcgaacaggtactcggcattgagcatctgttcgagcggagtcctgcccctcagacgcctgacccgctccaccacggagggtttcttgccgccgcgcccccgccgctgaagacccagctcacacaggggcaggtgtccctcctcgagcgcatcgggggcccgttgaagaccctcgaggtacatctcgatcgcgtagtcgtagttcttgctctccgcggcgctgcgggccttctcgaaaaacgccctggcggcggccagatcactcgggtccgacggagcggccgcaacgggcttctccggaccggctccggttggctcctgcgtccggggccgctgggccgcattaacgcgggtccgctggggtcgcggccgggcggcaggagagacggtgagcggcgccccggttccgccgcgtctggaagcaccgagcttgcccgccagacgtttcaggtcctccaccagcatcggatcctcgggtttgagccgtgcggcacgctggcacgcggccacggcgcgctcgacttgtccgatcgcctcgtaggaatccttcagcaggatgtagaccgcagccgaaggcttgcgggcattgttgttggccaggaacatcaggtccgccatccacttgaccgtctcggtgtatcgacccgcgacagcagcgcgaagcaccgcttctccataggccagattctgagggtctttggcgagaagatactcggcgttgagcatcttctccagcggcgtgtcaccctccgagagcctttgctcgacctcctcgggtgaaggcttggccccgccccgctcctcgcgtcgcagagccagcacgcgcagatctatgtggccgccctcgaccctgtcgggactgtggcgcagtcccgccagatatgcatcaatagcccggtcgaaatcgcccgcctcaacagcctggcgggctcgttcgaagtgggcttcggcctgcgcttgtgcttgagcatccggttcgggcatagcggcaagtagattatcacctcacagggtatacaatggacccactgtagtagtcggcctggttttgtcaacgataaatacttgcgtgggctgcgacgccgcgttataagtaccggcttgccggttacctgaccttgcggggtcgtgaccgccatgatcgacacgtcatttaggaagaattcggtatgcaaacggctcttgaacagtacgaccctcagatctacgagctgatccggcaggaagaagccaggcagagcggctcgattcggctgatcccttccgagaactatgtctcgcgcgccgtgatgatggccagcgcgagctgtctgacaaacaagtacgccgaaggctatcccggcaaacgctactacgaaggccagcaggtcacggacctgatcgagaaactggcccaggatcgggccaaagcgttgttcaaagccgatcacgccaacgtccagccttactcgggctcggtcgcgaacctggccgcctatgcggcgctgatcgagccgggtgacacgattatggggatgtccctgtcccacggcggacacctcacgcacggctggaaggtctccctgacgagcaagttctacaattccgtcccctactacgtgaacaccgagaccggcctgctcgattacgacgccattcgagacctcgccaaaaagcaccgtcccaagatcatcatctcgggggccaccgcttatccgaggatcatcgacttcgagatcttcggccagatcgccagggaagtcggggcatacctcgtcagcgacatcgcccacatcgcaggtctcgtggtcgcgggcattcacaagagcccggttccgtatgcagacatcgtctcgacgaccacgcacaagaccctccgtggcccgcgtgggggcctgctgttgtgcaaggctgagcacgccgccaaagtggacaaggcggtctttcccggcctccagggcggcccgcacatgcacacgctgaccgcgatcgccgtggccatggccgaggccaatacgccggagttcgtcgcttatgccacgcaggtagccaaaaatgccaaggcgatggcgaacaagctgctcgaatacggcttcaagctggtcaccggagggacggacaaccatctgattctcatcgatctgcggaacaaggggatcccgggcaagaagctggccaaggccctggaccgggcccgaatcgtcagcaattacaataccgtcccaggtgatccggcccctccgttcaatccgagcggcttgaggatcggaacgccggcgatcaccacccgggggatgaaggagccggaggccgagcagatcgccaccttcattcaccaggtggccgagaacatcgacaacgaatcggtcatcgagcagatcggcaaagaggtcctgctgttgtgctctcagttcccggtgcccgagcacttcatcataccgccgaaaaatggacatcggtaggggcttgccgcacacggacggggcaatgagaatggcaatcggcgagtgatgtcgcgggacccgaggccctgttggtatgcgcgtggatcgcggtccacggcaaacagagctgtccatcccacgtagcataacgtatgacagagccaacattgacagcgggcgtcctcggcttgggcagcgccggccatcttcttctggaggcggcgcgtcggaccggccaattcctcatcaaggccgtcgcggatcaggacccgcagcaggcggagagaaccgccgccgagcttcaggccgagccctataccgactaccggcagatggtcgtccagaaccaactcgactgccttctcgtcgccgccgacacccatctctgcgacgagcacctcaagacggcgatccgcaagaaattccacgtgctcaaactcgccccgccggcccgaaactacgaagagacgctcgagtacgtccagatggcggagtatgagaaggtccgattcgcgatcgccaatccggcgaggtttcggtccagttacagcaccgcccacgacttgatcgtccggggacaggtcaagggcgcgtttctcgtcaccgcgtacagcgagactcccgacgccgatcggcccgcctggcatgccgatccccgattggccggaggaggggtcctgttgcacgactgtcatcagatcgtcgatcagatcctctggaacttctccctcccgcaacaggtctatgtcctgaccaccaatcaagcccccgacaagcaacagcggttgtacctgacggaggacacggcggtggtctccatgaagttcaccgatgctctgaccgccagcatcgtcgccacacgacgcagcggccagggtcccacgcgcaggggtctgcagatttacgccaaggaagcccgtctgacgatcacggacaatcgtgtcatcctcaacaccgactccggtctggaggaccaagtctggcaatttgaggaaaccgaactggatacgatgcaacgactgctgtccagctttgcgcagagcgtccggaacccggccgagcatccgctgatcagcagcgccgccgagaacctcaggaatatggccgtattcgaatccgcttacctgtcggcgcgaacgggtttccccgaagagcctctgcggattctccagatcacgcggaacacccccggcgccactggcttgtccggcccgaacatcgccgcgtacatccgagacaccgcattgtgaggccttcccgagggccgttgagatcaagaaggatgcacgacaggggaacgatggacggtccgtcacacgcgacacctccttgttcgggtacacttgatgtttgtaggtacaccttcacgggggttgcaatcgactttgtcattccgaccggagcgcagcggagtggaggaatctggctgcgaacgggctattgccttatcgccggccagatttctccgtgcgggcttcgcccttagtcgaaatgacatccgccacgcgcttcgagatgacagccccccttcctggcctccccaggaacctacctacaaacacacagtgcaccctccttgttccggggccccaacaggcatttgacaagggttgcacggcggagtatcttccgcgtcggtggtgtcgataagacggccacaatcagcagaaccgtgtcggcagagttacagaaggcgccaattccagtcgggaggtttgagccatgaagaacttgatttacggcgggatcatcgcgttgtgtctgatcatagcggtagtcgtggtcgtcgtgactcgctccagcggtcccggcggcgtcgaaagcctctctgacgatacacaggtgtgggtcctatgcacagcctgcaacgcctcctaccagatgggagagaaaacttactacacgcaattgcaggagagaaccacacaaatggccaatccgatggccagggttctgttgacctgccagaaatgcggcaaggacagggtcgtgaaggcagtcaaatgcgccaagtgcggcgaagtcttccccgaaggcatcgtaccgaacgacttcccggaccgatgccccaagtgcaagttcagcgccaccgaggagaaacgaaaagcccgcaaggcagaggcagagcaaggttgagcgccgggcacatcgctcaacgcgacaggtggccgctctacggagtgttcggttccgcaacctcgccgtggctgtggcgtgtggtcagaacgtcgagcacattctgccggtactcgtctgtgcccttcttcaattcgctgaacatggcatagcgcccaccgatgcgatcttccaggtacgcgatgcggctctcggggttggggtgcgtggagaaaaactcgatcggtcgaacttcctgcaattcctgcaggatccgcatggtctcgaccattccgctgggatcgtagcccgcctgaaccatgtaagacagtcctgccaggtcggcatctttctcatcgtctcggctgtattgcagggacaggacgccgctgatgaaacttgccgcccgcgtcacgtcgcccggcgcatcgccaacagccgcggcggccaccagcgccgtcatgccgatctgtcggctcatggccaccagtgtgtcacgcgcgaccacgtggcccacttcatggcccaggatcgcggccaactgggcctcggactcgagcttttccagaagcccgctggtgatatagatgtagccccccggaacagcaaaggcgttaatccccttctgacggacgacggtaaagtggtaggcgatgtccgggcggtggcacacccgcgcgatccgctggccgacgcggttgacatagctctggagattctcgtcggccaatcgtccgcccaaggccctctcgatctgtggcgcgtacttgcggcccagttcgacatccttttccgggccgaaaaacatcagttcctcctcccctgtgactggattgaccgcgcagccgatcagcacagccgtcagcacgacgcccagcagcgccaatcccgttctcatgcccatgacctctggaaatcgcgaagttaccgttgaaaagcctagtggaggcattatacttttggttttctcttttggtagtggcaaccatgaagcaaacggagccttgcagcggctgcagtcaggcacacgactgcgtcaaggtctatgagcgactcggccacgccggggggccctcggtggcgtggaaggcggtcgtcgccttcgtgctgccggtcggcgcgttcatcgctgccttggcgatattcgaccgcctgctggaagcggtggtggcagaacggcaccgaacgcctgtagccgccgccatggctttcgtgtttgccgttggcttgactgtcacgaccagtctccttctccggcgttacgaaaagaagcgttagcacttggattgcatcaatatggcaaccgattcgcatggcagatccacctttgctcgcggggtgcatcctcccgagagcaagcatctgacccaagacaagccgatcgagccgggaccgcccgtcggagagttgtcgatcctgctcagccagcacatcggcgccccctgccagccggccgtccagaaaggcgatctcgtggaggccgcccagaaggtcggtgagtgccaggcattcgtctgtgcgcccgttcatgctccggtggccggcaaggtcaaagaggtggctttgaggtcacacccggtgctcggacgctgtcaggccatcgtcctcgagcctggggagctggcgccgccggctttgccttcgttcagcctgccggccgggttcgatccggctcggtacagccctcaggagatctgcgaggccgtccgggatgccggtctggtcggcatgggtggagcagggtttcccaccagcgtcaagattcagccggacgcgaaacccccaaagcacaccctgctcgtcaacggttgcgagtgcgagccctacatcacttgtgattaccgcttgatgctcgaatggaccgaccaggtcctcgccgggattcggctcgctcagcgggcctgcggtgcgtcgaaggtcttcgtcggtatcgaggacaacaaaccaagagccatcgaagtgatcggcgacgcgatcaagagggctggattgagctcggacatccgcgtggtgtcgctgcaaaccaagtacccgcagggaggcgagcggcagcttatcaatgccgtgctcggccaaacggttccgaccgggggcattcctcccatgatcggggtcgtcgtggtcaacgtggccaccgcagccgccatcgccgatgccgtcatctaccgccgaccgctgactcaccgcgtcgtgaccgtcacgggcgaagccgtcgccaaaccgggcaactactacgtcgccattggcactcctgtggaagctctcctcgagttctgcgggggcgtgaccgagaaatctgccaaggtcgtcatgggtgggccgatgatgggactggccatcgccgatctgagcacaccgatcacgaagaccagcggcgcggtgaccgtcctgacccggcaccagatcggccaggccaagttcgaacggcgacagaccgcctgcattcgctgcggccggtgcctggaggtgtgcccggagaatctcaaccccacgcgaatcgctcatgcggtcaaggctaacctgctggatgtcgcggagcgccacttcatcagcgcctgcatcgagtgcggctgctgcagctacgtttgccccgccaacatcgaactgaccggctacatcaagacaggaaagatcttcctggccaggcagagaaagaagatgccggcctgacgggcagggggcggcacggcaaaggataacaaggattcgatagatgctccgagatatcacggtttcattcgcaccgcacatcagcaagcggctctcgacgcagcgggtcatgctggacgtgctcatcgggctggtcccgctggtggcggcggcgggtttctacttccgggttcgcgccctggtgctcatcggcctgtgcgtcctctggtgcgtgggcatcgagtgggtctgcaacctgattcgcaggaagcccaactcgctctgggatctcagcgcggtcgtcaccggcgtcatcctggctctgtcgttgccaccggccctgcccttctggacggccgcggtcggctcggcgatcgccatcggagtcggcaagatggccttcggcggcctgggggccaatgttttcaacccggccatggtcggacgcgcctttttgaccgcctcattcggcatgctgatgacgacgtggaccgtgccggcgtcgatcgacagcaccatgccgaagctctctccggccgacgcggtggatgctcggacacaagccaccccgctggcctggagcaaaacagccatcaaaaaccaggccgaagcgaagacgtacagccgccggctgcttctgtcgacgatcaccggggaggtggccggcagcctcggcgagaccagcgcgattgccgccctgctcggcggcgcctatctgctctggcgtcggaccatcggttttcacatccccgtcgccgtgctcctggcggcattcgtgttcggtggaatcgcctacctgatcgatccggatacctacgtgcagccgttctaccacctcacgagcggcgccctgctgttcggcgcgttcttcatcgcgacggacccggtgaccgctccgctgacgcgccgcgggatgtggctcttcggcgcgggcgtcgggaccatcacgctgctgattcgcatcgtcggcacttacccggagggcttcatgttcgcggtcctggtaatgaacggcctgacccctctgatcgaccgactgtgccggcgggtgccggtgggaggattgcctcgtgttggatagcttgaagcacttcgtacgggaaagctggttgctggtggtcgcctccgtgctgtgcgggctgctgctggccgcgacgaatgccgcgctcggcccgcggatcgaggtgaacaaggctctgaagctgaccagtctggcgggcggtctgctgcctgcggcacaggcttttgtacctctgtccagcccggtggaagtcaaaggcctcgacgggaagacggagtcggccgtcgtattcaaggccaccgccggcaatgccgtcgtaggatgggtcttcaaggtcgtagggtcggggtttgccgacagaattgagctggttgtcgcaaccgatgcctcgttcagcaggcttgccggctacgacgtggtcagcagcagcgaaaccccgggattcggcgaccagatcaaagacgcgtattaccgcaaccagtttgccggggcgccggtcgggccattctcgctcgtcgggctcggcgccgccaacgagcgggacatcgattcgaccatcgtcgccatcagcggcgcgacgatcagcagcaccgccgtcgtccaggccatgaaccactacctgccgcaactgaaggaccaactccagcagaaagggctgatcggccatggcagcaacccctgacggacagaacctgtatgcagaggccgtcgccacaggtttgtggcgtgagatcccggtctttcgcatgctcctgggcacgtgcccgaccctggcggtgaccgccgcgatcaagccggcgctgaccatgggtctgtgcgtgatcttcgtgctcgtgtgcagcaacatcatggtcagcttgatgcgaaagggcctgcgtccgcacgtccgcatcctgctgttcacgctgacgatcgccaccttcgtgaccattgcggacctcttcctgagggcctatcagccggtgatgagcgaggccctgggcccgtacgtcccgctgatcatcgtcaactgcgtgatcatatggcgggctgaagcccgggccagccacagcggcgtcctgctgagcatcgtggacggcctggcgatgggcgtggggttcaccatcgccttgtgcgttctggccacgatccgcgagctcctcggcaccggccgcctcttcgagatccaggtcctgcccaaggccttccccgcatgggcggcgatgggcatgccggtgggcgcgtttctcacgttcgggttcgtgctcgggttcatcaactacgtcagccggaaacggagctaagggagtcgcacgatggatttgctgtacgttctgctcacaggcttcatctccgtggtcctgatcaataaccttgtgttcacgaagttcctggggatctgcccgtacatcggagtatccggacggatcgatatggccttcggtatgggcctggcggtcacgttcgtcatgacactcagcggcaccctcacctggatgatcgaccactggctgctgatgcccctgaacctggaggtggcccggtatgtggccttcatcatggtgatcgccgccgccgtgcaactggtggagatgtacctgaagaagttcttcccgtccttgtatgagagcttcggtatctttctgcctttgatcacgaccaactgcgcgattctgggcctgtgcctttttctcgtcgtctggggcaccggtaccctgattgaggcggtggttctgagcttcggcggcggcattggcttcaccatcgcgatttgcatcatggccgggattcgcgagaacatgcagatggtcgacgtacccgaatccctgcgtggcgctccaatcacgttaatcacggcgggacttctggctctggccttcatgggatttgcagggatcatatgatcgtgttgacaagtcttctgggagcgatgagtggcgtgtggctggccggtctgatcatgctcggcctgggcctggtctttgcagtggtcctgctcgtcgccagtgaacgactcaaggttcccgtcgacccacgggtcacccaggtctatgaggtcctgccccaccttgattgcggagcctgcggctatcccggttgcagtggatacgccaaggcggtgatcgccaaccccgaactgcttggtcagtgcgcgccgggcggggccgacgccgccggcagaatcgccgccatcttaaacctggcaatcagcgagtcggggccggccaaacgaccgatcgtccattgccgggcccacacggccgaccggacctactacgcccagtaccagggcattccgagctgcaccgccgccaacgcgctggccaacgcccaggcgtgcaagttcggatgcctcgggttcggagactgcgtccgcgcctgcaagttcgacgcgctccacgtaatcgatggtctggccacggtggactacaacaaatgcaccggctgcggcgcttgttcgaaggcctgcccgcggagcctgatcgagatggtccccttcagccacgagaacatgatgacggtcgcgtgcagaagccgggagaacggcagaagcacgcgggccttctgccaggttggctgtatcggttgcggcctgtgcgccaagcagagcgaggccttcaccgtcgccgacaacctcgcccgcatggactacaccaaatatgctccctgcggcgagaatgaggccgcctacaaaaaatgccccaccggcgtcatcgtctaccgcggcaagaccgccccgcccccgcgcgagcccaaagccagacagaccgagacagttgaacgctcacaatgacgtcctggcggtgccatgtccggcgcgctaccggacgtaggctttcgctccgctgctgaagatcggctgagcgccttggccgacgggaacgaggatcgcctccacctcagggatactctcgatcaaggtgaggcccgcctccggccccagaacattcacagccgttgagagtgcatcggcagtgatcgcatcgggagcaatgatcgtgtcgctgaccagcttgcgcgcgcctttgccggttccggtatcgatgatgtggctctccttgtttccctggaccttgacgaatcggcggtagtctccactggtagccacactctcgtccgttatcatgagaaccaacaggagcttcgagtcgcccagttcgtccggcgccacgttcgggtcctgcagtccgacccgccaacactcctgtcctttcgggggcaatccgaagcagcggatgttgccacccaagtccaccattcccccgaccgcccctcgcttcttcatcgcctcgaccgactggtcgaccgcatagcctttcgcgatcccgccgagatcgattctcatcccttcgaccgcaaagcggaccgtccgcgtattcggatcgagcagcaccttgtcgtaacccaccttgcgttgggcctcggcgatttcaacctccgtgggcgtggtgtcggtggcggcggcgcgacgccacagatcgcccagagcaccgatcgtgacatcaaacgcaccacccgaaagctcgctgaatcgcctggcgctctccaggacctcaaaggtcgctttatcaacctcgaccgccctgtggtaagcctcgcgattgatcgtgttgagctcggagtcgggattgtggtagctcatcagctcctcgacgcgcctttgctcttcaaatgcggcggcgatacaggcgcgtgccaccttctcgctcggcgcgatggccacggcacgggagaatgtccccatgacgaccttgtagccgctgtcgacctgaaccgtctgtggcgtccggaggctgacgcacagggcacctgcgagcaacagacacaagactccgacaacgattccacgaccggttttattcatggcagccccatgcgtctgtcggcgggacataccccgccccatctatcaagaccacgccagactcgttataataaccacatgacagacagaaagatagagatactggccgaccgggtcgagcgcgagttccttcctttcgtacggcgaccggcgcgttatattggcggggaagtcaaccaggtctgcaaggccatcgagcggtgcgaactgacggtagcgttgtgctttcccgacgtgtatgaagtagccatgtccaacacgggcctggccctgatctatcacgtcctcaacggcctggcgaatgtcgcggccgaacgcgtctttgcgccctgggtggacgccgaggcggtcctgcgcgagaagaacatacccctgttcagcctggaatcgaaggcgtcattggctggcttcgacgtgatcggcttcagtctcaccaacgagctttgctacacgaatgtgctgaacatgctcgacctggccggcctgcccgtccgaagcgaacatcgcagcgaggacaatccgctggtcatcgcaggcggcgggatggccaactgctgcgaaccgatcgccgacttcatcgatctgttcgtcctcggcgaggcggaagaagccgtcgtcgaactggcgaatcttctgatcgccgcgaagaaggagggtcgagccagggatgcggtcttgttcgagatcgcacagcggttcgactgggcctatgtcccccgcttctatgagttccgatacgaggattcctacatcacctccttccaggctcgaaacgaagcgctcccgactcgattccacaatgccgtcgtcagcgacttcgagaacgcaccggtctcgacgcgtcccatcgtccctttcgtggaagcggttcacgagcgggtcagcatcgagatcatgcgaggctgcccgggccggtgccggttctgccaagcgagcttctgccgacgaccgatccgctatcgcagcgctgcgaaggtcttcgaactggccaaggcctcgcaggagacgacggggttcgacaccgtgagcctgctgagtctgtcgagcgccgactacccgcctctcgaagagctgatcgcccggttgaaagaatacttcgaagacaagaaagtgggcctgtcggttccgagtcttcgtgtagatcagcagcttcacatgctgccgaagtacttcacgtcggtacgaaagagcggcctgaccatcgcggtagaggcggccagcgagaagctccggcagatcgtcaacaagccgctgaaagacaaggacctgtttgctgccgtcgaggcggcatatcagtcgggctggcagaagctgaagctgtacttcatgatcgggctgcccggcgagacgctcgacgacgtcaaggcgatcgtcgatctgtccgaccggttggcgagactccgtaagagcgtcgaccaccacatcgcccaactgaatatcaccgtcagttggttcgtgccgaagcctcacactcccctcgcctggtttggccagagaccggcagaatacttccagcaggcaagggagctggtccttgacgagaagcagcggcgtcgtgcgaatcacctgcatttcaagttccacgacatccaccggagcctgctcgaatcggccatcggccggggcgaccggcgttgcggccaagtcatcgaggccgcgtggcgtgacggcgcacgtttcgatctgtgggacgaatgcttcgaccacgagcggtggcggaccgccttcgccgccgcaggcatggaactggagactgccgcacagagagcattcgaacccgaccagagactgccctgggaccacctcggaggtcccgacaaagaatacctcctgaggcactactacgacgccacgagtttgttgtgagcaaggggctcttgcgtccgagaactccgcaggtccgcattcgcccgcccgaatctgtccatcaagccggtattcgcacggttgctgacatgcgccggcgccctcataggcagccagcaaaccgcctcgccttaaaatcctgtgaaaacaggaattacgaagagacgcgcattcagaacgccaccaagcgtagcggcgattgtccccgctcgatcatggctgggaccggtcggatggttgcgcggcgcgaatgcgttggaacccgacacccgatgtgccgatgaatgctgtatcagcaagaggagatgtgatccgcaagacctcccatgctgaaatcgcatcaacatggcttctcagaatgtggcctgtgaagcacagcgcgcccgggagcaggtgcactgggccggaagacgtcgatggcaatcgcacaagaacagtggtcactaccgagaaactcacaacctgctctgcgggtagagacacaagaggaagccggtcatgcgcaactgtaagccgattctgctggtggaagacgacacgattgacgccatgacggtcaagcgggcgttcaaggaattgaaggtcatcaaccccttggcgcacgccttgaacggagaggacgccttggcctatctgcggcagcaaggcggcgagcatccctgcgtcatcctgctcgatctgaacatgccgaagatgaacggcgtcgaattcctccggatcgccaaagacgatcccttgctcaagaagatccccgtggtggttctgacgacgtcgaatgaagagcgcgatatcatcgagagcttcaagctgggcgtggccggctacatcgtcaagccggtggattacggcaagttcgtcgaggccatccggacgatcgacctctactggacgctgagcgagttgcccgacaccgacgtcgtggcgcaaccctcgtgtgaccagcgccctcttctcgcggaacggccgtagtccggacaccggagtccgtcatggccgacgagactgcctgctcaacaacggcatgacgctgccggcacagcgcgtccgaggggcaagacctccacccctgtttcggcagcatcggtcagggggtgcaagccattggcccggccgcaaccaagttaccttgactgtcgcctccaagatctgaattttcctttgacatccgccttgcctggcattataaagacatttttacattgcgctcgcattcgcactcgcaatcgatgcgatgtcgcccggatttgacatcgccggcacggagcggaatgggaagccttcaagacaaacaattgatcacgcaaaaggagaacgcaatgacgcaagagaaagccatcaattctctgatgaccgagaatcggacgtttccgccgcccgaggccgtccggaagaacgcccacgtctccagcatggagcagtacacgaagatgtgggaaagatccatcaaggacccggacggattctggctggagcaggcgcaatcgctgtcgtggtttaagaagccgaccaagagcctggagtacacctgggacaccaagagtcgcaagatcgagcacacctggtttgccgacggccagttgaacgtctcttacaactgcctcgaccggcatctcggcacaccgaccgcccggaaaacggcactcatctggcagggagagatcgattcgaatgtcaggaaatacacgtacgagcagttgcacagagaggtctgcaagtttgccaacgttctgaagtccaagggaatcaagaagggcgaccgcgtggcgatctacatgcccatggtcccggaacttcccatcgcgatgctcgcgtgcactcgcatcggagcgatccactcgatcatcttcggcggtttcagcgccgacgccctcgaaggacgcatcaatgactctcagtgccggatgctgatcacctccaacgtgtcgctgcgcgcgggcaagcatatcccgctgaagaacatcgccgacgaagccttgaagaagactccatcgatcgagtgcgtcatcgtgaccaaggagacggacgatccctgccacatgcagccgggacgcgatgtgtggtaccatgaggagatagccagggccggcgaacactgtgagcccgagaagatgaacgccgaggatccgctgttcattctctacacctccggttccaccggtaaacccaagggtgtggtccacaccaccgccggctacctgctgcatgtgtcgttgagtcacaagctcattttcgacatccatgacaacgacgtttactggtgcacggccgacatcggctgggtgaccggacacagctacatcgtgtatggtccgctggccaacggggccaccacgctgatgttcgagggtgttccgacctatccggacgccggtcgcttctggcaggtctgcgacaagttcggcgtcacggtgttctacaccgccccgaccgcgattcgcgcgctgatgcgcctgggcgaagaatggcccgccaagtacaagttgaacacgctgcgcatcctgggcacggtcggggaaccgatcaatccggaggcatggatctggtactacaagcacatcggccacgaacgatgccccatcgtggacacctggtggcagaccgagacgggcggcattctgatcacgccgctgccgggggccttcacgctgaaaccgggcagcgcgaccagaccgttcttcggcgtggacccggtggtcctgcgggatgacggcaccgagtgcggtcccaacgagggaggcaagctctgcatccgcaagccgtggccgggcatgatgcggaccatgtggggcgaccacgaccggttcgtcgacacctacttcaccatgtttgccgatcagtacttcacgggcgacgggtgccgggtcgatccggacggcgactactggctgatgggacgcatcgatgacgtggtcaacgtctcgggtcaccggatcggcaccgccgaggtcgagagcgccctggtcagccatgccaaggtcgccgaggccgcggtcacccccatgccgcacgaaatcaaaggacaggccctgtatgccttcgtcaccctcaaggagggcatccatgagagcgacgacttgaagaaggaactcgtcgcgcacgtccgcaaggagatcggcccgatcgccgcgccggacgtgatccagtttgcaccggcgctgccgaagactcgttccggcaagatcatgcggcgcatcctccgcaagatcgccgagaacaacaccgacaatctcggtgacatcacaaccctggcggatccgcacgtggtggaagtcctggtcaagggccggggcaaatagccccatcatgccatacaagtgactcgggtgcgcaacctgttgcgcacccggcctttttccacacaaggagagagcatgccggaaaaaaaggtcatgaatcgttggctggtcgtggtgggaggaatcctcattcaactctgtctcggcgcgatctatgcgtggtcggcgttcaccaacaagctcacggcagagcccttcaactttgccaccgacaagacccaatggccgttctccatcggcttggtctgcttcgccgtggtcatggcgctgatcgccggaaaatggcagaagaaagccggcccgcgcatcgtcgcgctcaccggcggcatcgtgctgggcctgggatacctgcttgcggggtttgcaggaaccagtttctggggcgttctcatcggcgtcgggctgttgggaggtgcagggatcggcttggcctatgtctgtccgatcgcggcactggcaaaatggttcccggacaagaaaggcttgattatgggcttggccgtggcaggcttcgggtttggcgccctgatatgggtcaagctcacccaaggattcaaattcgggcccatcgatctgacgcccggctgggcgggcctgtatggtgcaggctggggcgtcagcgacgtattcaagctctatggggtgctcttcgccgtcctggtcgccctgggctccctggtgttagtcaaccctccggccggctggctcccgaaaggctggacgccgccgacctcaggcaagggcagcgaaggtggcatcgaccttccgcccgggcgcatggcaaaaacctatcaattctgggtcctgtttgcgaatttcaccttcggcgccggggcgggattgatggtcatcggcatcatcgctctcttcggaaaagaagcccttggcaaggcgggcgtcgagccggcgcaggccaccatcatcgccggcacagcgatggggttgttctatgccctgctcaatggcctcgggagaatcatctggggagccgcctctgacaagctcggaagaaagatgtcgatcgtcctgatgaacttcctccagggcatcatgatgatcgtcttctacttcatcggagggaaagaggtgggcctttatctcggcgctgccgtgatcggtttcaacttcggcggcaattttgcgctcttccccgcagcgactgcagatctgttcggcaacaagaatgtcggcgagaactacccctgggtgttcatggcctacggcgtgggcgggttggccggtccgcgactcggcggcgtgatgggaaacgcgcacgcctggatgtgggccttccttcctgccggtattgcctgccttgcggccgcggccgtcgcgatgacattgaagcccgttaccatttcggaaccagccatccaggcggagatcgaaggcgaactcgacgggactttcaagaagcgatgatcttcgatccttcaggggatcccaagacccggcctgacgccgggtctttttatttcgctgtcacagacccggtcacagtccgtggatggggaagaccttcgccttgacaatgtcgatcgaggccatcagtgcgggcaggaccgcctgtctctgttcttccgtgacgaccagttcgcggtcgcgcaggcccccctgccaatccgtgctctgcatcatgacgccgcccatcagagggccgaggtccgggccgtcgtcctccccggtgaagacggtccaggccagggcccacgcacggacggaattctcgacgttgtagccgccgccgccggtggcgaggatcggtttgccgaagttcagcaagtgcctgataatctccacgtatgtgttgttggtcaggtgcagatgggccagcggatcgcccgccagcgcatcgacacccagctcgaagacaatcacatcgggatcgaagacgccgatcagaggaaggaccacggattcgaaagcatcgaggtaggcacggtcgtaggtcccgacgggcaacgggagattgacacaataccccttgcccgggccctcgccgatctcatcctcgaatcccgttcccggaaagagcatcttgggattctcgtgcatggagatggtcatgacgtccgaacggtcgtagaaggcatgggcaacaccatcaccgttgtgtacgtccacgtccagatagaggactctcctgccggcctcggccaggaccgaacaggcgatcgcgttgtcgttgatgtagcaaaacccggccgccttctcaggaaacgcgtgatgatagccccccgacggattgaaggcgacgtctacctgtcccgagaggatcaggtccgcccctacgagcgtcgcgccggtcgcgagcaccgcgtagtcgtacatgccccggaagacggggacgtcgtcggtgccgatgcccatctgcagggcctggatgtcccattgtccctggtccgctttcttcagcacatgcagataacgagcggaatggaaaagcttcagtgcccgtcgatcggcagcgacgggagccacttcgctgacgcccggcccggagagcagtcccatcgagaggagcacccggcggagtctccccgcccgttcgggtcgaaaaggacaaccctccgggtagcggtactgctcgatctggtccgagtgaatgaaagcagctcttcgtccggacaaggtcaatcctacgagtgctctttggtcaggtcgtaggagacgttatagacgtctccgtcaaactccacattcactttgtacccggagttctggaagaccgccagcatgggcttgttgtccggcagcaccttcgcatagaaacgtttgacgccgcgttgccgggctacctgcgtgatgtagtcaagcaggaaggtgcccatgcccttctgctgccactcgtcctgcacgaggaacgccacttcggccgcctgggtcttggggtcgaggtagtattgggcgatcgcgacgatgtcgtctccgccgacgccgggtacgatgccgacgatggcaatgtcgctcttgtaatcgatattcgtcaaccgctggaggtctttgtgcggaaaggcgaccgtccgggtcatgtagcgcgtccgaaccgactcctcgctgagcgaatagagcatctcggacaaggccggctcatccaccggcttgatcgggcggaagaagatctccgtcccgtcacgcagagtggcgtaatgctccagctcttcgggatagttcacctggtcccacgacaactcgatctggtcctggtagatgtagttcttggccttggccgcctggatcaggcccttgcggaacttcggatgggcaatgttgatcaggtcgagcacccgctgccgaatgctcttgccgtgcagataggcaatcccgtactccgtcacgacgtagtggacatcggcacgcgtggtcaccacgccggcgccctccgtcagatgaggcacgatgcgcgagatctggccattcttggccgttgagggcattgcaatcaccgccttgcccccacggctgcgcgccgatccgcgaatgaagtccacctggccgccgatgccgctgtagaacttgtggcccagcgaatcggcacagacctgtccggtcaggtcgatttccagaccggtgttgatcccgaccattttgtcatgctggctgatgacgttgatgtcgttgacgtactcggtgggatagaactcaaaaaacggattgttgtcaatgtagtcgtagagtttcttggagcccatgcagaagctggcgacgatcttgccgcgattgagcgacttcttcgcgcaggtgatcgcgccgcagtcgatcaggtccatgatccagtcgctgaacatctccgtatgaacgccgagatccttcttgtagacgaggtattcggccagggcctgcggaatgcgtccgataccacactcgatggtgctgccgtcctcgacaagctgggcgacgttctgtccgatccggcggagcgtctcgtcgggctcgtcgacggggacctcgatgatcggctcatcgtacgggaccagcacatcgatggtattgacgtgcaggaagctgttgccatgcgttcgcggcatgtggctgttgacctgcgcgatgacatagcgggcgttggcggccgccgactgcacgatgtccacggagacgccgagactgcacaaaccgttagcatccggcggagccaccgagatcagcgccacgtcgatgggaatgcgtccgctttcgaactcgccgggaatctctgacagaaaaatcggcgtgtagtccccgaccccccgatccagcgcatgccggacgttgtcggcgatgaagaagctgttcatcttgaacttctcgcggaatcggtcgtccacatacggagcctcgcccatcgtcagcaggtgcacaatgtgcgcatcgtagatgtgatcggagtactccactagggagcgcaccagatgctgcggctgcgcgcagccggtcccgatgaagatgctgttgccggacttgatcagtttcatcgccgccgaagcgggtttgactttgtctttgtacttcgcttgccaatcaatcgcttgcatgtcacttctctacactaattctggcgtctactgcaatgggcgtggtccccggaaggcccacaacatatggattgatgtccatctcctgaatctgagggaactccgtcaccaactggctgagccgctggagcccctcggcaatcacttcaatgtccacaccctcctggcctcgcactcctttgaggagctgatacgtcttggtgttcatcagcatctgcttggcctcgtcctccgtcagaggagcgaggtagaatgccacatccttgagaacctcgaccatgattccgcccatgccgaacatcatgagcgggccgaaatgcggatcccgatgcatgcccaggatgacttcgcggccgctggagcacatctcctggaccagtacacccaggatgtgggcctggggcgccttcttcggaatacggtacatcatcaggtcgaacgcgtccttgacctcctgcgcgctcttgagcccgaccttgacgccgccgacgtcggacttgtgcacgatgtccggcgaccagatcttcagcacgaccggatagccgagttgctcggcgatgttggccgcctgttcgggcgtcgtggcaatcgagccgttcggagtcgcaaagccgtacgcctccaggatttctttggattccgcctcgccaatctcgcgggcgccttgccgcagatgcctctcgatgatgctctcgaccttgcgccgattgaccgggaacagccgcaccacccgtttcggtcgcgcacgccaccggacgtagtctgccatcgctttgatcgtggccacggccgcttccggcgaatcatactgcgggattttcgcctgtcgaaacaccttaaccccctccgccaccttgctggcccccatgaagcacgcgagaatcggcttgtcgggcttgcgtcgggacatccgaacgatcgcttcggccgtctctttggcttcggtcatggcctgtggcgtcagaaggaccaatacggtctccacattcggatcgtcgaggagcacatcgagcgcgaactcataacgatctgccaatgcgtcgccgaggacgtccaccggattgtggaagtttgcggcgggcggcagcttggtcttcagcttctcgatcgtctccggactgagcttggcgaaggtcaacccctcccgttcgatcgcgtcggcggccatgatgccggccccgccggcgttcgttaggatcaccacgctgggtccctggggcagcggctggttggcaaacgcctgggcaaaatcgaattgttgcgtgatggaatcgcaacgaatgatcccggcccgggcgaacatggcctcgtaggccacctcgctgccggccagggaaccggtatgggacgacgccgctcgggcgcccgccgcagtccccccggacttcatcaggagaatcggcttctcatgggagatcttctcggcggcatggacgaacgcgtttccatccttgatgttctccagatagccggcaataaccgtcgtgttggggtcttctgccagcgcttcgaccagatccaactcatcgacgtccgccttgttgccgatactgaacaggctgctgaagccgataccgttggccttggcgatgtccaggatggccgccagcagcgcacccgactgagacaagtagccgatgccaccgacttccggaagatcccctccgaaactggcgttcagcttcgaagcggtcacagtcacgcccaggcagttcggcccgatgatccgaatgcccgcccgacgtgcgacgcgcacgatctcgtcctcgagcttcttgccctcttctccaacctccttgaacccggccgtgatgatgatcaccgccttcgtgccgatcttggcacattcctcaatgactcccagcacggacttggccgggacaataacaatcaccaattccggcgtctggccgatcgacgtcaggtccggatagcatgtgagaccttcgattgagtccgtgctccggttgacaggccatatcttcccttcgaaacccgacgagatcatgttgaccagaatctcgtacccgaccttgcctttctgccgcgacgctcctacgatagcgacggatttcggagcgaagaaactctgaagactcatctgatgaaatgtcctttcttgagctacgtggttccctgcaaaaaagattgattgtatggcgtagcaccccggcctgcaatagttttccgccgcaccgagatggaaaaccgcgccgccgtctcggtgttccgccgggcctaaacctgcttgcggaaggcaggcagatcaggttcgatgtggaccgtcagattgaccgggcaagccatttctcggtccagagtctcctccagtctctcggagatttcatgggccgtcgccacattcaacgccgggtcaacgaggatgtgaacgtccagaaacagttcccgccccaccgtgcgactccgcagccggtgccactggcggacccctttgtggccgtcgatcaccttcataacctgttcgattgtccgcggatcgaccaccccctcggtcagctcccgcagcgcgtcgccgacgaccttgacgcccacgaagataatcatcagtccgacggcaatggccgccacctgatcgccatgatcgaatccgacgtacagcgccgcgtagccgatcagcacggcaaccgaactgagcgcgtcgctgcgatgatgccaggcattggcataaagtgcggtgctgtgggactttacagcaacatgccgcgtgacccgatagagagcctctttcgccaggatcgacagcaccgctgcggcgagaacaggccagcgcggcacgaccacggcattcctggtgatcgccagcgtggcatagtagatcatggctccgccgacgacgatcaacacaaccgcaacaagaacagcggaaaacgtctccagccggccgtgtccgtacgggtgtgtcttgtccggcttcctggcccccagatacagcccgagcaggactgccagatcggtcaccaagtcgctgagcgagtgaatcccgtcggcaaccatagcaagagaggagaagaccagtccgaccgcgaccttgacgaccgagagggcaacgttcactgccatgcccacataggtgatccgttgaatccgtcggacggccatgtcgttcttgcatctgattgccaccagcctacccccgtgcggactcgcgaatctccgagaccgcctcaatataccgtcgcgccgccgcttcgtccttggcctcaacgatgatgcgcatgaccggttcggtgttgctcgttcgcagatgcacccagccgtcgtcgaagtcgaaacggcagccgtcggacgtgttcagcaccgcaccggcaaaccgctgcttcgtccgatcgatgatccaggcggcctggtgcgcatcggccgagaacttgtccttgtacatatagtagccaccgatctggcgcaccaactgacttaccgtctggcccgtctgggccatcagttgaagcaccaatgccattgccaccagactgtcgcgaatcggccccacgcgaaggtcgataacgccgccgtttccctcgccgccgatgatacagttgtttgccagcatggcgctggcgacgtgggcctctcccaccggcgtacgtatgacgcggccgccggcggctttggccacgtcgtcgatcattcgggaggtagacagattggccgccgccgcacccgtgcgggaggaatagacatacttggccgccagcgccagagtgtactcctcgccgatgtaaacgccgttttcgtcgacgatcgccagccggtcggcatccgggtcctgggcgaaaccgacgtcggctttggcccgcctgacggcttcgcaaaggccacccaagttggcagccgtcggctcgggctcatgcgcaaacagccccgtcggctcatcgttcaatgccaccacttcgcagcccaattccgccagcagccgcttcgccacaggcgcgccggccccgttgacactgtccagcacgactttgtacctgcggcgcgcaatctgctgtgactgcacaaccgctaataccttccctgcatgaatctgatcggtctcggaattgacggccacccgtccgcactgtggcgaaccgacgaacgcaaactgtctgtcgaagaagcgccggcgaatctgtgctgccgtatccggcggcggcgccataccattgtccagaagcagcttgatcccattgtaaggaagcgggttgtgcgacgccgtgatgataacaccgccgcggcaaccgagatggcgcagcataatgcccaccccgggcgtcgtcaccaggcccagatcaatcgcgtcaacgccgaccgaacacaggccggccacaaccgccgaggcaagcatctggccgctgacacgggaatcccgcccgacgcagacacaaggccgctgctgcccagtatctccgttggccctgagaaaactgccaaaggcacaaccgtactcggccgcaatgaccggggtcagattctcaccgacgatgccacgcatcccactgacgctgatgatgagttcctcggccatgatctccattccccctggccgcaccgtccacatgccgcgtacagtcgaaggggcgttgcggcatccgtacctgcaggtcgccggcggcgggtgtttacagcgtacagacgtagatctcgttgacgaagtccagcttctgcagttcttccacggcgtcggcactcggctctttgtccaggctgaccgccaggacggccttgtgctcctccagcttctggcccacgcccatggtgccgatgttgatgccgtgcttgccgcagatcgtacccaccgccccgatgacgcccggcttgtcgtcgttgaagatgaccagcaccgctccttgcggcgtcatttcgatattgaacccgtcaatctcgataatccgcagcagccgctcaccgaacacggagccggtcactgtgcgagtgacttttgttgtgacaaccttcgcactgaagctggatgcaacatccttggcctcgctattcttggtctcgtcgatgctgatgccgcgttccctggccagcacgggcgtgttgaccatattcagaggcatgtcaaaatgcttctgaagcagccccatcaggaagccgagtgtcatcggctgggtgtccatttccgcgaccgtcccgcgatactggacttcgatccccttgatgttgcccggagcgatcgtactgagcagcgccccaacgcggcgggccagttcggcatagcgccggaccatcggcggtacggcacctgatgtcgagggcgcattgatcgcattcttgatcggaccgccccggatggcatcgagcaggatttccgccgcctcgaccgccacctctatctgagcttcctccgtgctggcgcccaagtgcggggtcaccagacagttgtccagttccgcgaagcgaatgttcacaggaggctcgctcgagaacacgtcgagggccgctccggcgatccgcttggccgccaaggcatcatacagggcttcttcgttgatgatgccgccgcgggcgcagttgaccagacgcacagtcggcttcatcatctcgatttgccgcgcaccgatcatattgagggtctgctcattcttgggcacatgaacactgatgaagtcggattccctgaagatccgttcgatatcatccgtgacctcgacccccttctgctgcgcgtccttcggcgccgccagcggatcgtatccgagtaccttcatgttgaatccctgggccatatgcgccaccgccataccgatgcgtcccaagccgatcaggcccaagaccttgcggttcagctgatttccggtgtatttcttgcggtcccaggctcccgccttcagactgttgcaggccggcaccacgtttcggctcatggccaacatcagcgccatggtgtgttcggccgcgctgagggtattgcccccgggcgtattcatcacgagaatccccttgcgggtcgcctccttgacgtcgatgttgtccactcccacaccggcgcgggcgacggctttcagcttgcccggattggccaggaccttcgccgtgaccttggagtcgctgcgaacgatcaatccgtcatactcgccgatgacagaagccagttcatcctcactcatccctgtcttgacgacggcttcaacaccgtcggccgcgttgatgatgtcgattccttcccgggccagtttgtctgcaatcagaactttcatcatgcacagcactcccgcaactccccattgtccatacggctaaccagtcctctgcaccgcgaaggcccgggccagcatcaccgcccagccggcagccagaatcacgagcaaaaccacgatccagtacgttgctttcgtctcgtacaagagacgatcgaagactttgaaatatatcccaaggacccccgtgagcaaagccaaaaatgccgtcagcacgaggacgcagcacagaaacgcggcggcgggttgaatgtaaaaggcgtccaacaatctccctcgcgcaaaggcgagcacggaggtcgtcatgccgcaggccggacagggccatcctgttcgctgcttgaagccgcacgggtgaaagagcaacccgaagtcaaaacccacgcgctgcagaatccacagccctgcgaacagcgagaagatcaacaccgataccaccagggcgacacggcgttccgaagccgttgcgcgacgagtgagtctggcggcatttgccgattggcgtctcaacataacgccggtagaatagaatggactgatgctcgtgtcaacaacagcagagaggtagtttggtatgtgcttggaacagcaggcgttaagccagattctcgagacagccattgtcgccgcccgtctggcggggcagcgcgcgatggaggaaatgaactacgtcaaggccaccttgaagagcccgacggaactggtcacggataccgatcggcattgccagcagcttatcatcgaccgcatcaaagagagcttccccgaccacggcttcatcgccgaagaaggcgagccaggaaggatcttcaagcgtgcgcctcggggcgagccggccatctggtgggtgatcgacccgatcgacgggacgaacaacttcgcccatgcgattccgatcttcacggtcagcatcggcgttctctacgagggccggccgattgccggcgtcgttttcgatcccggcacggactcgatgtacaccacggtccacggaggagaaccccagctcaacggccgacgcatcgaaaccagccaggacgacatcacgccggtgaacagcgtggggctcgacagccacttggccgaccccctgccgtcctgggtcgcccgcatcctccgccagtcgcgattccgcaacttcgggacgaccgcgctgcaactggcgtacgtggcggcgggaggattggtgggcacagtagcctgcacgcccaggctgtgggatatcgccgccggagtcatgatcgcggaaagcgccggagcgatcgccaccgactggagaggcagatcgcttttccctgtggacccggagaactaccagggtcacgccttcgaggtgctcgtggccaacaagagagcgcatcccaagctcgtcgagtggatcggcgcgtaagccctatcgcggatcaggaatcggatacagcgaaacgagcctcaccctgggattcgcttggctcgtctgactgcggtcgagaatggccatcatccgtttctgcggcccgttgacaccgatgcgaaccagaatataggcggtgaagacgtcactccgcaccgtcaccagatcgctgactcgcgtgaagagcaggtcgcgctcctccaggtcatcgcggacattgtccggggtgatatcggggcccggcgggttgtccgcgtgccgattgtcaacgccgtcgctgttcagttgccgcatctccggaacctgcaacaatccggcggcgcttcggaagggaccgtgctgctcgcgatactccacgattgcctgggcccgcgcgaaggtgggctgtccactgggctgatactgcatccacggcagttgtgcgatcacgaacgcgggcgcggtgttgatgttgattcgtcccatgacacgcgtctcatcggcagaccggccgtgctcggccggatcgaggacggtcaggtagttcagcaattccgcgtaatccggcctggcaaggtccagcagcacgccggctgccgtatcgttgggggtaaccccggaggcactggtggcaaagagcattcccagctcgccgatgttcttcagcggccggttcgccggatgcgcctgaataacgccttcatcaggatcgacgtagttgcctgtcgcatgccccagtccaggggcgttggtcgccgcatcgctccagagcttgcgaacacacttacccggcgagacatcgcgctggcgactgcgggctccctggttgggcaccatccaaccggtcctcaccggcacgtgatcgaccgtcgtccaggtatccgtctgcaccacgtaccgctcgagcgaaatccgggctccctctgcgaagccgttgggatcggcctgtgccgtcggattcgcatacgcactggggcggtacccatatcgctgcggcgcgtctgccgactcctcgggatcggagaacacgctgtcatcaaacaactccgccagcgggtcctcgttcagaatgacgtgaaaacgccgcgtccccgaccacatgatcggcacgtgtctggatccgcgggcgtccgcaatcgtcagacgccattggccgggctgtgggtctctgtcttcgaagtacggcttgaagagttcgatggccgtcgaagtgtgaaccacacccgccgcgtccgtcaccccacggtaggcgatttcggagatatagatgcagggctgctcgaaaccgtagtagtgcgcaccggaactgccgggaccggcgatcgccgtaacgacatcatcgtcgtcaatgtagtcgcgcaggttggccgccagctgggccgaatcgccgctgagcacatccgccaggcgtcccccgccgctcagtgcggcgacaatggcgtcgcgaatggcgttctcgtcggcgctgttgacgttcactttcttgcgcagcgtcaccgagccgaccgcgatcggtctgggcgtgataatccggtccatgttgtaggtcgtggccacatgccggcaggagtagttggggtcgagcatcccgtcgtcgcgggcccggacaaaccaccggtcgagcgtctggcccgccgcatccaccggcgtggagatcgtgttcgctttgaatcgcccccaattctcaacgcgcgcgtcgatggcggcgtgattcaacagaaaccgatagcgcagctccagctcatccgacagatcaaacgtccggtaggggttgttcgggtccaaccgcccgtactgccagatcacccactgttcatagcccgtcaaaccgtcggcaggatcgattcggcgctccgccaggagggccgccgcatgcgcctgctggtccgccggtgtgctgtcccggttccccgccagggcaatcacattgatctgctgaacgctgcttccatcgacgctggcggagtcgggccgggtcggatcgaaccagtagcccgtattgacgttcagcatagcggagttgtccacaatccgaacggccgcatagaccggtttgcctctgctcgacatgatatcgggcacctcgaaccaccgcgcatctcccacgccatctccgtcggcgtcggcattggtcccgctcatgttgacgtcgatgacgtctcggtcgccgaggacacggatccgcacgtccctggcgtcggccgcgttcatatcggcgatacggctgatctgccgccagtagtagttgggccccgaccggtagggctccaagtccgccagccaggggtcattgacatccgggaaatcccagtactccgcatcgtctgagacaccgggcgtgtcggccgtcagcatctcgccgatccgggccacgagcgtctcgaccgccaggttaagttgctggttctccgtcgtcgccgacgtggccatccgctcgatccgcgccgtcatgatgaacagcacccccacgatcgccagcaggctggtgagaaccaccgtaaggatcagcgccgaacccggacgagagtccgccgaagattgtctaacccatgccgccatccgttaccccgtcagtcgtccaaatagactatatgtgtgaatgtcctgccgcccgccagaagccctttcgagtcgtacagggtgaaggtgaacttcagggcgcgtcccagtccggggatttcacgcagatgcgcctcgtcgatccgcgaggcctcgtacgtgacgtttcgcagcgtcactgcgccgcgcggataccagattccgggattgtcgttcggatcgagatcgtcgccgtccaggagaaaatcggaatcgtcgtccagctcttcgtcgccgtccggattgacctctggcatccagcgctgctccgtatcgttccagccctggacggcgaattgccccacgccatcgcacagcagcgcgtgcacggggtccggttgagacagatcaatcaccacgccgcgtgcagcctcgctcgtcgtgctggcaacggcgccggctatcgtgacgtcgcccactaccgagagaatgtcgatcttctcggccctgggaatctgcatccactcctgcaacgagatgttgtcgtattcgagggtgctgttccattcccgccactgctcgtcggtaaatgaaccggtgtcgagcttgtcgtcggggtccgccgtgggcaccaggatgtgcaccgttcgcgccagcatccgctcggccggcttctgctcctgaggccgcaggcgtttggcggcattgtcggccggtctgctcacgagggtatagcagacgcgcgccacgttgccccggatgggaggatcggccttgtacgtctggaagtcccccgccgtgaaaaacatgatccggtcgaatcgctcgaacgccagtggatcgttcggattcggaccgcggtagtcgctcttgcgctcggcatcccagatgatgaacaggtctccgtccttgcgccatccctggaagtcggcgtcgagctgttcggtaatcacgcggagcttctgcatgatctcggcgttggccagggcgacgcggtgcgagtcgatgctcacccggaagatcacgctggcgaacgacatgaccaccgccagaatacccagcgccacgatcagttcgatcaatgtaaaggctcttcgcattcgatcgctctaaaaccgcaacacttcctgatagaccgccaccaggggacttcgcccgccggcaaccggtcgcggaaccacccagacccatgcttccccgcgtgcgtcggcatcaccgtctcgccagggacggtccagccggattcgttcgggcgactcccggtaccgctgaagcacccgatagatctgcccggtccggtcgtcaagaagcgtagccccgtcgttgaggaacgtgctttcgtcgacctggtccgaggtcactgaatcaacaatcgacacttcatcggccgccgcgccggcgttccgggtgatccggacacgcaggggtcgaggcaagtcgctctgctcaagattcgggaaaccctcatcggaggcgcgcacccaataccgagcatcggtcccggcatggcgacagacaaacacggtgacctggaccagacggctgtccgccgtgcgtttgcacagcgccatccaggagtactgccgcgccgccgcatccgcatgcgacgggtacaggaactcgtcggccgggatcgtcgtcagctcgtcgtaggggacaaactcgtcggtcttcagattcggatcggacacatcgagaccgtacaggcgaatcttggccagcgcctcgtcgctcgccaccgcagcgatggttcgttccgtcgagagcgacgtgaagtaaattcccgccatgaacgtgccggcgacaaacaccataccgaccgccagcgtgctgaccgccagcagcgtctccagcaaagaaaaaccgtgttgtcgcagtggcttgtccatatcgcccaatcactcggaggaaatcaaggtcccggtataggggctcacatagaccacgttgtcgcccgacaactgggacagatactccgaccacagaaccttccggcggaacagttccaccagccgcgggtgatcgcagaggacgaagctcgtacgactcatctcgcggccgagcccgtagtcaactccgttgcccggagcgggattccgcacggagtagtcatcctgaatgaacatgccccgaccgtacgtcgtgatgttcagggcggagttgaacacctcgtccagcgacaccttgttcgaaccgctctcattgctcggcaggctgtatccgtcccgattgcgaacgcgaacctcgtgcaccaccagcttgcccgacggcgagaagacaaccgaaaacgccaaggcgtcgttcagctcacggtcttcgtcgatatcgctgttggccgcgagctggctgatgtccaggactctcacggtgtcgggcagcttcaccggctccagaccctctaccgccctgaaaccgacagccagcccacccatattcttcggctcttcatgcacgatgaagatcatgtactgcggcgcatcgaccatgccagtcagcgggttctgcgggtccctcgatcggcacagcgtctgaaatcgtacaccggtgtatttctgattcctcacggccatggcccgcgcggaactcagggcggcattgatcatgctgcgtgtgccgctctgcgattcgaacgaatggaccagcgaccgcaacgccggaagcccgaaccccaccaacagcgcgatggtcgcgatcaccagcgtcatctcgaccagcgtcacaccgctcttgttgtgtgctcggcaatccatgagtatccatttcctctcgcgccgttgttctcccgccccgggcaaacacctgtcgcgacacggccacgccaacaaacccttggcgtcatgcgtttcttcgtcagccggtcctgctgctgatgtcgtcgggggtgccaaactccttgtccggtcccgccgaaagcagttctggaaaatcgtcgtccggcccatagcgatagtccagcaccgttccccagggatcgcggacctccgctatattcgcaccgggctggtcgcccggcctggagaggttcgacagatgcgtcagaacctgccgcgaggccggctccgccatcagccgctcgtacaatccccggatgtgcaccgcggcattggcatggttctgttccggctgaggcggaaactcgcccgtttcctcccgatactcctgcagggcgctcctgaacagcgcaaacgcaccggccaaatcgcgctctttggcctgattgctcatccgcagcgtcagcatcaccaccatgccggccacgaccgcgacgatggccaccacgaccagcatctccacgaggctcagtccaacatgtcgtcttgcattcgtcatggtcgcagaccgtcgccgaaaccggcgtcggacttaccgctggaagttgcagatgtcgtcatccgtgccgtaaaacccgtcgtatcccgccgagatcaaaatgtacgaatcgcccttgtgcgggaccggaaaactctgcgtcgaggcccgccagtcggtgatgaactcgtagaacgtggccaccgcaccggccagaggattccagaaccgcccggaagctctcagcggagccatgccccgctgtgccagatcgatctgctccttggcgacgatgagatagtcgttgtcctgagcgttgtagatgtcctcccggactttttccgaggggttggcacgataataaagcacgggtaggccggacttgcgacgcgatccgtccagcagcgtcacttccttacccttgccgaagacgtcgcctatgacaaaagtgtcggccgccagcggcacaccgaccgctcccagatcgaacaatccatcatggttggcggtcacacccagccgcacggcgttggccgtgtccagatccaggtagcgggacttcctcttgttcatgtcgtactcgaccgtccggtcgtagaggaaataggtcccctccgcatgggtcgtcgtcccgacgcgatagggccagcggttcatcccgtcggcgcgccagcccgaatccgggtggaagcccaacagatcccagccaagcagggcctccgccagtttctgagcgcccgaggagttctccgcctgctgcgtgtcacgcagccatgtgtagcggtcggagggcggcaggctcccgtagtcgttcttgaaggtggccagggccagatcgatggccgtgaactgcaccttctgcttggcctcccgggccgtcttcctgaccatgccgatggccggcaggagcattcccgtgaggatggcgatgatccccaccaccaccagaatctccaccagtgtcaaacctgaccttttcggtttcacgatcgtcctctttcaatcccgacggttcccgtcagacgcccttctcgacccgcgtctgtgcacagatcaaagaactgctcgtcacggcaagcccaaggatggcgcccgatagaacgctattcccggtacttccactcgaaattgcagatgtcgtcggcggtgccgtactccccgtcccagccggccgagatcaggatgtacgaatcgggcctgtagggccggtccgtcgtgctgatcttgtcgcttcgcgtgttgcggaagaaccgcagcgggtcggccagattgtgaggcgtctgggtggagcctcgtgcctcccagggcttgcccaacccgataagcgcctgattatcatggtagttgtagatattgccccggctgtccgtgatggtcatggccgacgccacattcggatcatgcagactgtttgcggtattcgccttgtagtacagaatcggcatgcccgtcttctcccccgaggccatctggcgatcgtacacgtcgcacagcacaaacgtgtcgggcaggaatgcgccgaccccgctgtcgccatagatctgtcggaggcggtaggcattggcgttctccgcttgcaggtagggccctttccgcgccgacagattcgccgccgtcggattgggcggatacaacagaacgccgccggcccccagaccatcgcgacggaacagggtgttcgcatggcagccgagcaggtctttgcccatgatggcttccgccagtttcatcgcgccgcaatacggagcgccggtcgggtcgagcgcgccggaatccgggtagccgccgaattcgttgctgaacaactcgatggccgcgtcgatgctgcgcagttgcgccatctgcttgacattcgtagcgaacttcttggccttgttcaaggccggcacgagcaggccgatcaggatgacgatgatgctcatcacggtcagcagctcgacgatcgtgaacgctctcggcgttcgggctgggttggcgacgggtttcatactgttctccttttaagatacatgattgcctgaatcggggtatcgggccgattaaccaccggcggcgctcaagctcgtaatgacctggatcatcgggaggaacaccgccagcacgatcaccatgacgacgctgccgagcacaatgatcatgagcggctccagcatggacatcagacccccgacgagcacgtcaacctgctcgtcgtagttgtcggccaccttcagcaacatcttgtccagatcgccggtttcctcgccgaccgcgaccatgttgctgacgagcaggtcgatggtcttggactggcggagcggcgccgcaaaggtgtcgccttggcggatcgagttgtggatgttgccgagcagtttcgcatagacctcgttgccggcggtctcgcgcgtcacgttgatggcgtcgagaatcggcacgccggcgctgatcagcgttccgagggtccgggtccatcgcgtgatggagaccttgctggacaactgcccgaccaccggcagccggagattgatggcatcgagcgccatgcgtcccggctggaatttccggatgatccgtatgacgacgatcaggccgatcgggatcgcgatcatcaccgcccagccatagtcgtaggcgatccacccgctgatgcccagcacggtcgtcgtgatggggttcagtttgccgccgaccatttcttccagcaccgttttgaactgcggaatcacgaacgccatcaggcccagcaggatcaggaacgccgccgagagcaccacgatggggtagatcatggcgctcttgacgcggcctttgagccggatggccttctccttgaagtcggcgatccgcgccagaatcaggtcgagcacgccgccggcctcccccgccgccaccatgttcacaaaaagacggtcaaagcaccgcggatacttcgccatcgcctccgaaagcgtcgagccaccctcgatgtcgtcggccacatacccgatgatccgcttgaaggcgcccgatttctgctgctcttccaggatgcggagagaccgcaggatcggcaaaccggcatcctgaagcgtggaaagctggcgcgcgaattccgtgacatacttgaccttgaccttcgccttggccccgcgacgggcccgtgtcttcgcggcggtcttgcccacctgtttcgtcgccgtcttcgagcggaccttcgtggggaagtaccccatgttgcggatcttgctgatggcttccttctcgctgagggcctcgatctcgtccttgatctcgaccccctgagaatccaacgctacatattggaagacaggcatgttcctacctcactcgaacgctacgatccccggttccacacggtcagcgccttagccttccgtgatcgtttccttggcaatctcatcgatcgtggtgatgccgtcgaacaccgcgatcaaaccattgtggcgcagcggtctcatgcccgccttctgcgccgccacacgcagcacgttggtcgaggcacgattcataatcaggtcgcggatttcatcattgaagatcatgatttcgtagatgccggttcgccccttgtagccggtcccgttgcacttgctgcaccctttgccgtagtagaatttcctgccggcgatttcctcttccgtcagattcagttccttcaactgggcctcgtccggctcgtacggggtcttgcacttcgtgcagatccgccggaccagacgctgagcgatcacgccttcgatcgtggccgtgatcaggaatggctccacccccagatcgagcagacgggcaacggagctcggtgcatcgttcgtgtgcagtgtggtgaacaccaagtgaccggtcagcgatgcctgcgcggcgatttcggcggtctcgtggtcacgaatctcgccgaccagcacgatgtccgggtcctgtcgcaggatcgaacgcaggcatcgcgcgaaggtcagcccgatgtccggcttcatctgaacctggatgaggccgtcaagatcatactccaccgggtcttccgtcgtgatgatcttgctgtcgatcgtgttcagttcgctcagagccgaatagagggtggtggtctttccggaaccggtcgggcccgtcacaataatgatcccgttgggcttgttaatgagctgccgcaccagcttgaggtcgtccggctggaaacccagtttctccagatcgaagctcacctgactgcgatccagaacacggagcacgacgctctcgccaaacatcgtcggaagcacgctgacgcgcagatcaatcggattaccctggaccgtaagcgagatgcgaccatcctgcggcagtcgccgctcggcgatgtccaggttcgccataaccttgattcgggagctcaaggccgccgcaatatacttcggcggcgggatcatctcgtacagaacaccgtcgatacgataccgcatcttgtactcgttctcgaacggctcgaagtggatgtcggacgccttgtctcgaatcgcctgcaggagcaccaggttcagcagcttcttgacgggattcgactccgacagttccttcaactcatccaggtcgatgctctgattgcggccatcgaactcggccagaaaagcatccgactggatctcgtcgatcagttccgtgatgttgtcatcctccgacgagtagtacttcgtcagcgcggcctccaacgcgtcccgatccgtcatcttcgccgtgaccataaaccccatcagggtccgcagatcgtccgtcgcacggaagttgtccacgttgtcaagcgcaacaaccagttcattcttggccttgttgtactcaataggaacaatatggtaactcgtggccgtctgagcaggaactttgtcgatcacatcctgagggatatcaaggccatcgatattcacgtactccatcccccgctgggccgccaaagctacctgcaactgggtctcgtcaatcaccccaagttcgaggaagatctcgccgattcgaacgcctccaccgcgctgcttttggatagtgaggcactcgtggaccttctcacggctcagaacgcccattttcatcaggattcgaccgaggggccgaccgcgcaactgctcaaccggagggagcttgatagcgattctgctcttgcccatagctcaaagcccttaaagcctctctatctctctctacgtcccgattatagcaaagtaaacatttaattctacaaaaattagcaataggacacctggttaacaaggcgcaacaagacctataagagcacgctgcgttgcgtgctacctggaagcctgtgtcattagacgtgtctgtaaccgccccgttacacgtggcaatcgccgagcgtatcggacccttacgtcttgagaatcggcccgatgtcttccatctcctgggcagcctcggcggctttcttcttcatcttgcccttggctccggcgatcttggccagcgccttctcctgcaaagcgcccggctggcgacccttgtcaagcatctcctcgagcgtgatcttgcctgtatcgtagaggttccagagatgctcatcgagcaactgcatccccagtttcttgcccgtctggatactggaatcaatacggtaggtcttgttctcgcggatgaggttggcaatggccggcgtcacaacaagaaactcgtacgcagcaattcggcctcgcccgctggccagcgggcacagggcctggctgagcaccgccagcaggttgccggaaagctggattcgaatctgctcctgctggtccaccgggaacacgtcgatgatacggttgatcgtgccggcggcactggtggtatggacggtgctgaacaccaagtggcccgtttccgcagcccggacggccgcttcgatggtctcaaggtcgcgcaattcgccgacgaggatcacgtccgggtcctgacggagcacgcgtcgcaaggcttccccgaagctgggaacgtccacacccacttcgcgctggttgatgaccgacttcttgtggggctggtagtattcgatcgggtcctcgatggttacaatgtgccggtcaaagttctcgttgatgtagttgatcatcgtggccagcgtagtggtcttgccgcttccggtcggaccggtaacgaggaagagccctcgcggacgacggcacagcgccgcgcagattttgggcaggcccagttgttcaaacgtcagaatcttgttgggaatctgccgtagaacaatagagatattgcccttctgtttgaacacggaaacgcggaatctcgccacatcgccgaaggcaaaaccgaagtccgtccccccttcctcctggagttcctgttcacagcgttccggcgtgatgctcttcatcagggccaccgtatcatcgggctccagaaccttcgtctcaagcgagcgaagatgcccgtcgatccgcagcaccgggggccgtccgaccgtaatgtgaatgtccgaggcgccctgcgtcacgcacgcctggagcagcctatccatgttcactgtcgccatctggtgatcctttgcctgaaagtacgattactcttctaccacgccttcggtctgagcgatgcgagagacctcttcggctgtggtgatccctttgaatatcttcagtttcccgtcctctgccagcccgcgcattccggcgttctttgctgccctccgcagctccgtcgtcgtggcgcgcttgaatgccagttcgcgcaattccgagttcatttcgagcatttcgaagatgccgagccggcccttgtagccggtgttgtggcacgccggacaacccagtcccttataaacaggacgcttcttcacctcctccggatcgatccccaccagccgcaggaaatgcggattgggatgctcgtccaccaccttacacttcttgcagatcacgcggaccagccgctgggccataatggcctgaatcgagctggccaccaggaacggcttgacccccatgtcgatcaaacgcgtaatcgccccgcacgcatcgttggtgtgcagagtgctgaacaccaagtggcctgtcagggcggcctggatggcgatatcagccacctcgctatcgcggatttcgccgacgaggatgatgttcggcgcctgacgcagcatcgatcgaaggatccggtcgaaggtcaggccgatctcctccttgacttggcactgattcatcccggtgaacatgtattcgaccgggtcttcagccgtgatgatcttcttgtcgggcttgttcaactcttgcagagcggcatacagcgtggtggtcttgccgctcccggtcggaccggtcaccaggaaaatgccgttgggtcgtttgatgattctctggaatgtctcgtagttgtcctgctcaaacccgagcgattcgatgccgatattcaccgcgtccggcctgagaatacgaagaaccacactgggcccgtggtttcccggcagagaagagacgcggaaatcgatgtcctggccggcgatattccgcttgatacgaccgtcctgaggcagccgtttctcagcaatatccatgccggagagaatcttcagacgcgtgatcagcggcgcctgcatgtttttcgggatgttgtctttttcgagacaaacaccgtcgacgcgataccggatgcggacacggtccgccatcggctcgacgtgaatatcgctggcccgcatatggtaggccgtgtcaatgatgaggttcaccagtcggatgatcggtccctcgtcgtcggcatcggccgcctgggcccgttgtgcctcggccgccaattcccgtcccatttctgccagctcggcggcggtggtgtcgatgctgtggacgagccgatcatcctccggcttgtccacctcctgttcgagcgagttttcgatataggcacggatcttcttcggactggcgagatagcactccaactcggtgttcaaacgcagtcggaccgagtccatcatgtccaggtccatcggatcgccgatgattagtttcagacggccgttggccacactcaggggcagaatgctgtggcgacggatcaagtcttccgggatgatcttcaccgcatccggagggatcgtgaccttgtccagatcgacatactggagatcgaactgcttggccaaggccttggtaagggtctcctcgtcgatcagcttcaagtcaagcaggacctggccaagccgcttgttattggacctgccggtcttgattgcctcgatgagggcctccctcttgacaagtcccgccttgtagaggatttcccctaagtgcctgcgtttcttggtcatacaaacctcatgtgcagcaccaatccatccctgtctattctaccacttccaaccgggcaagtcaacgggccaatccgcgccgcaggatatccagcgccgtctgcgcggcgtgaagacgtacatacccgcgttcccaggggaacacatagcgtcgggtttgcacctggccctcgcagtcgacactgatgaataccaagccgacgggcttctgttcggtcccgccgtctgggccggcgatgccggttatgccaatcgcatagtcggcgccggctcgagcccgtgccccccgtgccatggcctccgccacctgcccactgacggcgccgtgcttttcgatcaactcctgcggcactcccagttcgtccgtcttggcatcgttgctgtacgtcacccacccgcgtgtgaaataccggctggcccccggaacatccgtgatcagcttggcgagaagccccccggtacaggattcggccagcgccagagtcttcccgaggcacttcaactgccgcccgacgacctccgccaaggtctcttcacccgtgccataaaccagcggccccagaacctcgcgcagggcgacctcctcccgttcggccaaccgttcggcctcggcgacggtgtccgccgtagcgacaatctccagcgtgatgacccccgaatgagctgtgcaattgaccagcgggttgcggtcccgccgcatcgcctcgccgatcatttcggcaatcgccgactcgccggccccgaagcacctgagccttctgactgccaccgcctgggacgacgcccacgcccgcaacctcggaagcacccaggccgccagcatgcgctccatctctcgtgggacgccgggaagagcaaaaaagaccttgccctccttctcggcgacgatgccgggagcggttccccactcgttgggcacaacatccgcccctttcgggaggcgggcctggttcgcgtttttgcgcaccatcggcaccccgcgcctccggaacatctcacttattctgacaagcaggtcctcccgaagttccagttccaccccgaggaattcggcgaagccttcgcgggtcagatcatcgtcggtcggaccgagccccccggtggcgataacgatgtcggcctcctcggcggccagtttcagagcgcggacgattgccggctggagatcaactaccgtatgcgaactgactgtcgggacaccgatcatccgcaactgtcgttcgatatgtgccgcattcgtgtcgacggtatggccactgaggacttcgttgccgatgctgatgacggatgcctgcttgatccgaccgaccatcaaatctccaaacgcaccatagacctggaaacccccacacctacccccgtacaccacccccgttccaacctgtcgtcgggctgccgctccgtcgtggggcgatcacatctcgatcatcgccttgacgacaccgtcccggtatcccgccaccaactcaaaggcctcctgaacctgctcgagcgcaaagcggtgcgtcaccatgaaatcgaccctggccgcaccggacgcaatcagatccatcgcctcgtgggtacacttgttctgacggcgcacgttgatgatcgttacctccttgcgccggattttatcgatggacagcgagatgcggtcttcccgcggaatgccgatgagcagaagcgtgccgcccggcttgagcagatcgaccgcctggtcgatcgtctcctgctggcctgcgcactcatacacgatatccattccaagcggccggcgttggagaatcgccgcgaccacatcctcccgaagcggattgccgacccaagcggcccctgcctttctggcgatctccactcgctcgtcgatcttctcggtcatgtagcaggcgccgacaccggcggccctggcactgaccaggcagcacagaccgatcggcccggcgcccagcaccgccacgtccttccccctggccagacgcgactgcttgaccgcgtagaccgcgatcgccagaggttcacagagcaccccctgctcgatggaaatcctgccgtacgtcggcagacagcattcctccggcatcacgatgtactgcgacaggcacccgttgccctgccccggcgtgcccagaaaacgcaggttgaagcaggtattctcgcgccccgccttgcactgcgggcacgcgtgacaggacaccgccggctcgaccacgacttcctggcccacctggaggctcctcacgtccggaccgaccttcgcgaccgtcgcggcgcactcatggccgacgatgaacgggaactgcaccacctgcgaaccgatccgtccggtctcgaaataatggacatccgagccacagaccccgaccttcccaatcttcagcaggacatcggtccccttctcgatcttcggatcgggaacctccctcacctccatccggcgaacgcccgtcaacaccgctgccttcattccgtgctcgactcccgtctgccctgagtatgcctacacattgaatcggaaattgatgatgtcgccgtctttgacgacatactccttgccttccagtcgcatcttcccggccgcccggacggccttctcatcgcccagtgccttcaggtcggcgtaggccatggtttcggcgcggatgaatccccgtttgatgtcgctgtgaatcttcccagccgcatccaccgccaccgtgccgtccttgatcggccaggcccgcacctcgtcggaccccgccgtcagaaaactcaccaatccgagtgtggagtagcacatctgaacgaacttctcggctgccgactcggtgatccccagatcggccatgaaggtcttgcgggtctcggcatccaactgcgccagctcgtattcgagcttggcgcacatcgtcaccgccgagatcggcccgtccacggcgatcgtctggcccgcctggtcctcccccacgttgatgacagccgccatgggcttgagcgtcagaaaaccgagcgatttgacaatggcccgttcctcctcggtctggatcacggaactgatcggcttttccgcctcgatagcctcctgcaacctcagttgaaccgccagttccgccttgtcctgcgcctgcgtcttggtgggcttgtggacctgcttttccagcttctcgaccctcgtggtgaccagttccagatcgctcaggagcagttcggttttcagctcggccaggtcgcgtttccaatcgacgctgttgcggtatgcggcaacggtggggttttcgaacgcccgcacgaccaggaccagcatatcggccgtgcggatctggccgatcagccgcctggccgcggcgcgaccgtgttcgtcggtgaaactgaagcccggcagatccagcacgtcgatggtcgccagggtcttcttcttcggcttgtaaagcgtgttgagccaatccaggcgctggtccggaaccgggacaatcgcctcctcgatcgcggtagctccgatcggcggaatggccttgccgctgatggccgcgaagatcgtactcttgccggactgcatcagccccagcaacgctgttttcatctcattgtgctccggacatcctgcgaaccctgtcgtacacactgcccccggcagcatcatacgccaccactgccgggaaatcaatcacctccagccgtcggatggcctcggggcccagatcttcgtacgcaacgacgtcggcgcggacgatgtgcttgctcagcagtgcaccggctcctccgagcgtcgagaggtggacggctccataccgctgtaacgcccggcggacgtcgtcgttgcgatagcccttgcccatcgtcgcccgcagaccatgagcaatcagcctgggactgaacgggtccatccgtgccgacgtggtcgggccggctgcgccgatgaccgctcccggtcgtgccggcgtcggaccgacgaagtagagaatcgccctgttcagatcgatcgggagcgtctctccggcctcgagtgcggcgcagagccgcttgtgggccatatcgcgggcggtgtacacgagaccgcgaaggattacctcatcacccgctctcagccgacggacatcctcttccgccaaaggcgcagacagttgtatcacaaaaccggacctcccgggcccgctccgcaggaagcctgcccgaccatgctattggaccagcgacgccgcagggggtgagtgtaacacatcgctccatccttgcgaacggaaaaaccggcccaatgggatttgttgggaaagacaccgaaaattcgtgtcgaatcaaatcagcgactggtataatccacggcgctatgccgaagtacccgatattcctggatctgaccaaccggagggtagtgctggttggtggcggtaccgtcgccgtccggaaggcgcacgtccttctcgatgccggtgcgcgtctggtgatcgtagcggaccgcgcgagcgacgtcctgaccagcttgtgcgcggagcggtcggccgaactgatccgggccaagtacgccaaggagtatattgccgaggccgtgctcgtcatagccgcgaccgacgacgagaaggtcaatcggcaggtgtatagcgactgccaggaactgggcatcctgtgcaacgtggtcgataatccggcattgtgcgacttcttcgttccggcggtcgtccgacgaggcgaccttcaaatcgccatcgggaccgagggctactgccccgcttatgccggtcatctgcgtaataagctcgaagcgatcttcaccgagcagcacggcctgttcctggccgagctcgaatgggcccggaaacagatcatcggggagatttcgaactcggccgaccgcaaggctctgctgggtgagctggtcgaggatgcctcgttcgagtacttcaccgccaacggctccgctgcctggcgagagaggacccgccggcgaatcgagtcgcacaagacaggaagctgaccgccggtccccttcgcgaatagagtccccatgtgtaatcgtcgcatcaccgctcccgtctcgccgatcttccggccgagacgccatcgccaacgaccatgaccgccgcaatcgaactattagcccccgcccgagatgtccaggtggcaaaggccgcgattcggtgcggggccgacgccgtctacgtcggtgcaccgcggttcggcgcccgggaagcggcgggcaacacgatcgcggcgatccaacagatcgtggacttcgctcatccgtattacgcccgggtgtacgtcgccctgaacacgctgctgcgcgacgacgagctggcgcaggccgagaggatgatcggcgaactgcatcgcgtcgggatcgacggcctgatcgtccaggacgtcggcctgctcgagctggacctgccacccgtgccgttgatcgccagtacacagatgcacaacgccacggtcgagaaagtcagattcctcgaagcggtgggcttctcgcgggtgatcctggcccgcgagctaaacctgggtcaaatccgcgaaatccgccgggccaccaccatcgaactggagtgcttcgttcatggcgccctgtgtgtcggtgccagcggccagtgctacatgagctacgccatcggcggacgcagcggcaaccggggccaatgcgcccagccctgccggcggcgatacactctcaaggaccgacgcggcaggatcctggcccgcgaccgccacctgctgtccctgaaggacctgaatctggccgaccatctggcggagctgatcgacgccggggtcagttcattcaagatcgaggggcggctgaaggatgttgcctacgtcgccaataccgtgggcttctaccgccgcaagctcgacacgctcctggcggacagaggttttgcgcgaacctcctcggggtcatccgagctcgctttcgagcccaatcccaacaagacgttcagtcgcggattcaccgattacggcctgaccggacccctgtcgggcgttggcgccatcgacagccccaagtccagaggagagttcatcgggacggtggcgaacgtagagaagttgtgtttcgtccttggcgacgatcatgacctgcacagtggcgacgggatctgcttcttcaatggaaaacgggagttgtccggcacactggtcaaccgcgtcgagggccgcagagtctatccacaaaagatgcacggcatccgcgccggccagaaaatctatcgcaactacgaccgcgtgttctccggcaaactgaccggcaaggccgcccggcggaagatccagctcgccatgagccttgtggagaagtcccaggaactgactctgattggccgcgacgaagacggaaacgaggcggccgtcgtgatcgcgggcgacaaacaacccgccctgaacgaggaggcggcccggaagacaatccacacccaactgaccaagctcggcaaaaccctgttcgcctgccacgagatgcggatggaaaccacgtccacgtactttctgtccgtctcgcagctgaacgccgccagaaggagactcgtggagcgattgatgcaggtgcgccaggcccatcgtccccgtccggccggcgtggtccgcaagaacgccgtcgcctatcctgagaaacacctgtcctatctgggcaacgtgctgaaccgcaaggccgaggcattttaccgccgccacggggtcgagaccatcgaaccagcggccgaatcgggcctggacctgtcgggtcgccttgtcatgaccaccaagtactgcctgcggcaggagatgagtctgtgcgagggtctccggtccggggggacagccgagccgctgattctcgaggatgaggatggacgacgattcgaggtccgctttcgctgcgggccatgcggcatggagatcctggcgccgtaagacaaccgtgccgccggagggccaaatagaacggctcgacccaaggatgcggccgagccggtggaattgcgcaacggtggtcttcgcccgtgtcaggcctcaatcttgtcgatcgtgacctggagatacttctggcggtgtccaatacggcgtttgctgttcttgcgccggcggaagtgcgtgacatagagtttgtcgcccttgaccaatgcgtcttcggccgtgctctcgaaagaggcgataaccttcgctccttccacatacggggtcccgagccggctggtcgccccgtcccccacgaaaaggaccttgtccaactcgatctgtctggctttggggtccacatccaccaactcgatggtcaggcggtcgccctcggccaccttgtgctgttttccgccctgttcgattactgcgtacatttcaaaaactccaggtcaaggactgcaatcttggaaaaacaggtatactacggcgcgcggccatttttgtaaagacatttctgctggtttttcgtattctgtcagccgcaggcgttgctcgaacctgaacggatgcattctcgggagtgccttgatgaaactggcgatgctcaatgacaggatcgtccctgtcgactctctcgatccgatctacttcgatcggggaatctacttcggcgatggggtctatgaggtccttcgcagctatcacggcaagctcttcgccctggacgaccacatggcgcggttcgcccggagcctggcggaggtccgcatcaccagtgtggacattggccagattcgcagccgggtcgagcgggcctttgccgccagcggcctgcccgacgccaagatttatttccacgttacgagaggctcggcgccccgcaaccacgtctggaacgccgatctggagcccaacttcttcctgacagtcagcgaggtgcccgacgacacccgcgacaaggcggaagggatcaccgtctcgacccaccccgactggcggtggaaacggtgcgatatcaagtcgctgaacctgctggccaacgtcctggcccgccagaatgccgccgagaagggctgcggcgaggcaattctcgtggatgaagccggcctgattacggagggcgccggttcgggcttcttcgccatcctgggccgaaccctgtggaccgcccccctctcggccaacatcctgccgtcgattacgcgaaaattcgtgctccaggcggcccggaacctggggatggaggtcgtggagaaatgtctgacgccacagcaggcggcctcggccaccgagctgttcattgtggtcaccaccaaggatatcgtaccggtggtcaaattcgacgatgccgtcattggcaacggtaaacccggcccccagaccgccgccctgatcgccgagttccgcaagttcacggtctgagactcgcccagcggaaaacaacaagggggcttgcaccagaagcagccccctttttgttcgaagcccaaccagtgccgtcaaatcaacggcaccgtccctttgtagaagagcaccagggcaatcacgcagaccagcatgatgaccgccgggaccatccataccttctgccactggaactgaccgcccaccttgaacttgtccatcactacacccgccagctgggtgccaccgaacaaggccacgccactctgggccgtgaagatcagggcctgcatggagccgcccgccccttccggcgccaccgctccggcatattgctgcccggcaatgatgaagaacacataggccaacccgtgaaaggcctgggaccccacaattatggccgctggacgcggaatgatgtagatcacgaacagaaccagccaggaagcagcccctgccaccagcgtccacttgtagcccaatccgatcatctccggattcagaaaacgctccaagagcagcaacgtcgccgctgcctgcaccgcctgggcgatggccatcgaggccggcacgttcttggccgcgatcttgttgtcctgcatgaactgtgcggtcccgaggaagtagaactgcatcatccccggcgcaaccatcgaaatcagtaggaacaccaggaacgtcgggattttcagcatgcccagtgcggagcttcctgccgcgccggccggcggcgtgttcggcatgaagccgccacagatgaccgccatgaccaccgacaaaaccgccgccaggatcaggcaatccctcccttcttcaccggtcttgaagatccagcgccagccggtcaggaagtaaccggccacagcccaggcaatcggcgcccacatgaagatgtaggcggatttcgccgtatcgacgttgttcttggccaggtgataaaacatcagcgagttgaccaaaggcaacgtcgccgcataacacagcgcgtagagcaggatcaccggaaacagcgacttgaagtctttgcgatagctggcgacaaacagcagcaccatgccgctaagatgggccaccgccagaatgtactccgtgttgaagtacctatccgccagatacccagccagcagcggcatgaagatgcaggccagaggcaaggccgaatagacccagccggtctgcttgccgctgaacttcagcggacccagcagccgcgccgccaataccggataccacgccccccagaccgcgaactccaaagccatcaacgcgctgagcttccaatacagggtcgaatccatcccgaaagtcatgtcattctccttgaatcgccgcgccgccgctggtccggtcaactcgccgccgccaaccgctggactgccttctggatatcgccgaaacgatcatcgcccgcctcgcgctcgatggccagcgccccgtcgtatcccacctcttccagggcccggaggaactcggcgacgccgacctgtccgtcaccccagggcacctcggtcccccacgtgccgggctcgctggtgcgcagcgcgtccttgatgtggatgtgccgaatccacggtgccagggtgtgaaccgccttgatggggttacctttgtcgtagaggatcatgttggccggatcaaagttgacgccgacggagttgtggtccagtctctcgaggaaatggcgcagctctccggccgtctcctgcccggtctccagcagcaaaatcacgccgttctcttcggctatgtcggccagcgtgcggattcgctcggtgatcttggcggcgtgggccttgtcggtttcgtcgatgaagccggcgtgcatcgagaggtacttgacccccagggcggcggtgatctccgccgcctggatgaacaggtcgcgatccccctgccaatactcgtcggggacgataccgccggtgatcttgatggtgtccagcgtcgagtagtcctcgtgcgcaaagttcagcatggtcgaggtgatcgtccagttctgtgccttgatcgcatcaaggtactgtctgccgccggatccgatcgcaccggcgatcgccaggtgcacgtgctgcaaacccagcttcttcatcgccttggccacgccggggacgtccgtctggagcgaccaactgcacacgcctacgggccagttcctgcatttcatgtccgtctcctgttctttcccccggttatcgaatggcgactcgctcgcgtctgcggatcgactccttctccgcttccacgatcttcaccgagtcacgggactgctccagagtgatgaccggcggcaccgtctggccctggaccgccctggcaaagtggtcgatctggcggacgtagccatcctgcggcagcaccacgggcgtaaaaacctcgccctcggccggacagacgcgcaacgccggctgccgggtcaggtcatagacgatcgtggccttttccatgatcagattgaagctcatctcaaagccgaagctgggcatcatcccccaaccgccctcggcggtgatgacctggtcgtcgccatagacgtactgcgtgacgatgtggatcagttgcccccgcgcgctcatggcgccgtgactgcaaaccgcctggggcatgccgagaaggtattgtacgaagtccgtgtcgtgaatatgcaggtccagcgcgactcccccgctgcggctctcgtcgacgaaccagttgtcgaggctccagccgggaggcgaacccagccgctggaacatggccgcgacgaccctgccgtactggccgctgtcaaccagttccttggccttgacatactccggccagaaccgcaggcaatggccgatctggaggaccttgccgctgttgcgggcggccctgatcatgcgttcacagtcgctcacggtcagcgccatcggcttttcgcacagcacgtggacacctcgtgacagggctcgctcggagaactcggcgtgaagataggtaggcagggtcagcgagatcgcatcgagccccgccttcgcaatcatccggtcgaagtcggcaaacacctcaattcccgaaaaatcgatgtcgccggcggctccgtcgatattgcccaccgcccggtgcgtgtcctccttgatgttggggttcgcatcgcagacggcgacgacctgcgcatcttcccgcgccttccagcagcgaaaatgcatgcgtcccatgaatccgaacccgacgattcccactctcaacatcgcaacgaacctccctatcgtgtgggcgcggcgcctgcaggtgttcggtcaggcagccctcgaagtgatctttcttcccctggcccaatcgtgcatctcatagcgccaagattctccaatcggcacattcaagacgacggattttatcaaacccggccgaggcccgccaagcgattttctcacattcgcctcacaaatcccacagcctcggaaaggcggtggacattgtccgccggatcgctatcatgcgagaagtgcgcacaccggcaaacgagccggcgagccggggtcacccgagaactggagcaatccgtggagaccgcgatgacaccgaaagagcgaatctatgcgaccttgcgaggccaaccggtggatcggctggccgtgacaccgatcttcatggcctgggccgcccacttcatcggacgcacctaccgggactactacctcgacggcgatgtcctggtcgcgtcgcagttggcggtgacccatgcgttcggcctcgaccaggccagcgcgatcagcgatccttggcgcgaagcgtccgcctatgggatggaattcgactacccgcccgacggcgtcggcaaacccaagagaatgctgattcagacccccgaggacgtcacccggcttgcgccgttcgagatcgagaaggccgagcgtcccaggcaacgtgtcgagagcgttgcgaagatggcccaggccgtcggcgcgacccacagcgtcctcggctgggtcgagggtcccatcgccgagtacgccgacctgcggggagtcgagaacaccttcatggacctgatcgacaaaccggagatgtacctccaggcggccgaggtcatcatcgacaacgagattcgcttcgcgcgggcccagatcgatgccggcgcggacatgatcggcatcggcgacgcggtcgccagcctcatcaatcccgcgatgtacgagcagtacgtgctgccgttcgagaagcgactgatcgacgccatccacgaagccggcgcgacggtcaagcttcacatctgcggcaatatcgccaacaacatcgccctgatggctcggaccggcgccgacatcatcgacgtggattggatggtctcgctggccgcggcacgcgaagcggtcggtcccgatgtcacgctggccggcaatttcgacccgagcgccgtgttgcttcagggcacgcccgaagacgtcgcctgtgcggcccgcaaatgcatcggctcggcaggcgcgagattcatcctccagcccggctgcgaagtcccgcccggcacggccgaggcgaacctgcgtgccttctgcccctgcgaaggctgcctgatcgccgacgacctgcgtcgccgttcgtaggaatcccgatgcgcatcgggtcaccccgcgcattctgtcatcctgacgcgcagcggaaggatctggctctcgaccgagatgtcggcttcgctatgatgcagaccccgcatgcgcaggccagatggttcgctgcgctcaccatgacagagcgggacacccgaccgacagtcacggctccccacctcagtcactcacagcgtccagccatcacgatagggaggacggagatgccgattcgcctcgtcggaattgacgaagcgcatgttcggcccgtcccattcgagtttctcgcccagcatcttcgtcgcgatgatgcccagcagcgcgatctccgtcagcggcccgccgcagtcgaaatgcgagccggccggccgaccttccctgatcgcatcgagccagtcgacgaagtggtccttcacacgcggcagcgtcctggccggttgcttgtatgccctcatcttctcctcggggaagattcgcaggctgccggctccgtgtgaaccatacatgatcttgcctttgtccccgatgacaatcgcccctgtgccgggcacctcgcgtccggcttccagatcgtccggccgcgggattgtctcgacgccgtcgtgccagacaagcctgaccggtccgcgattgcccttggcttcgaactcatagaccacgacggtgcctttggggaacgtgtcgccatgagccttggggtcgtaatccctggcccgggcctggaccgtcttgggagcacccagatcgagcgcccagaagaccggatcgaccacgtgacagacccagtcgccgatgacgccgcagccgaacggcgtccagcgccgccacgtgcccggcacgtacatcggatgatacggacgatacttcgcgggtcccagccacaggtcccagtccagttcgaccgggacctcgtgtctctcctggagtctgggaagatcgtcaatcgcgctgtagaccgaaccacacgcggcgtggacctccgtgacgttgccgatggccccatcccagacccactcgcagaacatccggatcgtgtcatacgaatggccctgattgccaagctgcgtcaccaccttgtgctcgcgcgccgcctccatcagggcgcggacctcgtgaatcgaatgagccaaaggtttctcgcagtaaacgtgcttgccccgccgaatcgcttccatggcgatcaccgcatgcgtgtggtcgggcgtggcaacggtcaccgcatcgatccggtcgcccatctcatcgaacagcgtgcggtaatcgcggaacttccgggccctgggaaaacccgcgaacgcgtccacggcccgccggctgtcgacgtcgcacatcgccacgatgttctcgcccttggtcccgtcgacgctggcgccgcctcgaccgccgactccgatacaggcgacgttgagcttctcgctcggcggcgtcggcccctggcccagcacatgacgaggaacgatagtgaaagcggcaatcgcgccggtggccgattggacgaaccgacgcctcgatgtctttctgtcgctgcccatgctgcacactccagtcattgaatccggatgtcggtccatcaatccgaagctgtcgtggcatcgaaccaccgtaacagtgtaccaccgcacagaccaaaacccaagccgaatcgttcgcacggtggttctgctggccagagacgtgacggccccctataatcccctcatcgagggctttgtgcgaacctctccttggcaagaaagaagacgacacatgacaaagacggcaaagacagcaggaggcacgtttccagttcacccgggatcgcccgtcaagaagaccatccctcgtcgccggttcctcaagagcggcgccgccctcggcgcggccttgggattcccctgcttcgtaccgggccgcgtgttggcaagccaaggcgccaccccacccagcgagaagatcgtcatgggctgcatcggcgtcggcagcatgggcggcggccaccttcgcgccttcctcggccaggaagacgtacgcgtcgtcgcggcctgcgacctccgtgaggcattccgtcagaaagccaagcggcagattgacgagcggtacggaagccaggatgcccggacctaccacgacttccgcgagctgctggcccgccgggatatcgacgcggtctgcgtcgcgacacccgaccactggcacgcgttgatcggcatcgaggccgcccggaacggcaaggacatgtatctggagaagccggccgatgtgcatgttgccgccgcccaggccctgcgccgagcggtgaacgaatacggtgtcgtcttccagttcggcacgcagcagcgctccggccgggacttccgcttcgcctgcgaactcgtgcggaacaggagaatcggcagattgcagaccatcgtggtcggctccgtgcagggcctgtcgctgcccaatcagccgacccagccggaacccgacccgcatcagttcgattacgacatgtggctgggcccggccccatgggctccttattccttccaacgggccgcctcacgagccgaaggcagcgagggctactggatgcatatccacgattacggtctcggctgtctcagcggcgcctggggcatccaccacatcgacatcgcccagtggggcaacggcacggacgacaccggcccgctggagatcgaaggcaccggcgtgatccccgaggatgggctctgtgatacgccgctcttctggcgcgtcgaacacctctacgccaacggcgtccgtatgatccacatggacgtgaagcaagacggtcagtcccatcgaggccgctatccggtcggatacgatctgtcacctggatgacatcgccatccgcctgggacgcaagctgcactgggacccccggaaggagcggttcgtcgcagacgaccaggccaaccggatgctccgccgcccgatgcgcagtccctggagcctgtgaaccgcatcggctctcagcaccgcttgctcttcagcagacgatagattcgaaggagttcaccgacgctccaggcctgtgccggacagcctttgggctcgtgcggttcgtcaccgtcgaagatctcggagacgctgccgaggcagccggtcgtggtcaggtgcctcaggagcggctcgatcatctcacccgccctgcggagggcggccggcttgaaatcgttgaccttcagatacgcctcgacgaacggccccatcagatagggccagaccgtcccctgatggtaggccgcatctcgatttcgctgcggcccctcataccggccctgatagcagggatcgcgccggctcagcgtgcgaagcccatacggcgtcagaagctcccgctcgacggccgcgacgatcgccttctgtcgggccccactcaacggtggaccgaacggaagcgaaaccgcgaagatctggttcggtcgaagactcgcatcgacccgcccgtcgggcatcaccgtgtcgttgagatatccgaccgattcgttccagaaccgctcgcagaagctgtcgcccgcctgctgcgccatcttggcgtaccgcctggcgtccgagatcaggtccgcgcgaaggcaaaactcgtgcatgcggcacagtgcgttgtgccacagtgcgttgacctcaaccggtttgccccatcgcggcgtaaacgccacgccgtcgtacttggcgtccatccacgtcaactgcgtatctttgtcgcccgcctggaccaacccgtccgtgtcggtgtggatcccgaaccgtgtaccgttctgataggaatcgatgatccaccgaatcaccggcagcagttcctcgctgaaggtgctcttgtcctccgttgcttcaagatattcaaacgcggcatggatgaaccacagcgacgcatccacgctgttgaaatgggccggcccattgcggtcgtcaaaacggttcggaatcaggccgccatccgcagcggacgcaaacgtacacagcaccgaccgggcctcgtcgaaccgccccgtcaccagcagcaacccgggcagggcgatgaacgtgtcgcgcccccagtcggcaaaccagggatatccggctacgatggtcgtcccctcgacgtcgccgtatcggcgattgacgacgaactgatcggccgccaggacgagcttgcggtccacctcgtccgaaacccgcgcctcacgaagaacctcccgctggtgcgccatccatcggttcttcaccatcccgacctccaccatcaccggccggtccggacgatagcgctcgtcgagacgcgcccagaagacgatgcgtccgtcctcttcgaggacccccctccagaagccgggcgtccagaggtcttcgctcgcctgctggccccgctgccggttgacgcggtaactgaaatcgaaccaccactggccgtcgtcctcgaagcgcatcgccggacagtccatccgcagcacaccacggcccggtacatcctggcggacgagcagccccggctgcaggtgctcgcagcgcatcggtacgtcattctgctgcatgtggtgaaagtctctcaggcccacgaagggacgcacgatgaactccacaggctccatgaggccttcgaaggcgtattccaccacgaccgtgtcgctgtcgggcgcaaggtagaccgccttgtccagttcgatggattcgaactcgtagcggaagtgcgctccgctatcccggcggaattcgcgcaggtagggacacgccgccagaaccggctcgccggagaactcgaacgtggacagatgaaacgcctgcccgccgcacgtgacgatctccaggcagttcgacaaggccatgacgcgattgaccggcggggtcaacgaaccgatgagcaaaccgtgatatccgctcgtgttgcaaccgatcacggtgcccgaagcatagctgccacgctcgttggtcaggagccattcccggtccagcaggcttgtgatctcgttcccctcgatggccagccggacgatctcgtcggcaccgaccttcggatgcgtcaacacagcaatactccccgtgcactggtgatttcgatgccggacctcgcgggtatcttcctgcgccgttcgtccgcccgcgtcagttggtcaccgacatgttcgctgcgccggcgggcgaggatccggccaccgcctggatgctcgatcgggcacagcgcctttgaagatgatccagcacattcatgaagttgatgtaggaatcgtagggcgaatcgtacgggttgaagtacttgtgcacatcgccatcgctgaagtatttcgtgcacatgtaatagaaatgatcggagacctgcaatcggcgccagtccgcgaggatctgctcgtcgttggctcgcttgacctgcttctcgatgcggtacagctcatggatggcgttcgattgcatggggttgcccagccaggccgacaggtcccgttcggtgtcggcccaactgatcatatgccgcacatccacctcgccgatcggctcgtacgcggcggccacctcgctgggcgtcttgaagttgttgtccggatgcctgagaatctcctccggcaggtgccgcatgaactcaaaaatgccggtgtcttcccactggtgctcgcccagggtctcgtagtccatgaacaggttgaccacatgaccgttcccattgacggcgttgacccactggctgaacttcgctgccgtcaggggccattcgacccaatgacggttcgagaagcggaaggcgatgtcgtcgctgagtgagtagttcttcagcagcagcttgaggtgcctgcaccccgtggggcgatagacgaaattcggactgcggtagccgagaatgtggtcggccccttctgtgatgacggcatcgaagcatcccatcgcttcgatcaggagagccagctcattgttgtagatcagttcggtgttgcggaacaccttgggcctctgaccgaagaggtcctcgatggtgtcggcgtgcttcttgacctgctcgacaaactcatggcgggaatagaggaagctcagactgtggtagtacgtttccgccaggaactcgacacatccggtccgggccagcgcgtggaacgtgctgagcacctccgggctgtacatctgaagctgttccaacagaacgcccgtcagactgtaggagattcggaagcgtccctggtacttctcgatgagcttcaggagaagtcggttggccggcaggtagcacttgttggcgacttttcgacagatcgcggcgttcttgtggtcgtcgaagtagcgtggatcgttgtcgaacaccgtgtagtgacgcagccgcatcggctggtggacctggaagtagaaacaaaccgaaggcataccgaaaatccttttcttaaccgacgcccttccccgagcgacatccccttcgtcaggcagtgacgagcagttgctcgtagatgctcgcacactgtctggcggcgtccttccatcgcagcttgcgaacctcgaagttgccgtggttgcgcagcgtcatccggagcggcgggtaccgcagcaccgccacgatcttgttggccatctcattgacgtcccagaaatcgaccttcagggcatgccgaaggacttcggagacgccgctctgcttgctgataatcacgggcacgtcgttgtcgagcgcctccagcggcgcgatgccgaagggctccgacaccgacggcatgacgtacagatccgccatctggtagatcttacggacatcatcacctcgcaggaacccggtgaacagcaccttatgcccgattccgagttgcgccgccagctcgaccgagcgatacatcaggtcgcccgagccggccatgacgaacttgacgttgtccatgacctccagcaccttcttggccgcatgcagaaagtactcgggtcctttttgcatggtgatccggcccagaaacaggaccagcttctcctcccgtttgatgcaggtctcacccaccgaccaggagccgttgcgctccacgccgttgtacacaacctcgaccttctccggactgatcccatagcgactgatcacgatgctccgcgtgtaatggctgaccgcgatcaccttctgagcccgctccatgccctcccgttcgatgtcgtagacgacctggttgacgtgctcgccgctccggtcgaactccgtcgagtgcacatgcaccaccaggggcttgccggtaaccgccgcaaccgccacgccggccggataagtcatccagtcgtgggcgtggatcacgtcgaactgttccccccgggcaaggcggacggccatcgtggcataccgctggatctcccggtacatatcgccgccgtagtcaccaccgtggtcccaatcttcgcccgtctgcttctcgcccagctcggctcgaagccgcagactttcttccagccgtgcatcgtagctttccggggtcgcgtacgcttggaggggagaggcgatcgttttgaagatcacgttcgtcaggtcataatccgccgcccggcaagaagcggccgtctggagggaacgcggcgacaggagcttgacgtgtgtgacgtattcgctctcgaccatcttgggaagcacaaaggtcaccttcacaccgagctgatccatcgctcgcgtcagaccgtagcaggccgtgccgagccctccactgatgaagggcgggaactcccaacccagcatgaaaactcgaatgtgctccccctcttcgttccgtcccataaatcctcacttctttcccgggctcgatggaatctggccgctgttgcgccttccaccgaacaatcgcctggcgaacgccgctgaaaggaaaggcccctgtggcgctttcctatatatgcctaacgtatcggccgcggcgtccacccgcttgatccctgtgcgcaaaaaattttccaatcgtcacaggaatatcaatgtattcatcggctgttacccctccaggagtacagcaattcttgtaaaaaaccgttcctgaggccctgccgcccccaattttataggctgttggcaccttctcgtacctccccccctcgggtatgcccggcgtcgcaccccagcgtcctcaagccccccgcccgaggccgccctgaagcctacccccgaaacgccatcggaattcacgccaccggactacgggtcatgcgccgtggctgtgctccgcccgttctctttggccccaacaaccaccatagccctcccctctctggccgagagaaccggaaaccgcgcggtcttcggcaccccatcctccggccccgcacgcggtttgacgaacatatcgcccaggacccgtcccaatgcaacaaaaaaaacgccaaaccccctaaatctcctcctctctgaggccgataggctccattgagcttggcgccggcaggtgtgctttgtggccgtcgctgcccgcgatccaggcgaagacgaaccaggagagagggtaccatgtcgcccgtttcggcccgtgggcctgcaacagcggactcctggatggtgaaaagcacgtggttctcttacggagcgcgaagatgaaaaagccgatggacaagaaaaacaacgggcaggcaaaactcaaagacctggtggtggtcaccctcctgagcgatatcgatcaggccaaggagtaccagaccctcctgaagctcaacgacatccccgccacaatcaaggagcagctcgacccgagtggcgagcacaaaggggtagccctcatggtgcccgaggatttcctggacgaggcccacgtcgtgatcgagtcgcaggatgcgtatgatgacttctacgactatgcgatggaggacgaggaagaagtcgatttcgacgccgatctgctggacgacgagttctgattgactcgtgcgaaggcgtatcccgggaatgtaaccagcggtctccccgtccgggtggcagcagacgcggagcaatcgtacaagagagaaggccgatcccctatggcagaggcagacaagaaacacacggacaaatgcggttgccgagaagggcgatgtgagcgccgcagcgacgacagacggcaaacggaagcggacaccaccagcccggacttcgtggagcggcgtagcggagtggaacgccggcagaatgtggtggaccggcggctgggactggatcggcgccgcgggcccggccggcgccgcagcgaggatcgcaaggccgccgaggaaggccagatgtcggacgaacaattcgagttcgtgatggcaatcgacgaatacaagcgggccaatgcacggccattcccgacctggacagaagtcctcgaagtcatcaaggccttggggtatcgtcgcgtggcggaaccccagccattgtgtaggtcgcaggacgaggtgcgggtcacagaaaaggccggcatgagccgccgtcgcgcccggagacctcagttgacaaaacagtgaagtcttgagggcgacggacgccttgggaccagccgggttcgggcacgcgcaactcgtcggccctcctccggggcccggcatgcggccagcccgtcctgtcccggaacctgcgcgtttccacccgtttcttcgttccggccggcaagacccgaccgatcgggtgtattttttctcctgaagcggcacatttctcttgcctgggcgtaatccatcgggtaaactgttggattcttcgctctgctgagagggagggtaggtacccgccggtcgatgcaacccagaaaacggtggcaagggcgaagaatcaccagcgacaggacggatttatagctcctcctgccgataaggcgggcgattgattgtggtttgtcagagagtggtttcggaaacagatggaaaagatcagcaggattcggaacattgggatttcggcgcacatcgactcgggcaagacgaccttgagcgagcgcattctgttttatgccgggcgtattcaccgcatgcaggaggtccacgccggggagggcggagcaacaatggatttcatggacctcgaaagagagcgagggattaccatcacctcggcggcgacgcaggtggcctggagaaacatgagcatcaatctgatcgacacgccggggcacgtggacttcaccgtcgaggtcgagcggtcgctgcgcgtcctggacggggcaatcatggtcctgtgcgccgtcggcggcgttcaaagtcagtcgatcaccgtcgatcagcaaatgaaacgctaccgcgtgccgcgaatcgcgttcgtcaacaagatggaccggacgggcgccgatcccgatcgtgtccggcaggaaatgacagagaagctcgggttgaatgtcgtgccgatccaattgcccatgggctgcggcgacagctttacaggggtcatcgacctggtgaccatgcaggcaatccgcttcgaaggcaaggacggcgagaaggttatccgcagtccgatcccgaccgcgtacgaggacgctgccagcaaggcccgccacgcgatgctcgaagcactgagcatgtacaacgatggcctgatggagatgctgctggaagaccagccggtcgaagagagcctgattcgccgagttattcgcgaagccacgatcaaccgcgacatcgtcccgatgatgatgggctcggccttcaagaacaaaggggtccagccgctgatggatgccgtctgcgacttcctgcccagcccgatggatcgctcctatttcgcgcgcgaccacgacaacgcagggacggaaacccccctggccagcgatccggacgccccgctggtggccatggtcttcaagatcaccgatgaatcgttcgggcaactgagctacgtccgcgtgtaccagggccggatcgtcaagggccagcagtaccgcaatgcccgcaccaaccgcgtgctgcgcgtggggcgcatcgtgcggatgcatgcgaacgaccggaccgacatcaatgacgccggtccgggcgacatcatcgcgttgctggcggtcgagtgcgccagcggcgataccctgtgcggggaaggaatcaattactcgctcgagagcatcttcatagccgacccggtcatcagcctgtccatcacgccggtcacctcggccgaccaggagcgcatggccaaggcgctgagccggttcatgaaagaagacccgacgtttcgcgtctcgacggacccggagacgggcgagacggtcatcgccggaatgggcgaactccatctggacatctacgtcgagcggatgcggcgggagtacaaggccaatgtaacggtcggtgccccgaacgtcagctaccgggaagcgcccaccgtcgcggccgagttcaactatcgccacaagaaacagaccggcgggtcgggccagtatgcccacgtcgtcggccgactgatcccgctggggccggacgctgaggccccgtacgagttcgaggacaatatcacctccggacacattcccagcgagtacatccccgccgttaacaagggattccaggcggcaatgaagaaagggccgctggccggatacgaaatcgtcggctgcaagatgtgcctcgacgatgggtctttccacgcggtcgattccagtgagatggcgttccgcatcgccgccagggacgccttcatcgaggccttcaaacggtccagaccgtgcctgcaggaaccgatcatgaccgtggaggtcgagacaccgaccgagttccagggcccgatcgtgggcgatctcaacagccgccgcggaatcatcatggaaaccacggtgcgggacacgtataccgtgatccgggccgaggtgccgttggccaatatgtttggctatgccaccatcgtacgaggcctgagccggggcatggcgacgttctcgatggaaatgtgccgttatgcccaggtcccgacacgcctggccgaagaaatcattaaccgacgtcgtgagaagaaccagcagccggtccggaagtaaggatctccggtccagtgcgatagcccccggccgtggcgctgccacgccggagagccgagtatgccgccagaacggaccttatgttgataaggtctgtcagtccggcgggcatcggtagggttcttagtggagtctcacgccgttcgctacaccgcgtcagaacctcactccacacctgtcgtcccacggagggttggccgtgccatcccccggggactgtcatttttgtcaccaggccggacgctggtacgtccgtcctactttcaggattgtctcatgccattcaagacgtttggtctttccgacccgctggtgcaagggattcttgccaccggctacaccacacccacagaaatccaatcccaggcgatcccggtcgcactcgaaggccatgatctcatcggctgcgcccaaaccgggaccggcaagacggccgcgttcgtcctgccgatcctgaaccggctcgctcacgggagaaaccgacacaagaaaggggtcaggtcgctgatcctgacaccgacgcgcgagctggcggtgcaagtcgaacaatcgatcctctgctacggccggttcctccatctgaaatcgctcgccatctacggtggcgtcagcatcgagaaccaactgcgcgccctgcgacgcggtgtcgacatcgtcgtctcgacgccgggccggctgctcgaccacatgcagcgaggctcgatccgcttcgaagcgatcgaggtgctcgtcctcgacgaggccgatcgcatgctggatatgggcttcatccgggacgtgcgaaggatcgtcgacgccctgcccaccaagcggcagacgatgctcttctcggccacgatcagccccgaaatcacggggttgtcggccggcatgcaaaagtcgccgaggatgattcagatcggccgcccgcacaatccggtccagaccgtcacgcagcacgtctatcccgtcgagaaatcacagaagatcgaccttctgctgcacatgctgaagaaccgctccatgtacagtgtgctggtcttctcgcgaaccaagcacggggccgacaagatcacgcgccggctggagcgatccggcatcgtctcggtcgcgatccactcgggacgcagccaaggtcagcggcaacgggccctcgacggcttcaagagcggcaagtaccaggtcatggtggccacagacatcgccgcccgcggcatcgacgttgccggcatctcgcacgtcgtcaatttcgatgtcccggcgttcgcggaagattatatccaccggatcgggcgcaccgggcgcgccagcgccaccggggacgcgatcacgttcgtctcacaggacgaaaagaagtacctccgacagatcgagaagttcaccgggcgacgcttccgcccgcaagagtgtccggggtttgcctgtgtccccgcggaaccggtgccggagcagccaaagaagagcccctcgtcagaccaccgcaccagagcattcgtcgcttcccggccgacagcggtccatgccaagagagggccggcctggcgccgtcgcaggaacgcgaggccccactctgcatagacgaccgaccaccccaacggaacgaaccgccgagggcacgatctcctgctcgcgaacggcggtcgtttccggtcgggttttcctctcgcttttgcggcgtttctatagttcaatgctggccatgacagaaccacacaataagacaacctcgacagactcgtcaccgtcgaccgaattggtcgaagaggcaccgccatcgggcgagccgtgcatcaacgacgcggcgacgcctccgccacccgacaccaaaccccgcgcgaaacggtcccgccgacgacgaggcggcagaaagaaaccgtcgtggagtctcgatcagttccaggtccccgagaagccgggacaggtgcggttccacgacctggggctgccggacccgatcatgcatgcgatcgccgatctgggattccagtattgcacgccgatccaggccaaagtcctgatccacgcacacgccggacagaacatctccggccgggcccagaccggaaccggaaagaccgccgcgttcctcatcacgatcttcagccggttcctccaggaacccagccacggtgaacgaccgcttggatcgccgcgcgccctggtgctggcccccacgcgcgagctcgccatccagatcgtcaaggacgcccaggacctcggcaaatactgccatttcaactgcctggccatctacggagggttggaggtcaagcggcagcaacgacggcttgacaaggggcccgtcgatctgattgtcgctacccccggacgcctgctcgacttcgtcaagcgaggcagcatcaaactcaaagacgtcgagatcctggtcatcgacgaggccgaccggatgctggacatgggcttcatccccgaagtcaaacgcatcatccgcgagacaccgccgaagaaccaccgccgcacgatgctcttcagcgccaccctgacggaggatgttttgcgcttggcatcgcagtggatgcccgacccggtgatctgcgaagtcgagcccgaacacgtggccgtcgagacggtcaaccagatcgtgtacatcgtcacgtcgcgagacaagttcaagctgctctacaacatcctcaagaagcggggcgacgatcgcacgctgatcttctgcaatcgtcgggatcacacccaggccctggccaacaaactgaagaagcacggcatcgcgtgcgagctgctctccggggcggtgccccagaacaagcggctgcgtatcctcgaagacttccgcacgggcacggtgaaggtggtcgtggccacggacgtcgccggacggggcctgcatgtcaaggacatcggcctggtggtcaactacgagttcccctacgagccggaggattacgtgcatcgcatcgggcggacgggccgggccggcgtggccgggacctccatttcgttcgcctgcgaggacgagtcgttcacgatcccggccatcgaggaatacatcggaaatccgctgcgctgtatcatgccggaagaggagctgctcgccaaagtccccccgccgacctgacgccatgcaacgcccgataacccaaaatgcttccgggccgtctggtgcactggtccgatccgtccaatctggccgataagtgtatggaacgccgcccggtgatggccgcaggcggtggcgaatcaggttcgacggaatgatacagtccagggtgcttcagttatgccaagaccagcggaaccgacccatctgacccagcggctccggcaccgcacgaaaccttgtccctattgtgccgaagagattcgttacgaggcgatcaagtgtcgcttctgcggtgagttcctcgaaggcaagcgcgccgagacccgcatgaggctgggcgcaaccgattcggatcccgatcccgaagaggatgaggatagttcagacacgccggagcaggacgacgacgttctctggtacggccgtccgagtgtgtttgccctcacgggcactgccatcaagatgggtattctggtcgccctctgctgggcggtcctgaagtaccgtgtggcccaggtggtcgcatacgtggacgcctacctgccgaaggtggagatcccggcccagcgattgactcaggtcgaggcctggatcgacctcggcgcgctggcctgcatcgccggggctctgctggtgctgctctggaaggcgatcgtcctgaagagcatctactacgaggtcacgccggaccggatcgaatggtcgcgcggggtcttcgaccgccgcgtcgataatatcgacatgttccgcgtaatcgacctgaagctgcgccgctccctctgggagtgcctgctcggcatcggcacggttcaactgaccacaaaggacgaatcggatccccacttcgacttcgtcaaggtgcatggctgtcgcgacctgtacgacgtcatcaaggaagccggactcgaagcggaccgcacccgcaacgttatccacatggagtaggttcgtccgtcgggttccccacgcgcacaccggtcggtatcagtgcaggcgggcgtgctcccgttcgaagagcctcacgaaggctcccttgttcgaccggagccaggtctcgaacgtctgcatcttcgggttcagggcccggcacatctccacatccgcccgtcggttgggaatgtaaaagcggttgaactcgaacatgttggccaggtcctcggctccggggaaccccaacgcggcgaactcctcgcgaggcacatggtgataaacgaccctggttcccaggatgcgcgtcatcgcctccgcgtattgatcgcccgtcaggtcgtcgccgacgatgccgaccaccttgcccagatagtcctgtggcctctcgaagaggatcgagacgatactgccgacgtcctcgaccgcgacggcggccagcggagtgtctgcctgggggaatccgaaggcgaaggagccgtcctcctgctcgtgcggcggcaaaaacgccaggaaattctcgtagtagaacgccacgtggacgaacgtggccttcagacccagacggcgtgtgtactcctcgagctgcgccttcatgtcgaagtgcggcacttcgagttttcctccgctgatcttcttgcagtggggcagcgtgctgaacacgaaatgctcgacgccggaccgccggaccgcatcgaccaggttcctgccctggccgtactccttctcgaagtgctcccagaaactggtcacaccgaagcagccgtaacagcccttcagggccgctcggatgctcccggcgtcttcgaggtcgcccgggacgacttctgcgcctgcctgccgcaatgcgttcgccttctcggaatccggatgccgggtcagaccgcgaaccttgaacgtgttgccggccaacaaatggcgagcgacgctgccaccctgggcacccgtcgcgccgatgacgagaatggtcttcttggcttccattgccttatcctccagcaaaacctggatagtcattcttcatgtcgcatgcagccgatgctgcatgcctctgactccatacgaccgcagacgcggcagcggttcatggattcgcgtcggccgcgggagattatgtcagatgagtctggttctcccgacgttgcggccagcgtcgcgacatggtatcctgctttgcacgatcgcagactctgtggtgcgatgccgcccgagtggatggagaaccatgtatgacagcgatgacagcgatggtctttgccaccgtcacctttctgcaaaccaccggcagcgccggcgtggagcgacgaatcgtgccggccctatcaacgcgaaagacggtggaagcgacggtcatgcagcgcatctacgaggaggccaggacgccgttcaagtacggcgtaatcctcagggacgaagacggcaagaagctcgactgccccagcgtctttcgctgcgacgcgaaatggtacatgatctacatcctcttcgacggcaacgggtacgagacggcgatcgccgacagcaacgacctgctgaactggcggccgctgggccggattctgccgttccgcaacgaggggtgggacgcggtgcaggcggccggctacgtcgccctccaggatacgacgtgggcaggctcgtatgagctggaacgttacgacggcagatactggatgtcgtacctcggcggcgcgctgaagggctacgagaccgacccgctggcgatcggcatcgcctggacgcaggagccgacccggccggttccgtggcatcgcctcgacaagccggtgctgtcacgcgaccaagcggacgtgcggccctgggagagcctgacgcagtacaagagcaacatcatccacgacagagagcagacgctcggctacccgttcgtgatgttctacaacggcaaggcccagggcagtcccgagcggatcggcatggcggtctcccatgacatgcgccgatggctgcgctacggcaccgaaccggtgatcgacaacggaaccggcatctcgggcgatccgcaggtggtgcggatgggcgacgtctgggtgatgttctatttcggagcgttctggcgacccaaggccttcgacacgttcgccggctcctacgatctggtgcactggaccaggtgggacgggcccgacctggtggcgccctccgagccgtacgaccagacctacgcccacaaaccctggcttctcaagcacgaaggagtcgtctaccacttctactgcgccgtcggcgaccaggggcgtgtcatcgccctggccacgtcgcgcgaccttcgatccaagccgcagccacgttaggccgctacggccagagctggctttcgagccactcgtcggccaggatcgcaaagtcgccgaagtccacgttcgagctgccgtccagatcagcagccagaccggaatcccagggcagccggcccgtcccgtcactggccagataggcgacctccgcctcggacaaagcgtagtcgtagatctggaagtcgtcgatcaggccgtcatagtggccataccatcccgacccgatctggaacgatttgatccgttcgatcggcgagctggtccccgagcggctgtcgtagagaacgccgttgaggtacacgcacatcaggcctttgccacccggcccggccgcagtatccttggtgaaggcccagtggttccagcgtccggtccattcgtaccggcaatggtgacgacccgccagacggttggcaaacgaccacggcgtgccgcaatcccaccgatactgccccgcgtccctccagcagcccaggtgcacggcaatcgacgggttggtttggccgtaggcgtagtcggagcagcacaacgtatcgttgcgatggcccgaatcgtcgccccgctgccagaacgcgatcgtgatcgcttcccgaatcccctcgaacacggccgatgcgttggaaaccaccactgcgtcaccccggttgaccatgtgaatggcgcgtccgtgcacgccgatctcgaacgtcggacgcccctggatcagtccctgcgtccgtccggcgctgtcttgggtgttgccgtcgaatgcataccacagcaccggctcgcccggcgcgaccacatccacgaccgggccgcgtgcctggagccactgcgtcgccatctgccccaggtcgcggtagtcaacgcggcagtccgccgtcaggtcggccgccgaacggtgctcctcaaggcacagcgaggaatagaggcagatgtcgtccacatagatggttccgctgccgtactgacccgactgagcggaggggaagacgaatcccagcgtcagacggcagaccgcgctgaggtccactccgttgaaatccgccagcgggattctccagatattccactccgggctcgtgaggattcccttgtcgccgtcgtaggtcacccgactatcggcagtcccgtcactcaacacggcgtacatccggccctgcatatcgttgcccggcatcccgtacagccagaacgcgaggctctgggccccggcctgcgtccagtcctgcgccggacacaaatcgcgatacgtctcggagagatgaacgttgtcatagtagtaggcaaaccgcatgcactgagggcaactgcgtcgggcctgaaacgactcttctccgacgcgggccttgccgcgtgtgtgccaggtctcgtagagataaccgccggagatgccataggagtcgaagtcttcgatcacgatatggtccacggtagtgaaggaccagacttcgccggttccggccccgttggcatccacgcgccaatagtaggtcgtgttcagcgccagtccgttgggctcgaagcagttgacatcggacggaagaagcgcgagccggaccgatggatcggccgattcgaccagccggcggctgtcgcccaggtacaggctctggtcgatcgcatcgcacgcaggcgtccaggccaacgtcacgtcgcgtgccacgttcgcggcgccgtcgatcgggacagggtcgtcggcccgcgaaccgcacgcccgcaggacacgggcctgcaccgacgccacatcgaaacccggggccccccctccgctgtccaccgccaccagacgcaatccgcgaggggcaaacggcgtgaacacgtccggcaggtcgaggtagatgtagctgaccgcctgcatcgccaggtccgccttcgccaaggcgatggggaactcctggtcggccccgtcggtgagaaacacgattgtctcttcgccggccttgccccactcccggatcaggacatcgttgccgtcggcatccacgatccggccacggtacagcagttccacccagtgatccgtcggcatcgtgaccgccgacatctcggacggtggaggccccaccagccactgttcgggtatgaccgggacgggatactctccgctgaggctcatgccgacccagcaactgtcatccgcgtcataggcatcgcgcagggcgcacggatactccagatccgcggcaccggcggccggcgcccccagcccacagagcaacaccgtccaggcagcgaaccaccctgccgttcgcatgaggcgatctcccattttaccctgatccgtgcccggccggaccgccggaccatgtggcgacttgccaccctggcattataccagtttcgcctctgtgacgcaaaacccatgccgccctgtgcggacgccggcggggtggccgaacgggcggaaaaaccttgccttgcgtgggttaatgactaagctcatgtcatgtgtgccgccgatgtgcagatcctgacgctcgtccgggtcaacggccatgcagccagggattggtgactttgagaggaactcgaacatgagtcagtattctgcaagtccgaccggggagaagttcgaactgccgacgcccgagcagtacgccggggaattcgagcgcctccgggccctcgccgaggccgcccgaaccgaaggcaaggaagtcgtcgtggtcatgggcgtcggcttcgtcggtgcggtgatggccgccatcatcgccgacacggtggacaagcagaccggccgaccgaacaagttcgtcatcggctgccagcgtcccagcccgcgcagctactggaagatccccctgctcaatcgcggccagtcccccgtcaaggccgaggaccccgaggtggacccgatgatcgcccgctgtgtcctcgacaagaagaccctggtcgccacgtacaacagcgaatgtctgacgctggccgactgcgtggtcgtggacgtccagtgcgactacaccaagcacgagctgggaaacatgcgcaacggccaggccgagatgagcgccctggaggcgaccatgcggacgatcggcgagaaggtccggccgcactgtctggtgctcatcgagacgaccgtcgccccgggcaccaccgagttcgtcgcctggccgatcatgaaaaaggcgttcgccacacgaggaattcactcggagccgctgctggcgcacagcttcgaacgcgtcatgccggggcggcactacgtctcgtcgatccgcgacttctggcgcgtctgcgcgggctgcaacgccgaggcccgcgcccgcgtcgagaaattcctccgcgaggtcctcaacaccgagcagttcccgctgaccgtgatggatcgccccatcgagtccgagaccaccaagatcgtcgagaactcctaccgcgccacgatcctggcgttcctgaacgagtggagcctgttcgccgagcgcaacggcgtggacctcatcaaggtcatccacgccatccggatgcgtccgacgcacaacaacatgatcttccccggcccgggcatcggcggctactgcctgcccaaggacggtggcctgggctactgggcctacaagcatatcctcggcttcgaggacggcgagcaggttttcaaactcactcccaccgcgatcgacatcaacgacacccgcggactgcacgtggcgcagttgacccgcgacgccctgcggaacatgggccgctacatcgccggcgccgaggtcctgctctgcggcgccagctatcgccaggacgtcggcgacacccgctacagcggcagcgagatggtcgcgcgcaagctggccgagatgggcgccgacatccgcgtgcacgatccctacgtcgagcactggtacgagctggagtcgcaggacacctacccggcgccgggacagtcctgggcccgcttcttccgcaaccaggagcacctgacacacaccgtcgtccagaaggacctggccagggcgatcgcgggggccgaggccctgatcctggcggtcccgcatgaggcgtacctgaagctcgaccccgatcaggtggtcggctgggcgggcgaaccgctggcggtgatcgactgcttcggcattctcgacgacgcgcggatccgtcggtacttcgagctcggctgcgaggtcaaggccctcggtcggggccacatccagcggatcaagaaggaggtcaaaggcacacgatgagtgaacagagaatctatcaaatcaagatcacgctcgacgacattcgcccgcccatctggcggcgcgtgcaggtccccggcgcgatcaccctggccgacctgcacgacgtcatccaggtggtgatgggctgggagaactgccatctgcacgagtttcggatcggcagcggccggtatgcgccctcggtcaacgaggaattcgatatggagatgaccgccggcgacaccgaggtgaggctctgcgacgtcgtcacgcgtccgaaggccaagctccgctacatctacgatttcggcgacgactggcgtcacacgctgacggtggagaagatcctcgaacccgaggccggcggcaagtatcccatctgtctggcgggcgaacgggcctgtccgcccgaggattgcggcgggccctggggctacagcgacatcctcgaagcaaggaaacacccggatgatccgcaactggccgaactgctcgaatgggccggccgttacgaccccgaggccttcgacctcaaagccgtcaacgcccgcctccgccggctccactgagcggcccgtccccaacggcgaatcgtcccgccaccggcggatcgcccctgccgcccaagtgacgccctgcccgcatcgacccgcgtgacagcgtgacagcgtgcctgtgtgtctgtcgcttggcacttggcacgctcgggggcaggtccgccgttcctcatagtgtgcccatcagagtctgcccggaccttgccaaagaacacacagaaacacagatgcaggaagatcctgtaatgtgacaatatgcacaataaccacataggccttcactgccggcgcgcgtgaccgcgtgacagcatgacagcgtgccaacgacgcaggcccttgtcagcctttgtcacccttcgtgtcgggcagatgccaccggtggcgaccttccgcagcgtcgcgaatcgaagagacatgaagatcggcccttgcccgctggacggtccgccaggtgaagccggcgtcctcggcctgccgacggacttcggcggccgccatggggccgtcggccagcagcgcccgcagccaggcggcggcttcctttcgaacggttcggtcggcgttgctctcgccggcggcggtttcggcggcgagggcatcggtggcggtcatgtcgaccgcctcggtctgccagcagacggccggtgggtcgccggcgatgatgaaggccaagccctgaccctcggcggccaggttgttcttgccgggcagcagcaggcgccggtcgcggttcttcgggtcccggatcagatgccagacggagcgggccacgccggtgaaggcccggctgcccagggccaggtcgtcggcgtgggcgacggcagcgttcttgcgtcggtgggccacgagcaggaccgccggaccgtacaggtccgccacccgggccaccgggtccagcagcagccgcacgtcgctgtcgcggtaggagtcagtcccgctgcccaggtacgagccgatcgggtccaccacgaccagccggcagtccgggtgcatctggagacaccgctccagcggctcgatgtcgttcagagtgaacgccgcgtcgtaggtgcgaccctcggctgtggtcttgcggaccatcgacagcagatgcgtgcgacgcacatccgccccgtgggcatccagacgcggccgcagcgtgtcggacgggtcgtcctcggcgcagatgaagatcaccgagccgctgacgccctcgctgccgtcgggccagggtcggcccgtcgagacccgcgccgccagatcggtcgtcaggaagctcttgccttcgcccggccggcccaccagcagcgtcaggcggcccatggcgatccgtcccggccacagccaccgcaccgacgtcggcaccacgtcggcgaagcactgaaggatcggcacgctccgagcggagattgcggatgtcggatgtcggatttcggattgacgcgtggagttgaatccgcaatcggcaatccgcaatccgcaatccgcaacgggcgcgccgcaaacttccgccgcctcgaccagggccgccagcgtgttctgtcgttcctccatgcccccaccggcgtggacccagtcgaacagatcgcccttgggctccaggccgggcagctcgacgatccgcacgcgggccggtggatcgagactttgcaggatctccgcgacggtctgcacgtagcggcggccggcctcgtcgttgtccggcagcagcacgacgtcgcgtccggccagaggacgccagtcggccttggcggcgctgtggctgccgtgcggactggtcgtgcccagcagccccagccagccggcggcatcggccgccttctcgccctcggccacgtagaccgtctcatccgtccgggccagcaaagccggcagattgtacaggggacgcggcagaggcattccgccgatccgccagcgtccatccggcccgcgatggaccggccgaatctctttgcccaccgcccggtcccaccgcaggatcaggcccaccggatcgccggcggcgtcgaagtacgcccactgctgcgaccggcggccatactgccgttccaggtcctccaccgcctcgtgtgccgcctcgaacgacgcggcctgccaccagccgtccgcccgacccgaagccctggccggcccctgccgcaggcggttctccaggtgatacagctcgcgccgggcgttggcctgcctcgggtccagtctcgtcgtcatatgctgtctcccaaccgggtccgacccgcccgggcggccacaccgccgccccgccgcgtccggatcgtacccgccgctgtgcggtattgtctaatcaccatatcgtggcttcattgtatgggcagaccaatacctgtccagccttttgttgtatatttggtgatcttttttgtgcccagccacttaaaccaaacacacagcggaggttatgaggcccgatggaaaacaaataattgccgatttccgattgcggattcgctcccccgcgtcccttccccctccgccggcgtccctacgggcggcggtacttgcggtccatcaggatgaggaccttgtcgtgaatcgcgggcggcaacgtcttctggagcatccggcggacctcgcccatgggcgtgcgggccgtcaggtgggagaggatgacgtgttcgttgtcgaggcggccgagcaggccggcgagctcgtcgacgtgcatatgccgcccggcgttggcccggccgatgtgctcgtcctcgtagaacgtgcactcggcgatcaggacgcggctgtggacgacgtagtcgagccgggcgaaatcgacgtactgcgtgtcgcccaggtaggtgacgagggggatctccacgggattgtcgatggcgatcccctgcttcttgagcgcgacaatctggggcccggtcagtccgacgtattcgggtttgagcttcttgcgcttctccaggatggtgaagcccaccgagccggcggtgtgccgggtgggaaaggcccgggcgaagaggttgggcttgatggcgtattcatcgcccggccgcacgccgacgagccgggcggggatgcggttgccgtcgagccggccccaggagtcgaggatctcctgcatcgtgcggatcaggttggccggcgccaggaccgtgccgggcgccatcccgcagaagttgcgctgcgagaggtaataggcgaaccccgccgcatggtccatatgcccgtgcgtcagcaggacgtggccgatggggatgatctggtccggcgccttgcccacgtcgaagcacacatcgagctggggcacggcgatcaccgtctcctcgccggccaccgagtagccgaggaccgtgagatcgccgagttgtatctctgacaggttgtgactggacattcggatttacgattctggatttctgatttacgattgagtcgcgtttgagacgcacgaggcagatagtaaattgtaaatcgtgaatcgtaaatcccaaagtgcctgacaaacgagaacatcgagggcggcatccggccgacgccgcgctgtttgcggccgacaagctgccggcgctgcgcgaggcgctggccgacttttccctgctgctgagcaagggctacgcggacaagagcgccctgaagctcgtgggcgaccgctttggcctgacgcagaggcagcggctggcggtgatgcggtcggcctgctccgatgcgcagaggcagtcgcggctggcgcgtcgcgtcgcgatcggcgcgctgcccggccggaccctggccatcgatgggtacaacctgctgatcacgatcgaggcggccctcagcggaggcctgatcttccgcggccgggatggctgcttccgtgacctggccagcattcacgggacgtaccgcaaggtcgaagaaacagtccctgccctcgctcggatcggcgcgtttctggccgagatcggcatcgcggaggcccggtggctgctcgacagccccgtctccaacagcggccgtctcaaaacgctcctcaccgacctggcccaagagcgccactggccctggaccgtccgcctgtcgctgaaccccgacgcggaactgcgtggtcagtggacagttgacagttctccgtccccagcccacggccagccgccaaccgacaactgccaactgacgaccgagaaccgtccacggccccccatcgtcgtcaccaccgacagcgtcgtcctcgacgcctgcggccactggaccaacctcgccgccgagatcatcacccgccacctgcccgacgccaccgttatcgacctggccccctcgtagtatgctcgtacgagcacactacgagcgccgggttctgtcgccgacgccaaggagcagggcaggaaccgagatatcttcatcgagatcgtcccaatgaagacccgttcccccgccgctcaccacatatttcatccgttccgagggcgacgcgttgagcagacgcggaaaatacgcaagcggaatccccagtgtacgcccgtcggcaaaatcgacccacatggtgtcgtcctcgaacctgacctgttttgccagagcattagacaccaaagtgctcattccagtacctccgaatcaattcacggttctccacggcaacgcccagcagctcgcgcagttcacccgcagtcaatccgtaagcacgggcaaccccgggctccggctccaaccagaacttcgcgacgcgctccgcctttcgcacgtggacgtgcaatggctccaacggatcgccctcgttcgagtaaaagaagaacctgaaccccttatatctgaatacaacaggcattagaccaccctaaggttcgggcacgacgatagcctgttcaagagttcaccaccggccatcgtctcgctcggccggcttcgcccatggggtccagcggcccaccttcgacaacgatcctgccttcaattaccttcccgctgacgatcttcatgcttgtatggtagcaattggggccgtcgggatcaagcgattgggcgacgcgattactgacttgccggcgggggtgaaacgagacctgctcgtagtatgctcgtgagagcaggaaggccacagcgtctgacaacgccgctgcgaacagggcctctcgcatgtccgcaagcgtcgtcatacactttcatcggttcgacccttccccgcaccggtccggtgtaaggcatggtcacgccggcctcttctgccttcggatgatttccgccagtgacctcaaggcctggttcaccgaatcatggtccgggaaaacctccgccacatcggggtcgatgaccacgacattcgttccttcggcatagcgttgtgcgtacttgccctggacacctttgctgaaatcatactcttcaagcatgtccggatcttcttgcgttctcttcatattgcgctctttctttcttggatgccttccgtgcgctgatcagccggacgtggtcgccccgatcggtgtgaacaacgaccagaagacgatccttgtgagagtttccgatcaagacgaacctgtcctcctcttcggaatgcagcggatcatagatcaccagggacaggggatctcgaaaggccgtgctggcctcatcaaaagagatgtcatggagttcaacattctgcttcgccttgttcgggtcccacacaaaacagagcattcacggcctccaagccagccgccggtgccactgctcgttcttcctgagcaggtggaccgcagcctctttgcctctgcaagaaccatatccgagagggcagtatacctcctggggtagagaagagccagccttttgccccgacgccacggtcatcgacctggccccctcgtagtatgctcgtacgagcaggaagaccacagcatctgacaacgccactgcgaaccgggcctctcgcatgtccgcaaaggcgagggcgtgccacgtgccaacacacagccctgttgttggcacgtggcacggtcagtcctgcgacaggtattcgcggatgagggtagcggccgtggtgtcggtggctttttcggcgacgggaccgccggcattggtgcagacaacgacggcgaagtccttcttcggcgcgatccagatgacggcgtagaacatcgtgttggagccggcgtgcgtcaggacggtgccaccgccccaggaacgcgacgtcgcgacccatccgaaggcgtattcgctgtcggaggcaaacggcacgtgcagtctctcgaatgtctcgggatgcagccatgtaccttcgcctcgggcacccgccagttgccacgccgcgtatctggcgaagtcggcgatgctgcaatgcaccgtcccgcccgggccgattgcggccggattgtccgcgtgcaggcccggcgcaaccggctcgaaagccccgtcttcgccggccttgtgtccccagggctggtccaccttgccaacgttcgcgggcgcgccgaaccccgccgaggtcatgccaaggggcgcaaagagccgctcccgcagcacctcttcccacggacgatccagcgcctcttcgatggcgtgaccgatgagggcatagccggcattcgaatagatgtacttcgtgccgggaggcgcgacgggcttgtgctttgtcagcagttcacgcgcgaggtactcgcgctgcgcacgcggcggccggtcggcgcgctgccagagccgaccccacaagccgctctcgtccaactcgtggggggcgccgccccggtgagccagaagctgctccaaggtcacatcccgccactcggcctgcatctgcgattccagttcggggaacatctcggccagcgtcatgtcccatcgcagcgtgccgtcctcgacgagcatggcggccagcgtcgcggtcatcgacttggtgcacgagccgatgtgccatttgtcgtcggccgtcacacgctcgggcgagtccgccttgcgaagaccgaccgcgccgacggcaaccgtgtcgcgacctttcaccaccgccgccgccagggccggcagcctgttcgcctcgcggatcggttcgagcaatacgtccaacgaagcggacgccgcggccgccctgctcgaagccagcagaaggagcatcgcacagattggatatgcccggcgtcctgccaccatgtcaggtcagtccacaagttcgcgaagcgagttcagatcgatctcttcgagtgaatcgcagattcgatctgcgtcggccagctctgcggcgggtacggtgttggtcacggcgacgcaacgggcgccggcggcccgggcggcctgcacgccgctgggagcatcctcgaacacgatgcagcgggccgcctcgatgcccagacgccgaatggcgatcaggaagatctgcggatcgggcttcttcctggtgacctcgctgccgctgacgtaaaccatcttctggtgcggcaccttgactgcatcaagaatcgcctcggaaagctcgcgggtcgccgacgtggcgatggccagccggaagtcgtcctccgtcagggccgcatggatcaggtccagaacgcccggaaaggccggcagcccttccgcccgcaccgcctcggtcaggtaccgctcgcgcagctcggccccggcatgggcctgctcgtcgctcagctccaggccatgaaccctggcgccggccttgacgaacgcctccgcccctttgccgtaccctgcggcgaaatcctccggccgcacgcccgcaagcccgaacatctccgccaggacgcggatggtcacccgcgcattcagcggctcggtatcggcgatcagcccatcgacatcgaagatcagaccatacccctgcttcatccatcgaccccttacgccagactcgaaagggtcttatcatagcattccagcgtatggtcgccagccttttgtccccctgtccccgaggcccgctgcttgatctcgttcgcgaccaggcgttgagactgccgcacccggcagatgccgcacggacgaggcctatcccgcaggctgcgaaccgcggtgataagggttcggacaaaggaggtgcagggctttcgatgggctcggatggtgcgtgcaggccgcgggtcgttcggacccgcggcctacggacacttgcgattcccccctgggctgcggctaagcccccctggccgcagtcgcgtgtgttttcctcggcgagatttcttgtcgggagtgttcagcccttggacttggcctgggcttcgtcgatcttctcgcggatcatctcggcggcctttgtcgcggcttccttcccgaacgcgatcgccttgtgcatcccggagttgagcgactgggtgaattcttcagatttgagtttggccagaatacggcctttgccgttgagctgtcccggcttcagatcgggagccggcgacagacaatagacggcggtcgcaaagccggcactgtagacgatgagcagcaagacgaattttgccctccaacccatatctgtggtgttccccccttcttcactggatcctgatatgccagccccggcattgttgcgtgcatccgtctctacgtaaagcttccgatataaagccgcagatgcaaacagaaaaacacgaaatgaagcggtccgatacgacggccgatctggcgatagaatcagcgaagagcggtgtcgagaatgccgcgcagggcgccgcacacaaaggccacgtcctcctcggtcaggtgggcgtgaaaaggcagggccaccgtccgccgagcggcgttttcgcagacgggaaagtcgcccggactgtgtccgtatcgctcggcgatgaacggctgcaaatggatcgagggaaagtagttgctcacctggatcttctggcggcgcatctcctccagcagacggtcgcgatgcttccactcgacggaatccgccaagcgaacgacgaagacgaaccagcttacgtccccgccgaccggcgcggcgggcacgaggagccgttcgtcgccggccagcatctgctggtaccatcgggccacgcggccgcgtttggccctgatctcgtcaatccgcatcagctgcgccaagcccagcgcgcagttgatgtcactgagccggaagttgtagcccaggcgctcgtggagcaaccactgatcgccgccgctgcggccctggttgcgaagcgaaacgcaaaggtccgccagggcctcgtcgtcggtcaggatggccccgccttcgcccgtggtgatttgcttgttcgggtagaagccgaagacgctgagcgcgccgaaggtaccggccttcttgccgtgcagagccgatccgagagcctcgcaactgtcctcgacaacgggcaggtgattccgctcggcgatccgacagatccggtcgaatccggcggggtttccgaatacctctacggggagaatcgcgcgcgtgcgcggcgtgatcgccgcttcgactcgatccgcacacaggttcaggctcaccgggtcgatgtcgacgaagaccggcttggcgcccgtcatcatgatcgacgtcgccgaagcgacgaacgagaacggcgtcgtgatcacttcatcgccctcgccgatccccaaggccagcaggctcaggaacagtccgctcgtgccgctgttgaccgccaccgcccggcgacggccaagatagcgcgccagtgcctgctcgaactcggccagcttgggaccgagcgacaggttcgggctgcgaagcacctcgaccacgctggcgatttccttctccgtaatgtccggtcgggacaagaatatccgcatcatgcactcctgcaccgtgacgtcggtcaatcctgaccggacattctaatcgcgccatgcccccaatccaacccgattcccgccccccgctcgacgcgcgaccggcgtgtgcttatgggaccctccggcgccggaacctgctacggccacgtcgcagggcggttttgtctgctctcgattaaggcccgccgtcgcccgggtcgaagaacaggtcggcacaacgaccttgtttcaggaatcgcaacgatggcaaaaggcaagaacgtgctgacgaccggagacgtggcgaagatctgcaacgtcgcgccgcgaacggtttccaaatggttcgactccggacagctcaagggctaccgcatccccggcagcaaggaccggcgcatcccggtcaacgaactgatccgcttcatgaaggcccacaacatgcccaccgaggcgctgtccgtcggcaggctcagggtcctggtgatcgacaacgacgccaacgtcggggccgcggtggtcaacgcactgaaggccagagacagctacgaagtccataccgcaagcacgagcttcgaaacgggagccgccatccagaggttcgcgccccacgtggtcctgatcaacctgctggccaacggcatcgacgccggcggtatctgccggagcatccgcgagaatgaggagtacgcgacaatcaagctgatcgccctggccaaccatctgagccaggcggaagcggcggcactccttcagaggggcttcgatgggtatgtctccaacccctccgacgcaggcgaagtgattcgcaagatcgaggaagtcaccgcgatcatctactgactccgacggtcagtattccttgtacttgctcagccaggcaggccagtccgacggctgcatcccgccggcccgtgtgtagggcccattcacgtcgaacgccttgtgccatttcagaatccagagctccttgagccccacgtggcggaccgaccagtccatgaacaggaagttcgtccagccgttatgccggtcgatgcagaaatggttaatctctccggtcgtgccggtgtcaccacctccgaaatcccacggcagttggatgggggcatcggtatgtcgcggccaggcatcatgccaggtcgaatcggcaaacacgggaatgttgtactggccgctgtgcgctgtggtcttccagaaccactccagctttcgttcgccgcggtctgccgtcatgtggttggtccaactgttgatcccatagctgaaagcgaacgtgtgcgatcctccccccggcgtcgccaaggttcgcgtcatggccatgaaggtgccctcccggccggattcatcgatccgcgtggccgtcgggcacagcagcatctcccaatcgtcccgatagtagggacgcagggcattcggccacagcgtcgtctcaccgacaccccatccgggattgaatttcccgtcgtactcgtcggtgtagaacttgaacatcaggccccagctcttgagccgggccatgcaggcgaccgattgggcctgcttcttgacccgcgacaacgccggcatgagaatcgccatcagcagggccagaatcgcgatgaccaccagcagctcgatcagcgtgaatccccggcgtctgtgcatgacctgccccttcccaaaagcgagcctaatccccctgcaacgtggacttgattctaccaaccccggcgtcagaaagcaacacccaacggcccccccgccggacttacttgcgctgttctttgagcatgtaggcctggaggcggatcagcgtcttggcgctgactgtccgggccgacagatcgcccaggatcactccgtatcggtcttcgtcgagcttccagtgcatcagaaccacgtggggatctctgaggtgcgcccggtcgccatagaagaccacctcccgcccctgagccagaaggctgtcgcgcaggttgaggagcccttcgagaacctgtcctcggtaggcgtcttctccagcgaaggtgtacttgaggaaggtcttgccatcctggtacgtccgcctgctgagtgcctcgcgcccaccgaaaatcgctccggcgatgaccaaggccaccagaatagccgcagcggcggcgatccggctgatgcgcaggtccacgatgatgttgatcgtgtccatccgatggacgatcagtcgggcagggatgcggttcttgagctcctggagcaggccgggacggaccggctccagcccccgcttgggaaacgccctgagcaactcctcgattctctctttgtccaccatcatgtgctaccccgccatcgtcctcgcgtcgatgcgtgtgcccgggactactctttgacgacttccttccgcaaggcctccagcgccctgttcagacggctcttcagcgttccttcgcgtacctgggccgcctgggccgcctcggcgatgctcaactgatccatgtagtgcagcacgacggcctgacggagcttccacggcagccgcccgacggcctggtgcagcccggcgaacagctcccggtctgcggcccgccgggccgagtcgacctcatcaggcgccggctccgcctcgctcaactcgaccggatcaggatgccggtgctttcgccggtgcagacgcgagacgttgccggcaatccggaacagccaggcgctgagggccttgccctcccgcaactggccgatgtgataccaggcccgcatgaacgtctcctgggtcaggtcctcgctggtctggcgatcatggcccatggaccgcataaacacataaatccgctcatggtaccgctcgaccagggcctcggccgccgcccggtctccatgccgaagacgctgcgcaagcaaggactcgtcctgatcgccggtccgctcaccatgcagagcaaccaccttctggcaagccagatgcgccgagctgtcctgctgttctatggcctgtgtgtttttctgcatgatttccacgtcgcaagacccgcctgcaatataccgcttcggggtccgccctacaatatggagcgatccggcctttccgtcaaaacggctcttgtcgccgcgggtctcgtgctatagtaaacggacaacagacgtctgttcacgccatggaatctcggacaacgcgtagcaggacttgcggcaatggatctcgcccggttcagcagcaacgtcaggcggctcggggagaagaccgacccctgcaccctgtgtccgcgccggtgcggcgcccgccgcaacgccggacaggtcgggttctgcggaatcggctctgacgccgtcgtcagttcgatgggccctcacttcggcgaagagagcgtccttgttggcgcgggtggatcggggacgatcttcttcgccggctgcaatctgggctgcatcttctgccagaattacgatatcagtcacctccgtcagggccggcggatcgacgtcgagcagctggccgatgccatgctcggccttcagcagatcggctgcgtgaatgtcaacctcgtcacacctacgcacatcgcggcgcctgtcgccgcagccatcgagacagcgcggaacaaaggcttgcggatcccgacggtctacaataccggcggctacgacgccgtcgaaacactccatctgctcgaaggactgattgatatctacatgcccgacgtgaagtatgcggatgcctccgtcgccgcggagctttctgctgccgccgactatccgcaggtctgctttgcggccgtccaggagatgcaccgccaggtcggcgatctgcaaatcgaacgaggcatcgccacccggggtttgctcgtccgccaccttgttcttccggagaatctggccggcagcgtcgaagtcatcgatttcctcgcagaccgaatcagtccgcatacgacgatcaacgtgatgggccagtaccgaccgtgctaccaggcgcctgcccacccgaagatcgcccgccggcccactcccgacgagatcgccgccgcacgtgggtacgcgcgggcgagaggcctgaccgtcctggactgacacagcctcagcctgtcaggagactccgcaaggtccgcgcgttgtggacggcgtggccctcaacgtcgttattgaagtaggcataaacagcgcaaacgttcttctgctggtccttgagccagccggcccattctgcgagcagggcatcggggtagttgccggcatagcggccggtcgtgccgtgaaagcgaacatagaccatttcgcccgtcacgacgcgaggcgatggattgcccgccatgtcgtgtacgcaaaaggcgacgcgacgccgattcagcagatcgaacgtcgcgtcatcgtaccaactggaatggcgaaactcgaagaccgcgcgccttcgctcgggaagataatggatgaacgcatccagcctttcgaggtctctgtgcaggctgggcggcacctggtacagcaccgcgcccagcctgtcctcgaaccgatcgatcacctcgaagaaccgcccgacctcctcggcgacctcggcgagcttcttgatgtgcgtgatgtaccgattggccttgacaacgtacgtgaacccttcgggggcctgccggcgccacttttccacggtgccggccctgggcagatggtagaaagtgctgttgacctccacggtgtcgaaatgtcgggcgtagtgttcgaaccatcggctcttggggagcttgtcgggatagaaccgtccccgccagtggtcgtattgccagccggaggtgccgatccagatgtcaccgtcgggcgtatacacctgcaggctccttgaacggaccgcaacaggaccattataatctttcggtcagcgcacaccagttgggcacaggatggatcgtgcagaacatggattggggacctcagcaatttggcaggtggctggtggccgtcggcgtcgggatcgtcgcggtcggcctgttgtggatgctcctcggacgcagcggcctgtcccgcctgccgggcgatctcgaattcgggggcagaaactggcgggtctatttcccgctgggcacgtgcatcctgctgtcgctgatcctgacgctggtgctctggctgatccgctacctgcgccgctgagaatcgcagggattgccgcttcgctttggcggccttccgcgtataatcgagcccatgagaaacgcgatactcagcgcgatcttcgaccagatggccgacatcatggagattctgggggaggaccccttccggatcaacagctaccgcaaggtctcgcgtgccattgccgaactgcccgtggatgtgggcgtgctgctgaacgacggccggctggctcagataccggggatcggcaagtcaagtctggccaagattcaggaatttgtcgccggcaatcgagtcgcggcacacgaggaacttctggagcgcatcccgccctcgctgctggagttgctccacatcccgggcatgggccccaagggcgtcaaggccgtgtatgaaggcctgggtgtcagaggcatggacgatctcaagagggtcgtcgcggatgggtcgctggcaacgctgcccggcttcggccagaagaaggcggcagccatccagcgagggatcgagtttctggagaagtcgacgggccgcatccggctggaccaggccatggaggccgccgagatggtctgtgcctgcctgcgggacctgcctggggtgaaacgagtcgaggcagccgggtcactgcgccggcgggccgagaccatcggcgacgtggacatcctggtggccatgggcaccggcaagacgacatccaaggcgaatcctcagcagatcatccagtcattcacgcaggcacccttcgtcgaacgcgtcctcgcctcgggcgacacgaaaggctcggccatcatccagaccgagacgacaccggtgcaggtggacgtgcgtgtcgtaccgaccgagagtttcggcgccgcccttcagtactttactggctccaaacaacacaacgtgcgtcttcgcgagatcgccatcaagggcaagctcaagctcaatgagtacggcttgttcgacggggacaaacaggtcgccggagccacagaagaggaaatctacaagagactggggctggacccggtcgtccccctgctgcgcgaggaccgcggcgaagtcgaggccgcccgttcgcacaccctgccccaactcgtccagatcgaggacatccggggcgactttcacatgcacacggtggcctcggacggtcggaacgacattgagcagatggtcgaggccgcccgcaagttgggctaccagtttctctgcatcaccgaccactccgagtcctccgccatcgccaacggccaaagccccgaccgcctggccaagcagatcgagcagattcacaggatcggcgccaagctcaaagggatcacgctgctggccggcgccgaggtggatatcctcgcggacggttcgctcgacttcgacgacaacctgctggccgatctggactacgtggtcgcctcgatccattcgggcatgaacagcccccgcgagaaggtcaccatgcgaacgctcagggcgatggagaacccttatgtcagttgcatcggtcatccgacgggccggctgctcggccagcgggaagcgatggacctggacatcgcggcggtgatcgagcaggccgctcggacccacaccgctctggagatcaacgccaatccgtaccgcctcgacctcaaagacctgcactgcaagatggcgatcgaggcgggcgtcaagctcgccatcgggaccgatgcccacagcaccgagggcctgggcttgatgccgttcggggtcgcgaccgccggccgcggctgggccaccaaaaacgacattctcaacagcctcacacccgccaagctcaagagttggctgcgcaccaaacgcccccgataggcgccgtcccggccagagcggcagacccgctggacgatctcatgacaatcctgctataatccattcagaccagcagacttagcggccgatagcattgccgggtcggccgaaacgacaaaacactgcaccccgcaagagagaaggccaatgaccaagaaagaaggtacggcagggaagaccaaggctcgacacgcgttcgggttgcccctgtcagtggtcttcttcgtcgcgtactacctgtactttgccctggaaatcgagccgcatctgatctaccacggcgccggcctgatagacaacttcccggttttctactggggatgggacttctttgcgggattcaccacctacccagggggcattctcgaatacctgtgtgccttcttgtcgcagttgttctactactcctgggccggggcggcggtcgtcacagcccaagcatggctgctgtgcctgtccaccgacattgcgattcgcacgctgggcctggcgcgatggcggggagtgcggttcctcgctccgctggttctgctggccatctactcgcagtacacattccatctgcccgagacgatggggcctctggcggcgatcgcggccttctgcctctacctggggctggcacccaaacaggaggtccgcgccggcctgtggttcgtggccttttcggtcgccttctacgtacccgcaggaggcccgtatctgctgttggccctgctgtgcggactggccgagatcctcttccgaggccggttccggctcggcacagcgcagttcgccataggtgctgccatacctttggtcctgggggtcggtttctttgggcagcgtccgcacgatgcctatcttcagttgcttccgctgtcctggaagatcaggactcttacgtcctcggagctgatgcgagaagccgtctgggccgtaattctcttccttcccttcaccttgctcgtactggggactgctcgggtgctctttggagcggtggggtcgcagcgatcgagcaggaaggcaagaccttctccaggactggaagcagtccgaggagcggtcgagaagctgttcggcgatccgttgcggagcaccttcggactgaacctccgcacagcagtgttggctcttgcgaccgctgcgacgctgctgctgtaccgtgaccccaaggtcaagactctcttcgaggtcgattacctctcacatcagcagcagtggtcgaagatcatcgaaatcggccgccagaccccctatcactaccttgtctgccatgcagtcaaccgggcactgttccacctgggcagactcggggacgagatgttcgcctttccgcagcgacccgaggcccttctcctgacgcgagccgaggcctattggcagaagttcgacacgtgcgtggacatgggactgaccaatcaggcgcaagacgcactgatggtctgtattgagacctatggcgagagacccctgttgctccagcgtttggcccgagttaacatgatcaagggcaacctcagcacggcccgtgtcttcctgcatgctctggcaaaggttccattctggggtcgagccgcccggaccaccttggcgcggctcgacaccgatcccggcctgtctcaagacgccatgattcagcattggcgttctgtcaagctcgcccacgatttcgtccgggataccgacacgctgacattgctgctgacggaaaacccgggcaatcgaatggcctacgaatatggcatggccagtctgctcttgtccaggaacctcgaccagttcgttcagagcgtcgagaggtggcgtcctgccgccatttcgcaggacgccaggcactacgtcgaggccattctgctgcacaggacgctcaagaggcaaccgatcgacgtacccggtcggaccatccccagagaggcgaagatcaggctccacgagttcttccagcttctccagcagcacggcaaggacaaggccgaagcccgtgaggcgctccgaggacggttcggcgacacgtactactattactatttcctcgacggttagggggcgggttgtgcataaaccctttgtaatcagcgcgttacttctggttttcacagccgcggtcgtcaccggctttgcctggctgtcgaaccgaccggaacctgtcggaagcccgtacgagatcgaccgccggccccgaatcgagccggactacgccgacgcggtcataccacccaacattgccccgttgaatttcgtgattcgggaaccggggaatgcataccgcgtcaaggtctcatcggcacaaggtaaggcggtcgagctcttcagcaggaagcccaccatccagattcgcgagagaccctggcacgccctgctggagcagaaccgcggtcgagagctgcggatcgacatctgggcgaagggtcaaaacggccaatgggaccacttccagtccatcgccaatcagatcgccgaagaggacatcgaccgcttcctggtgtatcgaaagatgcacccaacacacctgcgggtcaagggcgatatctccatccacttccgcgacctgaccagcttccgcgagtcgctgctgctgggcggtaagagtacggagaatggctgtatcaactgccattcgtttgccgccaatcgcagcgacaggatgctcgtgggtgtgcgatcgcccacgtttggcgtgggaaccctcctggtcgacggcacggtggtgcgcgagattggtgccaagttcggctacacctcctggcacccgagcgggcggatggcggtctattccgtcaacaacctgcccatgttctaccactccagccgcaacgaggtacgcgacaccgtcgatcttgattccttcctcgcttgttacttcaatgacagcaagaagataggagtcgagccaaacctcgcccgcaaggaacgtctggagaactggccggcttggtcgggtgacggcaagtacctctatttctgcagcgcgccgctgctgtggcccaaggacacgccgacccccccgcttctttacgaccaggtcaagtacagcctgatgcgcgtctcgtacgacctcgacaccaaccaatggggaggattggaaaccgtgctctccgcagaagatacgggccgaagcatcgcgatgccccggtgcagcccggacggccgatggctgtcgttctgcatgtgcgattacgggtatttccccgcctggcaggacaacagcgacctgtacctgctcgacctggcggccggcgacgaagccggcaggcatccgtaccgcaggctcgaaatcaacagcaatctgagcgaatcatggcagacctggtccagcaacagccgatggcttgtcttcagcagcaagcggcttcacggggtctttacccggctcttcatcagctacgtcgggcaggacgggaccgtccacaaaccgatcgtactaccccaaagagacccggctttttacgaatcctgcctcctgacgttcaacacacccgagttggtcaccgagcgacccgccgcgaccggcgaggtgctcgcccgaaccttccggaaacggcaggagctggcggtccagatgcctgttacgatggccacgcccaaggccggccaagcctcccccacgcaggcctggcaggcgcaagggcaacgcgaatgaccgccatcgcacgaccgggtgaacggcaaatcggccccccaacaggtcggcccggcaggaccgccacgcggcaggacccccgtcaaacacaaagacccgacgtttttcgaaggttttttgcttgaacaggtcttgcctgtgcgttagaatctggttattcgacctgtgatagagcaatgcttataggtcctcgcatctcttcggtgcggcaggagtggtgttgttttagctcacttgggagcatacctgatcggcgccggaaccatacaggcgcgcgtttgcagaatgccccgccaccctttgcccctgatgagaagaccatctgaaggaccgagacacgtgttctccagccacctctgtgagaacgcgctcgtggtagtggcggcggtgccgtcgctgacctggtcgcagcaacgcatgggtcagggaggttcgagagagagtgagtgattcagacctgtctgcaaccagcttcacaccatcgagatcggttggccggaccttaagcatggcggttcccatagaggcacctggacccatcccaaccatggacggtctcttgtgactgagagccttggctcccagtcgtgacatgacagaggagttgccgggcgacagcgacccggacgttggcaggaaggaggtggccatcgaacgaagggaagtgaggacagtccgaaggagtgtgtggtaatcaaatcccaaatgttttgagtccgaggaggacgtgctatgaagaagttagcattgttggcactgttggtgtgtctgctgctgtcgagcgtttcgacggcgggcctgttgcgcgagatgtggtatcagaacctcggtatcgatgatgccattgcgctggtcaacagcggaacgccgccggaccaggtcgacatcctggccgagccgacgtgggtgaacatccgcgacaactatgtcgcgaagatgagcggctggttaaccattccggccaccggcgagtacacgttctatgtcgccggagacgattacaaccgcatgtacgtcagccaggacgatgatccggccaacgccgtggtcgtctgccaggtggacggctggaccagctcgcaggagtggaccaagtacgccggtcagaaatcggcgccgatgtccctgaccgagggccaggtgctggctgtttacggcatcatgcaggaaggcggcggtggcgatggtatggacttcggctggaccggtcctggattcgagaccatcaccctgatccccggcgagtactggagccatccgtatgagacgatggcgatgggcccgtcgcccgtatcgggagccacaggggtcattgatgccatcctgagctggaacgcacccgccgtgggcgaggacttcgtttacgacgtgtatttcggcaccgatccggccgccctggcaccgatcgccgaaggcatcattgagaccaccgtggacgccggcaccgccgggatcgacctggacttcgccacaacctactactggcgtgtggatgccagcggtgtcgagggtcaggtatggagtttcaccaccgaaccgatgaccttcgcggtgcagaatatcgttgccacgagcaacggcactgcccaggaagggtccggccccgagaagacgctggacgggaaagtctcgatggagagcaccgatcagtggctggccgctccgccggaaggcacgggcgaggccctgtggattcagttcgcgttcccgcgcgtctacaagatgtacgacatgaaggtcttcaactccaacacacagtttgaggcactgctcggctacggcgccaagagcgtcaccattgaaacgtcggtcgacggcgccgaatgggtcgccttcggggatgtcgagctggctcgcgccgccgagacggtcgtcgacttggccggcgtcggcgccaagttcgtccgcctgacaatcaacagcacatggggcggcctgttcccggattcgggtctggccgaggtggcgttcacctatgttccggcgcacgcccgtctgacggcgccggccaatggcgccacgggtgtgaacccggccacagcgctcgattggtatgccggtcgcggcgcggtttccagtgacgtgaccgtcaacggcgtggtgaccacggtggaaggcagccgctttgacgccggcctggtctacggtatgccgtacacctggagcgtggatgagaacgacggcaccgccgtctgggaaggcgacgagtggagcttcaccacggccgagttcgtgtctgtcggcagcgggacccttgtgtatgacgagaccggcaacacgctggaaatcgccatggacggggcggacctgacggcctatgcccccgacacactgcgcgtggcctacaagggcaagccggtcgacttcgtcgatgaagacggcgcgatcaccatgagcgcctccggcgccgacatctggggtaactccgatcagttccgctacgcctacaagacgctcaacggcgacggctcgatcatcgcccgcgtcgacagcatcagcaacatcaccaacaactggaccaaggcgggcgtcatgatccgccagagcaccgatccgagcgcagcgcattcgatgacggtgatcacgggcaacttctggtccgctggctccggcaacggcgcctcgttccagggtcgtccgacggctggcggaagctcggtcaacaacgattcggccagcgtggtcgcaccgccgtactacgtcaaggtcgtgcgcgcgggcaacatcatcactgggtttgtttccgccgacgcggagaactggacgcagctcggtggcgaccgtgaagtggtgatggaagatccggttctcatcggcctgtgcgtgaccagccacgatgcgggcaacacggtcatcgccaagctctcggaggtcagtacgaccggtgacgtcacaggggactggaccgttgaagcgatcggcatggccatgccgtccaatgatgcggcgggtctgtatgtcgcgatcgaagacgcagccggcggggttgccacggtggtgaatgccgatccggctgccacacaggccgtcagcacgcagaactggaacatcccgctggccgggattgaaggcgcggacctgtcgaacgtcgtcaagatcatcgtcggcgccggcgctcccgatgctccggcagccggcagtggttcggttaacgtcacgctgagcctcggtacgccgctgagccacaatgtgctcgccgacgtcaccagcccggcggatgtgatcgagggcgttccgaatgacggcgattggcccggtgccgagcatccggccctgtcgatcgacaacaacgtctcgaccaagtacctgcacttcaagggcgatttcgtccccgatgcagggccgaccggcattcgcgttacgccggccgtcggtgctactgttgtcacagggctgacgttcaccacggccaatgacgtgccgggtcgcgacccgatcgcgttcgaactctatggttcgaatgacggcatcgacgggccgtacacgctgatcgccagcggcgacatcgtggactttgccggtgcgaccgagtggcctcgcttcaccaagaacgccacccccatcacgtttgagaacgaggtggcgtacaccagctaccaactgctcttcacggccattcgtggtccggtgggcggtttggtcaacagcatgcagatcgccgagattgagctgatcggcgtgtcgagctggtagcagcagtaaggcagtacggttttgcggtattcgggggctcataccgggcggtatgggcccccttttttgtctcgggcactcccttggcagacggcggtaggtcccggccacactgcatgcccggctgcgccggtcgagttttgtgtaaagtcatggccgccgccaaccgatggagatggaggttgcggcgcgcccctccgtcgaaggaaggtcccagaaaaccgcaatccaggcgaccagagacgcgaatgattggaacgccgacgtcgacgccgacacattttggggcttgaacgggaaagtcgcttatgttagacttgcttcgttcgacctgcggtacgattgtacgcaacggtttttctgcatgtcttctgctgtggcgacgtgcgtctgtctgggatctgaggagctggcccgaccaggaacgcaatgacacctaatcgcttacagtcaccagatttagctgcatcactcaggtgggcaaacctcacgaaggtgtccggacgcgtgcgcgtcagccgtcggagaagtccgctggacagaagtgattgcttgtcgtcggtcctcccgccaagcccgcgccgtggcgaccggattggcggctgaaccatcggaattatcccgatcaaggaggatgtcgttgacccgggaacagtcgttcccggcgtggcccagatgaatgcttgtcggggtgtggtcagcccacgacacgtgggaaggaggtggcaatcgagcgacggtgaacagggaagatgcggtggattgttgacaggactgtaacgtatccgacacagaacgtgaaaatgtacggggaggacccaaaaatgagaaaagcaacgttagtggcagcggtagtcagtctgatgttgtcggcggtgacctccgccgacgtcctgcgggagatctggtggggtgccgcgagtatcgatcaggctatcgccaaggtcaacagcggcgttccagccgaccaggtcgacatcctcactctgccgacatgggctaacatcgccgacaactacgtggccaggatgagtgcctacatcctcgtaccggccaccggcgagtacaccttctacatcgccggcgacgactaccagaggctgtacgtcagccagaatgacaacatggccgatgcggttcaggtcgcctacgtcgatggctggaccgcctcgcaggaatggggcaagtacccgagccagaaggcggcgccgatgtcgctgaccgaaggccagctcatcgccgtctggggcgtcatgcaggaaggcggcggcggcgatggccaggactggggctggaccggtccggggtttgacaccattaccgtgatcccggattcggtgacctatgccacccatccgagcaaggccaacaagcccagcccggccgacggcgctaccgctgtcgtgaacgcaatgctgagctggggcgctccagccacgatcgagtcgccggtttataccgtgtactttggcaccgaccccgccgcgttatccgcaattgccgaaggtatcaccgacacgtcggtcgatgccggcagtctggcggcgggcctcgaatttgagaccacttactactggcgtgtggacaccaacggagaggcaggcagtgtctggagcttcaccacgcaacacgggcggccgattatcacctcgatcaagggtgatgccgtcgctcccggcggcaatgcccagttggtctgcgaggccaccagcgtcgtcccgtcggaactgagctaccagtggtaccgagagaaggtcgtcatgatgggcttcgagctgtatgacgttccgctgcccgagggcgtcgaggcgacgctcaatgtcgccggcgccacgatcgacgaccagggttactactactgcgtcgtgaccaacgagaacggctcgaccacctccgcgatggcctttctcgacatccagacgggtctgattcaccgctggaccttcgacgagagccccgatggcgtcacgattccggacgtcgttggtggcgccgatgccatgctgaagaacggcaccggcaatgcgaccatcgccggcggccaggcaaccctggccaacaccggttcgcagaactcctccagcgccgcagccggtgactacatcgacctgcccaacgggctgatctcgccgctgacccagttgaccatcgagtgctggaccacctggagaggcaccgacgcgatctggcagcgcgtctacgatttcggcacctccaatggcggcgaggacagttccagtggtggcgacgccacgacctggttctgcgtctgcccggacaacaacgctcgcgtcgtccagacggagtaccgccggcttggcgtggccttcaacctgccgatcaacgacaacggtccgctgcctgccggcgaagaggtgctggtcacgcaggtccatgatgacgtcgccgggatcgtcaagctgtacatcaacggtaccatcgtgggcgcctacaaggctccggccatgttgaacgagtttatcgacaacaacctctggctgggacgttcgcagtggggcgacccgctgtactgcggctcgtacaacgaactgcggttctatgacaccgctctgtcggcggcccagatcgcggccaactacctggccggtcccgatgtcatcgcggaagctgccgctccgtgcgccgtgcacgtgatcggcgaccgcaacgatgactgcgtcgtcgatttcgtcgatgccgccgtcaccgccgatgagtggctcgtccagtcgctggccgactgaccggtcgactttcgaaccacccgctgcgtccggatgatcgaaggacgcaggacagaaaccaagggcctgtaccccgtggggtacaggcccttcttcgtgcctagcccccaccatccccaccgacaatcactacccgcctctgccccgccaggtaccgtgccatatgtcggcatgtaccgatacgcctgtttgccagtgggtttttcattctccatggacatgcgatcatcgtgcgcattcgtgaagtggtggaaataaaacgcaatagggtgttgttcgacaccctgtcttcgtggcataatactgaggtgacctgcggtttgatactgtcccatctggcccatgtgcatgatgcaggggatgacgggggcggggagggtattgcctcctgcgccgcgccttcgggtgcaacccgagcaaggtgctcggcagaaccggcaagccactttgcggcaccctgtctcaaatcggtggagggcttcgtgtccgggaacagagggttcgctgaagtgcatcttcgcagtcggccgtgtcgtccgttcgacccgagacaatcgcgatgcactcggcggccctgacgctcctgtggcgcgtctgccttaccccatcgcaacagtgtcttcggtgtgtcgaggggccgacacgctgagggatggtcgagcgtttcctgatcgaaacgccgagtggattctgtcaatgttcgatgaaggaggtcacgcatgtgtagaaagcaaatgtatctaatatcctttctgctggtgctcggatgggccgccggcggaccggcagccgaactggctcaccgctggagttttaacggcgacctgacagactcggtggccggacaggacgctgtcgtcgtggacttgggggcaagcaatgccatcctgtcggacagcgagatcaccttgacgggagggggcaaagacacgtccgattacatcgatctgcccgacaacatcctgaggggcttgggcgattccgtgaccatcgagtgctgggccacgcaattgtccgtccagaactggtcccgcattttcgatttcggcaccagcacgtcggagtatctctacatgggctggtccgtcgggacgaatctgaacaacgatcgggtggagtggaacggtccggccggcggcagactggtcgacgggagcaacgccccctacacgctgggaacggaataccacatcgtcatggtaatcgagcccggtttggtgacctggtacaccgcgccggccggtgcagacgatctgggaccggcccagggttcgtttaccacgggcaaccgggtctcgactttgaaccataacaacgcctggatcggtcgttcgcaatggggcgacaacaccgccaatgccagctataacgaattccgcatctggcaaggtgccctgtcgccggccgaactggaagagtcgcatgacgcgggcccgggtgagcccatcgccaaccgggcgtacaatccctccccggccgacggcgccacaggggtctcctctcggggtctggtcgtgagctggaccccgaccgcaggcgcggtggctttcaatgtttccgggggcgaggatccgtctgccctccagccgttctcgcaagggcaggcagagaccacgttctccgtagccgacctcatcggcgatctggagttgtccacggtttactactggcgcatcgacgaagtcgcggccgacggcacggtgacgcagggcaacgtctggagcttcacgacggaggacggcctgccgatcatcaccaagatcgaaggcgccgttgtcactcctggcggcgatgcccagttggtctgcgaggccatcggcaccgtggcaccggaactgagctatcagtggtaccgagagaaggtcgtcatgatgggctttgagctgtatgacgttccgctgcccgagggcgtagaagcaacgcttcgcatcacaggagccacgcccgacgaccagggctactactactgcgtcgtaaccaacgagatcggctcggtcacttccgccatggccttcctcgatgtccagacaggtctgattcaccgctggaccttcgacagcagtcccgatggtgtcacgattccggatgtcgtcggcggcgccgatgccacgctgaagaacggtaccggcaatgcaaccatcgccggcggccaggcggatctgggcaacaccggctcgcagaactccaacaatgcggcggccggcgactacatcgatctgcccaatggtctcatctcgccgctgacgcagatgaccatcgagtgctggaccacctgggacggcaccgacgcggtctggcagcgcatctacgacatgggtaccgccaacggtggcgaagacgtctcgaacggcggcgatcaggtgagctacttctatgttaccccggacagcggttcgcggtcgcttctgctggagtaccgtcggctcggcgtgcagtacaacatgcccatggtcgacagcggcaagatgaccgccgggcaagaggttctgattacccaggtgcatgatgacttggccggcatcgtcaagcttttcatcaacggcacgatcattggcgcctacaaggccccggtgatgctcaatgagatcatcgacaacaacctctggctcgggcgttcgcagtggggcgacccgctgtactgcggttcctacaacgaactgcgcatctacgacaccgccctgtcggcggccgagatcgcggccaactatctggccggccctgacgtgatcgccgaacccgccgctccgtgcgatgtgcacgtgatcggcgatcggaacggtgactgcatggtcgattttgtcgacgccgccgtcaccgcggatgagtggctcgtgcagtcgctggccgactgaccggcaaccgttcgaaccatgaagctgtgtcctaagccaagggcacaggaagacctcaggggcctgcaccgtttggtgcaggccctttttcttcatgccgggtccacagccgcggcagcaaccgccgcaggctgttggcggcctgttgccccttctttgccgttctgtcgttcttttttttcttaccttttgcctccgtacgggtatgatattcggtccggcggtgcggcagcacaggctgccggagacattcgacgccgggggcatggcccaaatggagctggcggcatggaaaccatgttgaaacaccggactctgatcgacctcttccaaaaatccatggcggcagtcacctgccccgacaagacctgtgccgagattatcaacgccgaccgtcgtgaaacgttgactttcgggcaacttcagagccgatccgaagcctttgcccggaggctggccggctgtgagtacatcggtccgcaggaccgggtggctctggtgtcgaagaaccgaacggactgggatgtcgctctgtggggcattctgcgggccggtgcagtccccgtgctgatcgacccggaccgcggacctcagggcgtgatcgcgcacctcgaagccaccgatgcacgtgccctgatcgtggccgacgattatgcgaaccccgcagatcgggacgaactgacgacccacgccaaggccaggggattgcgcgtgattctcatgaccgaccagcctctgggagaaggcgattacgtgcagccgggagacctcgacgcgattcacagaacgatccgccccaacgacacggccgtggtgctgtgcacctcggggaccacgggcgatccccgcgaggtggaattgactcacaccaacctcatcgccaacctcgaaggctcgatccgccgggtggacctcggtccgcaggacatcctggggcatattctgccgccccaccattcgttcggcctgaccgtgggcaaactcctgcccctgttggcggcggcaaccagcatctacaccaaccgttaccgcgaagtcgccgacctgatccgcgacaggaagatcacaatcttcattgccattccggcgctcttcacgaccctggcccgcaagctcgaagacaatctcgaccgccagaaacagaagagccggatcctgcggctcctcgaccggttcgcgccgcggtacgtcggcaggcagatccgcaagagacaaggctggacccgccttcggttctttctgtccggggccgcaccgatgcctcgctgggtcctcgacaccctgtggaagcgaggcttccacatgtatgagggatacggcaccacagagaactcccccgtctatggcttcaacgagcgtctcgacaaactcggctcggtcggaaagccgatcgacaccctgtcggtcaagatcgtggacgagaagaaccgcacacaggccccttttcagaagggagagatctgccttggcggtccctgtatcatgaagggctactaccggaatgaccaagccacgcaggccgtgatccacaccgactcccaaggcgtccgctggctccacaccggcgatctcggctatctcgacgaggacggctacctctacatcaccggccgcaagaagtacctcatcatcctgcccggcggcaagaacgttaatcccgaacgagtggaaaccgccctgtcacaggcgcgctttgtcaaagaggtcctggtcgttcccacccggcggaccgatccgaacggtgtcatggaggagaccatgcgtgccctcgtgcagccggcgtgggagactctggaggactatacccatcgtccgaggcaggaactgctgtctgagcttcacacggtcaagagcctcgtctgggagagcatccgagactgccagcaaaacaacaaacacctttccggattcgaacgaatcgccgcacaccagcttgagatccatacaggcgaattcgccaagacctcgacgggaaaaatccgacgcgagaactacatggacctggaacacctcgaggccaaacacactcccgtcgtcggatacgtccgcgcgcccattcgttctcgcggccaggacaccgcaaccgtgtgacaggcgggaaacgcgttgcacggcgtgcatcggacggtataatcgcagccatagaatccggcgatgggttctccaccccatctgggtccaggtcccatcgaacaccgtggtgtcgtccaggcaaattgaaaggaggaccgcacaatgccacagatgcagaaccccactccactggaccctgtttcccaaaggatgagccgacgccggttcatgaccggcgcggccgcggcgtccctggctgcagtggcccctggcgccgttcgcacgtttgcggccaactccaagatcaatctgggcgtcatcggctgcggcgggcgcggcacgtggatcggcaagctcttcaaagagcacggcggatacaacgtcgtcgcggccgcggattacttccaggatcgcaccgaccatcttggcaacgaagtcggtgtgcctgcggccaatcgctacaccggactcaagggctatctcaagctcctggacaaggtggacgccgtggcgatcatcagcccgccctatttccaccccgagcaggccgccgccgctgtcgacgcgggcaagcatgtctacctcgccaaacccatcgcggtcgacgtccccggatgcctgagcatcgagaacagcggcaagaccgcccgacaaaagaaatgctgcttcctggtcgatttccagacgcgggcggacccgttttacagggaggcgctgcggcgtgtgcacgaggagaaagccctgggccgtcttgccttcggggaatgcacctaccacgcgggcgaccccttcacaggctactatgaaacctggaagtccgacccggacaaccctgagaatcgtctgcgggcctggggcctggacaaggtcctgtccggcgacattatcaccgagcagaacatccacacgctggacgtgatgaactggatcatggaggaaccgccgctgtgggcggtcggcagcggcggacgcaagttccgtcccgtgggcacctgctacgacaccttcagcgtactgttccagtatcccaacgacgtcgccatcacgttcagttcccgtcagtcgaacggatacggcacacagccggaaggcatccgcaaccgcatgttcggcaccgagggcattctggagaccgagtacggcgggcaagtcctcatccgcggcgaccacttctatcgcggcggcagctcgcccggaatctaccaggacggcgcggtcgccaatatcaaaaccttctacgacagcgttaccggcggccatttcgaaaacccgaccgtcgaatgcagcgtgcgcagcaacctgatcacgatactcggccgcatcgccgcctatgagaaacgcatggtcacctggaacgagctgatgagcagccaggagaagctcgacgccaatctcaagggcgtgaaggcatagagttctggacacctcgtgcgtgtggtctggcggaatcgccggggcatgcgcacgaccattcatggagatcgacgcgtgaacggacgaacgctgaaccgccgcgagatgttgaccggcaccgccctgactctggcgggattgtcactgacgacctcatgcgcctcgtcgggcgcaaagatcggcgcccgcaagaaatccgccggcttcaaactgggggtctgcgactggacgatcgggcgaaccacccagccggaggctttcgacgtcgccaagcgaatcgggctcgacggagtacaggtcgatttcggccgggccgcggaagagctgcccctgttcaaccccacactgcaacagagcattctcgaccgtgcggcgcagaaccagctcgaagtggcctcgctggccctgggcaggctcaacgacatcccgtacaagagcgacctgcgcgccgaacggtgggtcgagcgggccatcgacgtctgccaggcgatgaagacggacatcatcctgctggccttcttcggcaatggagacctcctcgacgacccgatcggagtcgatgccaccgtcgaacgtctcaagaaggtcgcgcccaaggcggaaaaggccggcgtggctcttgccatcgagtcgtggctcagcgccccgcgtcatctggagatcatcgagcgcgtcggctcgccggcgatcaaggtctactatgacgtcggcaactccaatctgaagggctatgacatctaccaggaaatccgtgcgctgggcaagcacatcgtccaattccacgcgaaggactacgacaacctctacggccggggctcgatcgacttcgtccgcgtccgggaagcgatggacgacatcggctaccgtggctggctcgtcatggaaggcacgaagatgccgctcggcgtcgaagagagctgccggtacgatgcggagtaccttcgaacaatctttccgcccaaggcctgagaagaccaccgcgaaccccgaaggggagaaaggcaaatcggactatgaaagcatgcaacggcaccatcccgctgactctgttcgtcgtctctctggctgtcgcgacgccgctggacgactacgtcgccaaacccgatcccagctacagctacagtctcgtgcgcacgatcgatcacccgcagggcaagatccatatcctcgatctgaagtcacagacctggcgcagcaagaacgaggtcaaccggaccgtctggcaacactggctgacgatcgtcgtacccaacgacgtcgcgttcgacaccgccctgctgtggatcacggggggcagcaacgaccgtccggcgccgaccatgcccgacgacatgctcgccaatatcgctctgcgcagcaaatcggtcgtcgcggaactgcgcatggtgcccaaccagccgctcgtgtttccggacgacccgggcaacccgcgttacgaagacgagatcatcgcgtacacattcgaccggtttctccgcaccgaggacccgacctggccgctgctgctgccgatggtcaagagcgccgtccgggcgatggacacgattcaggatcatctggcgaaagccaccggcggcaagctgaccatcaagagcttcgttgtctccggcgcgtccaaacgaggctggaccacctggctgacggctgccgtggacaaacgcgtccgggccattgcgccggtcgtgatcgacgtgctcaatatgaacgagcagatgcgccaccacttcgcggcgtacggcttttattcgcccgccatcggtgactacgaacagatgaagatcttcgaccggctcgactcgcagggcggcacggaaatccgcaacttcgtcgatccctacgagtaccgcgaccggtatacgatgcccaagtttctcatcaactcctcgggcgaccagttcttcctgcccgattcggcccagttctatttcggcgacctgcccgaagacaagtacctgctctattgcgccaacaccgaccacggcctggacggctcggaggccgacaaggccctgctggtgtggtatcagtcgatcctcaccggccgcgagcggccgcagttctcctgggacaagcccgaagaaggacgccttgtcgtcaccacacggacccggccccaacaggttcggctctggacagcaaccaacgccgaagctcgcgatttccggctggagaagatcggcaaggcgtggaccagcagtccgctgaccgcgaccggctccggcacgtatgacgtccgcgtccctgcaccggacaaaggctggactgcgtacttcgtcgagatgctgttcgactccggcacgccgattccctaccgtttcacgaccgaggtgcgcgtcgtgccggacacgctgccctacgcggacaagctcaagggcaactgacaaatccaagcgtcagagaaagcacggtcgaccgggtctcggccgaccgtgcccgttgcggtctatttctcgttgccccacaactgggcgccgttgccgtggttcttgcgccactcgtcgcgccagcgatggatatcgctgacgccgatgaacgacttgggctgccgtgattccttgccgggtatcggcgcgagtctctgaagaggcggcgcctggtaccagtacgccacgctggccatgtcgagcgtcaggttgttgtcgtgcccgtgctcgatcgtgaacctcagtgacgtattgaaatagatcggatcgctgatgtggaagcggtacgcatgggtccggcccagccacccgatgtcatcgttgacgcgggcgtatccgaaatacggatgcgtgtagatcgtcttcggacaccaggagccgttgaagtaatcctctgtcccggtcccgtggagcgtgggcctggtgtctccgtcgatgaagaccatgtcgtcgccttcgccgtaccacatcggcgtcgggcaatgcacgtagtagttgactccgacgaagtgtcccttgcccttgacatcgacaatcaggtaattgtccttgccgtcggggttgttcccctgcgggccggtcacgccccactcggtttccccttcgggcggcgcctcggtcagctcatgattgtaccaggcgcagaaccggcccatgtcgtcgggcagcgcatcgacctcgacgtagtccacgaagtagtagaatgcactgatctctcgtcccgtctggttctcgatctcgatccgggcgcctttgtcaaacggcatggcgaagtacgacaccatcgcccggccttccaccggaccgaccgccagcggcaggctcacgaacggatagctctcgttccacccctgcccgaagaacggcccaatcggggactccaccgacgggaactcgtttccgtcccagtacatgcgaaggatgatgtcgttacggttcagttgctccggcggcggcgcgattgtaatccagatgtgattgatgatcccggccccctggacattgaacagttcgcgtttctgcccgtccgcgatgtgctcgaagcggtcgttgttgcctcccgagcggtcatagctgctgacccgccgggtccgcatgccgctctgcacgcgggcgagcccgaacagatcgctgccgtgccccaccgcagccggcgaaggcgactgcgaagccaacaggaccgcgacgagtgccacagaaaggtgcttgctcatcttcgtgacctccttctcaattgagatgccctgtgccggaccgatacgcgtcccatacccgcgccagtgcgccgcagcgtatggaacggaccctgggcagtataatgcccgtgtcgttcctccgccaaataccgttccggaaatctatggacagcccagccgcaggtcactacgctgtcgtccacgatccgaggcccggacagaccgcttcagaaccggacgcagcctatggcacaggacgacaggcaggcgagtgacttgaacattccgaccgctccgaagggactgggcatcctgctcgtggtgggcccgagtatggtctgggcggccgagtacatcggctcaggcgaggtgatcatcgccacccgcacgggcgccatcctcggcacggcggtcctttgggcggtaatcctcggagtgttcctgaagttctggatcggcgtggccggcgcacgctataccgtctgcacgggcgaagggatggtcgatatgttcgaccgcatgccgggcccgcgtcactgggtcgtctggatcgtcctggtggttcaactcttctgcgcggtcatgtcaacaggagcgttggcgacgtcgtccggcacgttcatgcacagcctcctgccgcgtattgacatgcggctttgcgggctgttcgccgccctgttcgccgtggcggtagcctggtccggcgtcttcgacgtgctcaagatcttcatgagcttgttcgtgctcatcatcgtcatcggggcgatgtacatcgcctgccacgtgttcccgagctttgccgaactggccgccgggctgaccggccggcttcccgccgtacccgaatgggctcgtgccacggagagcgttgagaacagcgcctggcaggaaatcctgcccgtcctgggttggggcgccggcgggttcgcctcccaggtctggtacacctactgggtgatcggggctgaatatggggccaccgccgggcgaggctatggcaaacccgccgacctcgccggcctccgcgcgatgtcccgtcagacggcgcagcgcatcaagggctggtgccagaccctttatgtggactcgagtctcgccatggtcctcggcatcctggtcaccggcgcgttcctcgtcgccggcgcgggcatcctgggcgccgaacacatggtccctcggaacgacaacatggccgaggtgctctccgaaatcttcgcccggcgatgggacaagaccggcggctttctgttcaaactctgcggcgccgtcgccatggtctcgaccctgatgggccagttggcgggctggcctcgtctgctggccgattcctgccgtctctgcattccgggtttcaacagaaggttcgcctggaagcgacagttccatatcttcctggtcttgttcttctgtacgagcacgctgattgtctgcgtgttaggtgaacagccgatctccctgttgaaaatcgcgtcgattctggaaggggtcctgctgattgcccttcaggcggcagcggtcgcattcggactgttcgtcgtcatgcccaagatgctctcgaacgaggcgtgtcgtatactcaagcccggctggatctttgcggtcggactgctcggcacgctcgtgttttacggctatctctgtgtgacccaggtcccgcaagtcctgctggaaattcttggcctggccggctaagctatgacgttggcgacgggcaccagctcgttcgcgaacccccgttgacccatggagggcagaattttgaacggactggatctctcgaccgttttggcggcgcaggcctccggcggtaccggcgcagctggccccctgctcattctgttcgtcggcatcgcgatcgtcatcggcatgatcgtggtgcttcgcgtcaacgccttcctggcgctgatcgcggcggccacggtcgtcagcctgttggcgccgggcgaattcagcaccaagatcagccgcgtcgccggcgagttcggcgccatggcaggaaaggtcggcgtggtcatcgcactggcggcgatcattggggactgcctgatcgcctcgggagccgccgaccgcatcgtgcgcatgtttgtccgcctgttcggccaggagcgatgcgaggtgtcactcatggccagcggctttgtgctgtcggtcccggtcttcttcgacaccgtgttctacctgttgctgccgctggcccgctccatgcatcggcagacccggaagagctacctgctcctgatcctggcgatgggcgcgggcgcctcgatcacgcactccatggtcccgccgacgcccggcccgctgatcatcgccgagacactgggtatcgacctgggcacgatgatcggcataggcctgcttgtctccattccgaccgcggtcgtggtcctgctgctcgtccgcttcctggcgagacggatcgagattcccatgcgtgccctcgacgggtcgcggaccgagtctgatccattgccggacgacacattgcccggcctgcttctgtccgtgctgcccatcgttctgccggtcctgctgatcaccctgcacacggtcgtttcgtcgctggcaaaaaaagcaccgccggactcggtcctcatggagatcgagagctacaccgccgtactcggcaacccgaatctggccatgatgttctcagcggcggtcgctctgtacattctctggcgtcagcgcaaacccggccgcgaaggtctcgcccggatgatcgagacttcgctgatgagtgccggcgtcatcatcctgatcacctcggccggcggcgccttcggcgccatgctcaaggaggcacagatcggtccggctatccagaacctgtccctccacggcggtgcgcaactgagcggcctgaagctgatcttcatgggcttctttgtcgccttcctcatcaaattcgcccagggaagcagcaccgtctcgatgatgacgacctcggccatgatggcggcgctgattccatcggccaacgtgttgggatatcatccggtctatctggccgccgccatcggcttcggcgcccagtgcggcaactggatgaatgattcgggcttctgggtcttcgccaagatgggcggtctgacagagatcgagacgctcaagacctggacggtcacggtcagcagtaccgccgtgatcggcctgttcttcgtgaccttgtttgccatgtgcctgccgttgacatgaggtgacagattgaaggcattgctctataccgagccgtacacgttctcctatacggatgtcccggaccccgtggtgggcgacgacgacgtcctggtccgggtcaaggcgtgcggcatctgtgggtccgacgtggccggccacaccggcaagacgggccggcgactgcccccgctgatcatgggccatgaggccgcaggcgtcgtggagcaaaccggcaggaacgtcacggacttcgcccccggcgaccgggtctgtttcgattcgacggtctactgcaacaagtgccctgcgtgccggcaaggcctgttcaaccgctgcgtccatcggcaggtgctgggcgtctcggtccctgagttcaagcgaaacggggcttttgccgagttcgtagccgtgccgcactggatcgtcgcgaagctgccggatgacatgtccttcgttcaggcggccctcctggaacccgcctcgatcggcttgcacgccgccggtcgaaggccgatcggcgacagcgacaccgctgtggtcatcggcgccggcaccatcggcctgttcatcctccaggcggccaagctccgcggcgccaagcgcgccatcgcctgtgacatcagcgagttccggctggacctggcccggcaggtcggcgccgatgagtgcatcaattcccaaagcaggcccctgaggcaggccatcgccgagctgacagacggccgcggcgccgacatcgtatttgaggccgtcgggcttgccgagacgtttggcgaggccattgcgatcaccagaaccggaggcagcatcgtagccgtcggcaatctggccaaagagacgccgttcaacctccaggaactcgtcagccgggaactgaccttcaccgggtcgtacgccagtagcggtgagttccgtacgtgcattaatctgatcgcttcgggccggatcgacgtcggccccctcatcagtgaggtcctgccgctgaaagacgggccttcggccttcaaacgcttgctcgaaggcagagaaaacctgctgaaaatcgtcctggaaccttagccacggagcatgagcgaatggaaaaccttttcgatctttccggaaaagtcgcggtcgtcacgggagccagccggggtctgggccagtacttcggccgggcgctggcgcaggccggcgcggacctggtcatcaccagccgcgacacgtcgcgactttcggaattccaagcggaaatcgagaggctgggccgcagagccctgcccgtcaagctcgacgtactcaatgagagcgatatccagggcatggtgcgtgcggccatcgccgagtacggcaagatcgacatcctggtcaacaacgccgggctgaacatccgcaggcctgccgccgagttcacctggaaggactgggacaccgtcctggacacaaacctcaagggggcgttcttcgtcgcccaggcggtcggcagggagatgatcaaacgccgatacggacggatcatcaacatcggttcctgcacgtgcgtcttcggcatggagggcatcgggccctactgtgccagtcgcggcgggattctgcaggtcagccgcagcttggctgccgagtggggccggcatgggatcaccgttaatgtgctggcacccggctggttcaagaccgcccagaacaaggtcctctacgacaacaagccctgggtcgagtacatcaccgaccgcatccccctcggtcggcccgggcagcccaaggacctcgacggaaccgtcatcttcctggcctcggacgcctcggcctacgtcaccggccagatcatcctcgtcgacgggggcttcaccaccggcgcgaccaaggccatcgtatgaatgaaatcgagcggccggtgatagaaagccggcacttgtgcgtctgtaaggataggactttcccagacccacgcatcgactgggaaccggctccgcgcggaaaggaacggccatgtggacatcgaacaaaatgatcgcgttgtacatcctcctcgccctgctcggcgtcggggtgggcgcgtggttgctgttgcgtcacacgctgcgcagccggctgcgtatgaagaagctcctcgaggccgatcccgacatgaacgactggctcatcgtcttcggctggacgcctaaggtcctctacgtccccaccatggccgcttccctgctggcctcggtcctgatgttcctgaaggagaccgaatggagcgtgctggcctcgatcaatccgcgggtcatcggcggcgtctggttcgcgatcttcatcatcaatctgatcatcgaagagtatgacgtcagcatcaaactgctgatcatcggcgtcatcgggctgggctttctgttcctctggctccatctggtcggctgggtgggcggattcctgcggatcttccgccacctgggcttctcgatcagcgggaccggctatctcctggtcgccctcatcggactgctgacgatcttcatctcctgggtacgaggcctgttctactatgtcgccatcacgcccaactacatgaacctccaggagggaccgaccgaaacgggcgagcagatcagccgggaagactacaacacgcgaatcgacaccggcgacttcgtcgaacggctctttggcttcggacgcatcgtcatcacgttcaaggagaaatctcgcctgccgctgactctgctgacctggaacatccagggcaaggcccagatgctcgaacgcgtgcgggccaaatatgcggtcgaccttcctcaacaccatccggggcctgtgtttccgccggccggccccccgccgatcccgccggcgaatcccccgcagccataggacgcatcggtatgcccatcggcatgcccgagccggttggattctttgcacgcgacgcgccaatccacatgacggcaatgggcgatgcaagggccatcgccagatcgatgtgcccggtcccccgtggaggtggattgcgaacggatcgatgccatcaacgcaggcgatgcggacgccttcgagcggctctaccatcgctgccgtggtcgggtctactgccttgcctggctcttcacagccaaccacaaggacgcactcaacgtcttgccggagacgtgcatcacgcccgccgatgagctttttcggacctgcaaaaaaacaagccgtttcaccaccccatctgcgttaccgccgagcgtccagcggcctcttggaaatggagagccgagaaggcattctcccgctgcaaagcagcacaggcaactatgtacgggggtgatccgatgcttgagagatatcgcgaagcacacgatctggtgatcgattacggcgaggcgctgcgggaaggcagcctgccgacgttcctgaaatcgctctcgcggttcgaaggtcgggaagtgctgacgaccccgagcttctggcacggggccgagatgatgcggatcgtcaacagcatcgcctttgccgacgacgccaccatcccgaacctggatattttcctcgctcgcgttcacgcgagaatcagctcacgggcccgaaaggccgaaaccgccaagcaggtccgacgcaggtcgaacgtgcccgatcagaacacgcgccagtagaacgaacaaaagagggctgccagtcccccggatatgggaccggcagccctgtgaatgaccaacgagaatcgagtctcttacagcgccttgcgtcgacggaaccagccgaccatacccagccccaggcttccaagcagtgcggcgccgggagccggaacaaccatcgtcaactgatcctgtctgaagtaatcggcctcgccgacgtggccgggaacatacatgttcagtacccgcacgttgccgatgtcggtccagccggcttccactgccgccgcgtagaactgatcctgcaacgagccgtcgccgtcggtccacgtcttggcggcctcgtcttcgatataccagatcacgtcctgaagcgccccggccgaggcggcgcgaccacccagaggattatagtcgtacccgaccagcgtaccggcacggaactgcgtgtacagataggcggtcatcgggtccagcaggtctcctccctgtgggccggtcgccccatagttcgtcccgccgtacagcgcctccgtggctaccaccacatcatacgccgttccgatagacacatgctcgctcttttccagacagaacgaggagtacggggcgacttccgccgtgatgctctggaggtccgcattgggatacaacaggaactcgcccccgctgccgctgtagtagcccgaaacacgcgtcaagtgaaccgacgggcccgccaaagccgaaccagtgacgagcagacaaacaaccgatgccaatgccagtttcttcaccatttcatcaccccccaagtactatgtgtttttcgatacccggtgtcacagggtcattgtagtgacaggagggctgatcggatcggctttgcacatccggagaaaccggcagcacagaattgcaaagcaggatcaatgaacaccccccagtgtcattccccacaccgttgcttattcagcatgtagtgtatcgtgtttcttcgttaatgtcaacggcgggatcggcacagagcaggcttttcgctcgcaggcaccttccgaaactgagaccaccgtgattatgggagcccatgcggtcgtttcttcgatttttttctgcgcggatgcgtaagacgcgtcgccgcaagaggtggttataggacggcgtcgcctgtagtcgtcgcgacgacacgcgtcagttcagcgctccgggggagggggttgcggcctgccaatgggccgggtcgttgccgtacgaggccacaggggtccggtgcagcgacaggcctcgcccgtccgcctcagccggccacgaatcaaccccctcgcccaaggcccccggatgcgaaccgtcgccgtacaccacccgatccacccgaatccagatcaccgtgccgtcgtcggccaccgcgccgggcttgctcagctccatcctaccgccatcgtcaggcagcctgcccggcccccagggcaacagcggaacccccgacacctcgccgtaggcgatggcaaagttcagccggtccttcaccagcagcagatgcccgccggacgccaacgtgatcggcggatcggacgggaaacgcagatcgatcctcggatcatccgggtcgtcggtgaaccgccacggaatacccagcgctgcatcgtacagcgtcacggggccctcgctgatgttcagcagctcaacgtactcggccaccggcgtctcggccggatggtacatgatctcgctgatcaccaccggaccgacccgcggctcggcgttcgccgctcccggcgtcgggacgctcagcgatacgaagtggtaccctcccgtgctctggcgatgccggcccagcgggacgccccgctccgaggcgtcgaactgctcctgcacgctgtagcccgtcagcaccccgtcgacgcccgagtgcaggtacagcgtctcaccgttccggctcagtccgaacggaacccgacagcccggatcctcgccgttgtcaaacgtcgcatcggcctcgaacaccagatagccgccggcgccgagcaccgtacccgaggcgatctcgtaccgcctccggtcgtcggcatcgtcgctgagaaaccagccgcccacgtcgatcgcctcgctcgtcgtgttgtgcagctcgatccagtcacaggccccgccggcgggattggccaggatctcgttgatcaccaccgcccccaactccggaacaagccccgcatcgtcatagccgggcgagccgccggcttcggcgctgggacgccagaaacttttctcgtccagcgtctcccttccggccgtccgagggtcccgcactgtcagtgagaagcccgccccatcggtcagatcgtaccagtcgtcctggtaacggaagtgctggatgacctgtccggccgcatcgcgcaactcgattcgctcgcccgcgttgtccagactgccggcatactgtccggcgatactccctccgtcgccgtacgccgcttcgaaggccgaccggtcgcgaacgaccaggctgtaggctccgggtgccagctcgatgtccgggaaggtgaagtccaccccgtcggtgaacgcgacgagattcaggttgatcgcctcgcggccgacgttgaccagctcgatgtactcggcgttcggatcgagcggatggtacatgacctcgctgatccgcagactctcggccaccagcccgacactgaacgtcgcctcattcaacgcactccacacaccaccctgcaacgagcgcgccatgacgtgcacgctccgactcggcgtcagcggctccgtgtagcggaccgccgccggcgagatcccgctcggaaccgccccgccgccgccgatggtcgaggtcaattccacagagatcaggaaatcggaactggtaatgccctgattgagcccgtggatcgccagcacgttccggcccagacgaagctcggcaatcgccgaggagatgtcgaacgtctcgaattcgatggcatcgaggtcggagtggcttccggcagcgcccgagttccacgacggcgtgccgtcaaacatagcccgctgtacttcgacaccgttgaggtacgcgacgaacccgtcatcgtagcgcacgcgcaatcgcagaccgtgggcctcgatcaggacctccggcgtcacctcaaacggaatgcggatgtaacagctcgcgttatgcccgtacatggcttcctgcacatcgatgtcaaacaactgctcatagcccgagctgcgctcatagccgacacctccggtgccgtgggtccaggtcgaatcgtcgaaatccacgctgcgccaggcgtcgccggtcgaagccacagggaccagaaccgccttcggcgcatcttctgtcacgaaggcgaactcgtcacccgtctgcccgccggaaccgggcgttcggggatcagtcccatccatggtgtaccagatcgtgccgaagtcgcccaccagcgacacggactggccggaggcgacaggccccccgtgctgaggcacgccgccgacatgaaactcgggcggttcaatgtttgggtagagacctgcgctccgaagccaactcaagacctggttcgcacgattcggaaagtaaccgctcagcttgctctcctgcgtcttgagccagtcctgttgcgtgtaaggacgggactgccggttgtcgccccagcgggccgactcgcccacgatagcacgctcgacctgcttcattctggcgagaaaccggtcggccgatgcggggtagctcagcggaccatcgtgaaagaagtgacggtagatctgatcggcgaagcgaaggcggtattccgcattctgcgcaagcttgcggtgaatatccgacgggctttccccgacgtcgtttccaccttcaagcacgtgctcggcgtcccaggagtggaagcgccacttgccgccgggagcgttgcggtgcgtggcataccagttcttgtgcggccagtcatggttgcccgtataccagttcgccagcagataggtgatgaaatcgtctatgtcgagttgtccgcacagagcatcgtatgcccccaggttgtctggatcggcggccaacgcgtttgccgccgccagcatggcgttgtagttggccgaagcgctaccgtccgcgccgctgttgatgacgctgctgccgctatgcttgatcgcgtcgtactcgtcctcgtcgccgccgaacacctgggccgcccaggcgtggtcgggacgctcgtggatatagtacaagccccagtagaggccgttgatgtacaggtgggcgtatgcgccgtggggcgaatgcccacccatggcgttgtgcagatcggcgatgtactgatcctgaatgtagatggcggtgtcgcgctggccgctgtccggatgcagccaggaatgattcagcacgctgtcgagaaccacggtgttgtagcattcgagaggcgagtcgggaaacagccggaagtcgagcttgccggggccgccggtgggtatgccgtcgtcggtccgcgccttgaatcgcgggcgcatggagagcttgaacgtcttccaccggctgaggctggtcccgccgccactgacgccgccctgcatggcgatcgcgcagttgatctggaagccttgggcgccgttcggatcgatgaactccatcgacgcaacgcgttcggtgccgtcctgcgactggttgatgtagattcccttgttgccgaaccagtcgtccttgttcatgaccagggaaatggtcgggaccgccttgaggtcgtcccggatggaatcggcgtagagaccgccgaagatgtccttgccgccctggcccaccacgtccgggtccatctggtagtcgcctgtcaccgaaccccacgaggtaggatacccttcaggtgttacctgggcccctgtggaaggatgcgttgcctgacctatgacgctttccagaaagacgtaggtgtgcgtctcaacgtcagtagccttccagccgggccgaaatgccatggcccttaaacacgttgtggactgaatcaggatgggcccgttgtagacgctcccataggtcggcgtgggcgtgctgccatcgagcgtgaaacgaatcgtagcctgtggcgtggccgtcgtgatgacgacctcgatcggatgatcgtagaagccgcgatcgtggttgaacaccaaatcctcaaccacgggcaggccctttccgtcgttcgacgcgccgggcgtgggcgtcagagtaacccagtcgttcgagccgtcggggtcgcggccgaacgagacgtcggcccgctgccggccgaagcggacactgtcaatcagagtccctccatcgcggtcaaacagggcaatccggtctccacttgcgttaagggccagatcggcgtgcaaacccgcatcgccgacgtcgccgtcggcccagaccaccaagtacccctttgcagggatgacggtgccggccggcaaccgccatttcgtcgggtcgtccaggtcgtccgtcaggtacaggcctccgatgccggccggcacatcggcggggttgaacagctcgatccagtcatcgtagccgccctgagggtctctgacggccagatcgttggcggccatgatctcattgatgcacacatcggattgggccccgccacagaccgcccccaggaacgccgtaaggattaccagacacacaaatcgtatgcgcaagagcatgacttaccgtcctcaactgagggtagtcacccgccgtccatcagtccggacaccccgcaatcagcaggaggttcacttcacgtattgtacgaaaatggtgcctccgggtcaatttcaccctcgcgacggtgactgtcaaagccaagatttgacaaatgccacacaggagttgatggtgtcaatctccggctggcggtctgttcgccgggccggctgcaggagttgtccaattcccgcggaaccagcgccgttccgatcttgctccgcgtcgaaacgaaccctcctggaagccttccatgaagccggggagaaaacgaaatacgttgtcacgcgataacgtgcacggagtgactacctgccgacgcaggctcatcgatgatccggcgcgcgggtcttaacctctggccccggaccttcgagaaccgtagatcgtccagggaaaccgaactgaccgaggcattcccgcttcacgtcgtcagcacgtggaccgccaattcggctttgatcgcggcgaagcactacctgcaagtgacaaacgaacactttgagcgggccattcaagacactcggaagccggaattgaccaccccagaagcggcgcaaaatccaacgcacaggatgcacgcgacgcaaattccgacgtcgccaactgccgccgcacgtcgccacatgccgcacggaaaccgcactggcgcccctaaaaacgatgacaggcgacttctcgcgatatatggcgataacccgtgagaatcacctattagccccaaggggattcgaacccctgtcgccgggttgaaaacccggtgtcctaggcctgcctagacgatggggccgaccgtactacagacttattgctccaacggggcaggcatccacacaggccccgcaatcgatgcaggaatccgcgtcaacaacggctttaccgcccgccatgctgatcgcattgctgggacactcatcaacgcaggtctcacatccggtgcattttgccttgtccacttctgccggcatccagctaccctttcaaattaaggaccatgactctcatcagaaagcacagaatgatacctaatcctcgcacaaatacaaaccaaaaatccgcgtaaaaacagggtatagttcggtcggccctgatgccccctttctacgggtatcctgagcctcgtcctgcggaccaggtccaacgtaccgttgtacgacaaatccggggggaggttcccggcagatcgaacagaccggaagcagaagccacggctgcatgcgaatgcttggggacatcagcgggctggcgggaggatacccggcgaccaacccgatccaagcgaaatcttcggcctgcgcccctcccccagggccgccgccatggcacggaccagatcgctggcatccgacccggccatccagtccagcaccctgtcgaattcgccgccctgcgtgataccgaggagataggcggccatgagacggacgggccattgggggtgatggaggttccggcccgccgccgcggtcagttcctggtcgagcgacatcgaaagcaggtccgccatcgcgttgatcttgacgacccagtcccgctcgtcctggctcagcagcagccccgactccttcaacagtgccgagcgaagcagctcaggcaaccacgcggcataccgataggggtagagcgtgccgtgccgggccatggcctgctgctcgcggagcaggccggtgaacaactgcgaggtccgcaccttctgagcttcctgctccgacgagagggattcaactcgactgcggacatacgcggcggtcacgtccaattttggacgcttgacagcaatcgtcaccggctcgatatcggcaatcccgttgcggatgagcccatccggcatcgtcacagggtcgagatacagcgtgaattgaatctcgatgttcgcttggggatagtccaacaggatctgtcgaagcgggccggtcgacaatctcaatgacatgctcaggctccggcccgtctgcaccgtcagggcggtgcgaaccgtctgcgtcaggaggttggggatttcccgttggatgtctccgccgacatgggcgtctatccgaatccggccggtgaacaggccattctccgtgaccaccaggggctccgccccccgattcacgatcgcgacggtagcgtcaatatcggtgccatagatgaattcactgccgcgagcagcgaactgcacttcgagcctcttggcgggcggcagaaacggggggacgattgtctgcccgatactctgatgcaagtatgtggtcatcgccaccggatcgacaggcgggatgtactcgctgccgatcgtcctgagaatctcttcggcctgctcggccgccagtgatccagggtccttgcctatcgcggtacgaagcgtggagatggcaccggccttgtcctgctcgagcagctgaatctgagcctgtacgatatcggcgacctggttgtgctcgaacgactggagtacaggcttggcccattcgatctgggcgttcatgcctaaggcatacgcgagcagcgccccggcctccggtgagttcggctcgaccgagtagctcttgttggcccaatccagcgccttgaccgggttcggatcggcgaagcagaagaaccaggcaaggtccctggaagtcaacggtcgcgtcagcgtgattccgttggactggccctgtcccactgagagcatccgctcggcgtgctgtccggcttgatcgagcagacgtctggcttcctgccggtttcccatccttacggctgctcttgcggcggtcgcctccaggagaagatcgagctgcccctgcctgcgaacgctgtcggcgatctgcaggcagatcgcctgaccgccttcggcgcgggagcaggcggtcgcccagggcagatagatgccgggcggcagcggctcggtcgggtgctggtagcggaacagttcggcgctgtagcggaaggcctcggccgcaacctcgtgaaggccgagccgctgggcatagagcgcaaagttccggaccgcctcggcgtcgagcggcttctcgcggaacgccagtctcagatgctcgaggaaggcagcagggccgatctcgttcggcgctatttccgccagcttcgcgaaggccagcgtattgtacttgttgctgttataggcctggaggaagtagaaccgggcgcgttgcgcatcggcctgctgctgcatgagcaagcccagcgccgtggccaattccgaatcgactgccgcattcttgttaccgatccgccggaccaggtcttccagcagcctccggcgaccgtcctgggttacctgtcgcgccaggaggtagcgaatggcctcggtgacaaccgcacggtccgcctgctcactcacatagctctgcagagcagtcagaacctgtgccgagtagtccttggtggtggaccgggtcgccaaccgcaacagaagcggttcgatgcccgatgcctgggggtccagacgcttggcggcaatcaggaagactaccgcctggtcgatcacgggcccgtccccgtcgagcccatgcgtcaactcccgggcaatctgtacgaaccggtccgcggcagacgaggatcgcagcccgtccgccatgtcggcgcgcggcgccaccggaggtgagccggcggtcggccacgaagatgacgtttgcgcgcagaggtcgcaggccaccagaaccacagtaaggagggccacgaccgacctgtccctgaacatccatttctccttgaaggcatagcacaggccttgtgtcaacagggtatttcgggcgacggccttgcccgctttagataccatcgccacagaaaccgcggatttcccatcctccgggcgcgtgcaggtcccataaactcgcggcggcgactcgcggcgattcgatcgccccgcgtggaggtcgcctcgaaacaatcagggcctggtcgcggcctcctttgcccgcctgcctcccagcagcagcgagagcatctcgacatggaagagcttcgaagccagcagatagacgccgcccgccaggggaactgccacgcacaattgaagcatgacgccgcggtaacgcagcgcgtacagcgtaaccagcagaacaacttccatgcagacggtcacaccgatcgtctggaagatcgcccggccgactccttggaggatatccggacccaactgtcgtctcagcacagtcacgaggatccccacttgaaggtacgagcagatggcggtcgcagcggccagtccgccacacccgaggaaccagaccagcgtcaggttcaaagagacgttcaccaccaccgcaatcgcggcgctcctggccggcacattcgactgctgcagcgcatagaagactcgcgtcagcacctgctgggcaaaatacccgctgagcccgagcatgtagaatgccagagcaaaggcggtgcccgcggcgtccgtcgagcggaactgaccgcgttcaaagaggacactgaccgccagctcgttgatgagcaccagaccgacggtagccggaagcgagatgaacaccgagcagcgcaaacctcgggacaccgttcggcacagagacgccagatcgttccgtgccgcgtcggcgctcagtaccgggaagatcgccgtcgccagagagatcccgaagaccccgagcgggaactgatagagccgctgtgcatagaacaattgcgagaccgctccttcccacaacggatagtcgattcgccatccgaacagcgtaaagaaactccctttctcggccgagccggacagccacagggcaatgaagctgtccgccagtgtgttgatctgcgtggcggccaagcccagcaccatgggacccatcaggagcaacacgcggcggaaagcatccgagcgaatgtcccacgccggacgcagacgaactccgcaggagtgcagcgggggaatgtgcatcgcgagttgaacgaacccggtcagcagaacggctccggccgccagaaaggcctgggtccgcgccggaaccttcagagcccatccgccgaaacacagcgccaggatcagcagcaggttcagaacgatcgaagaagccgctggcgccgcgaaatgccgatgcgtgttcagaatgccgcccaggattgccaccgtacagaccaggatcatatagggcagcatcgcaccggtgagaaacagtttcagacgcgtcgcttcgtggtccgacagcgcgtaaagaatccagaccagcgtctcacccataatcacaatccctgtcagcaggacgaacacgacggtggtcgccgtcattgccagacgatcggcccgctggcggtccctctccagctcgtgactgtagaccggaatcagggacgaggaggcggcgccctcaccgaagagacgccgcgagaggttggggattgtgaaggcgatgacccagccgtccatgacaccgccggcaccgaggaagaaagcaaacaccatatcacgaatcatgccgagaatccggctgatgatcgtcagcagcatgatctgtcgaaaccccttgatcaaaacagtccctccttgaacggcgagccttgctactcgcagactatgcctcgatgccccgtcgcggggcgacactgaacggtcggcaccgaccgacgttgttcaacaagccgaccgccgtcatgttgaccagcaggctggagccgccatagctgacaaacggcagagtcagtcccgtgatcggcatcaggccgagcgtcatgccgacgttgatcgccacttcgacgacgaacatggagacgatccccatggccatgagccgcccgaaggggtcggtgttgtggaccgcaatctccagcccgcacgtcacaagcagaacgtacaacaacaggaatccgacgcagccgatgaaacccagttgatgcgcaatcaccgagaagatgaaatcattgtgtcgttccgggagaaaatcgtacttgacgaaaggcccccggccgtagccggcgccgctccagccgccggacgcgacggcgaacttggaccggatcaggtgatagccccattcattccgccaactgcgttcggtgaactttcccccgaccagaagtcggccgagggccgggttcttctccgctttctcacgaacccagcggctctgaagcagcacactgctgattcgctcccgctggtagggcttgagcatgaaccacatggccggactgacagcgaccgccagcagcacgatcatcgccagatgcttgatccgcgcccccgcgacaaacagcatcgtgaacagcaccggcatcatcagcatgaccgtgcccaggtcgggttcgagcaggatcagtaccatcggcaccagcgtcacggcaaacggaccgaccagggcgcgaaaccgactgtagttgctgcggaagcgcagataccacgccaacgccaggatataggcgagcttgcagaactccgacggctgaatcgcaggcagggagtgtgagccgatcgtgaacacgatccagcggtatgcccccccgcgctggggcacaaacgacagcgagacgtacttacccagcaggatcaccgccagcagcacgacggtcatcaggtagatccagtggctggcggccccgaggcgacgatagttgacgagattggcggcaacaaagcctcccgcgccgaccacggcgaagaccagttgtttcttccaatagccggccagcttggcggcatcactggccgggcttggttcgtcggggtgaccgatcacgtagatagtggcaatcccgatcccgatcaggctgagcatacagactatcaggcagatccggacgggtaagagccgccccttcaagaaattacgcatgtcctcagcataccacagggtcttctctgcgtacagccacagcaggcgaaatcgctctcgatacgcttgatgacggccttcgaatcagcctgcctcaagccgctgaaaccccgctttcggcgaggcagcgaccgggctcggattcatcctccggaccgttgccttgcgttcttcgtatctcagcgtccgttctcttgattgttccgcaggcatccgcaaccgtccggcgcgtcggtagaccccggctcgccaaggcagggacgtgtggtattttggttttgatcttgattcagacagccctttttggtacgctacggtaggttttccaggtccgttggaccagcccctgtgggggcagaccgtcccgtcaagcggcgggaaaggaggagcagagggacgtagagcaccgctgttatcggtctttcccgcgcggtggccatatccttggccgcgggggctgtcggtccgtctcagaggcgtccgccccggcggaaacgcgaagaagaagaacaagagcggacgaaacaaagccaaggtggagccggtggtgttgggccggaagaagaagagaagagaaaggaaggtttggtcatgaagaggctgagtctgttgctggctgcgctggtgcttgccaacccggccctggcggccgtaaggatcatcgtcgagcccgacgggaacacggcggcgatcaagtacgagacggacggggagatcgtccgggcctttgccctggatatcatggtggacgccgggacgatcatcgggatttccgatttcatccggggcgaaagcaccgccgagaatcccggctacggcatcttcccagcaaatttcggccgctacatcacggtcaacgccgacacaggggaagtggccacttgggatgtggatgattacaccccggttgccgacccgtgcgatcctggagcgctgggcggactgggcaccgatggtatcacgatcgagatgggcgccctgtactatccggccgaagacaactcccccaacgccccgggcaccagcggcacgctgtgcaagctgaccctcagcaccaccgccaacgtgacggtgagtctgaacgaggtccgcggcggcgtcgttctgacggacccggatgtggccgccacagtcgacatggtccaggcctccgccatgaccgtcgttcccgaaaccgaactgctggccccgagccatcccgattacgccgaatgggtcgccgtgggcaagccggcctgctgggcataccccagacagtgtcacggcgacgccgacggcgtggccgaaggcagtgcgagcaccggctactcctatgtcggcccgcaggacctgaacgtcctggtcgccgcatggcaggtcaaggagccccccttcggcccggggatcgcatcgatcgagaacggcatctgcgccgatttcgcccgtgacaaggagggtagcgaggcgaccggtttctatcgcgtcggcacgacggacctcaaccgcctcgtagcgaactggctgatcaaggaggcgccgaaaggcgccggcgtccggggcgactgcggcggaagcctcgtgccgtagtgcgatcggcggtgctcggagcgcgtcgacgcgacggaatacagccagcgtcggttcgatacgagagaacatccaacgagggcaagtcccttccaggagcttgccctcttcttttgcgcttgcccgctgaaagccttcagcgtatagtcgaaagagttgtgcgtcggtgcccttcaggaggattgaccacatgagacgtactgcggatgccatcatttgtctgatcgtagcggtactgccgatgggctgccgcaccccttccgaacaaccacccggtggccagagcgtcatcgtggaaggcgggggcagattccccgcggcgatggcgggcacgtggaaggcggaccgcgacggatgggagtttgtcatcgaacaggacgggcgcatctcctcggcggtcatcagtctcggccaagtccgcatcacgccgggcaagagccagacgcttcccactcagggaggcggcgaggggctcttcgaacccggaccgtggaccgtctactgcaatccgagaaccaacgaggtgatcgtcaagatcgtcatgcgtcacgtgcgcgtcgggatggccgaggcgattctcgagggcaccagcaccgatacgttctccggtcccatgtcgccggccgacaacgtctggcgggtacactggacgaatttcagcacctatcagctccagatgcccgatgggtccacatcggaactgtccaccgacgagacctacggagagacgaattcgctgacgttcgagaggctgtcgcgaccgtgaatctcaccggggccgctgcttgaccttctggtactcgagaaagtcaacgtattgccccatctggagagccacgtcgcgccgaccgagttccttgagaagtgcgatgtgcttgcggacgacagagatcgcctcctcatagcgttgctggttctcgagcaatttggccagcctctcgtaatgggcgggattctttggctccagggtcatcgctcggtcgaaggcctcgcaggctccgttgaggtcgccggcccgggccagcgtatcgccgaggcgatcccatgagacgacggagtccgggttccgatccaggtcggcgcgaaaccgcttcgccgcctcggccagatgcgtccgggcctctgccctttcgcccatcttctgcagcacgatggccagattgcggtgggcggaggcgaccgccgccttttgtggccccgcatcttcttcgccggtgacggcgttacggaaggcctcggccgcccctgccagatcgtcctgagccagccgcgcagtaccaacccggctccaggcctcgattgccacagacgtatcgagttccgcggcctgtcggtatcgccgggcgctctcgtcgtaccgccgctgtgcccagagccgttccgcctcgcgaaggcactgaaaggccagtcgctgccggccctcctgccgcacggcaggtgccgcaagatcctccaccggcgcatagtcatctgtcaacacgagacaggagctttcggcatgaagacgcgttagttccggctcgtcgatcagccggaactccaggtgcctgttgaagctctccaggaattgtctcgtatcgcatgcacgccgtttcgcgacaacgacgtaagagcgcagtggcgatgtctgtcccggccgttctccgataacatcgacgtgggaaaacgtttgtctcagcgtcccgaccacgacaccgagaaacggtcccccttcgcacgtgtcgaccagggccagcatgtacgcgccgtcctcggtcaggaggccggctatcttgtcgttgaactcccgcgtcagcaaggcaaatgcgctgaaacggctgccgatcatgtccatgtagatgaaatcatacaatcttcccgaggggtccgctttccgttcgcagatcaatcgctccacggcgtaacgcacgtccatgttgacggtctcaatccccgtcccttgcgcaacgccaagggcctgtctcgctgcatccgttataccacggtcggcctcgatcacgtgcacctgactctcgggccacgccgctttgaggtagttcggaagggcataacctccgctgcccagaaccatcatcaacagcgcgtttctgccctcggccagaccgtgcgtcagagcggcacatacttccgtgtggaactcgcacagccgcgtgacgtcaccgatcacaacttcgccccgcgggattccatccagccggaaagaccttctgtcgggccgattcgacatctttcgtacggccacacaaccatacgatgtttcatcggcatagagcagattcggatcgcgcgcctcgcgaagagaagcgcttacgcccgcctcgcgcgcccattcggccggtgccatacccatcaccgccagcgtcgcgaacaccatggcccacaggcacaacgcccagcaactggcccaaaacaacagcgcaatgcccagcatggcggtgccgataagccagatcaccgcgctgcagccgtagctggggatgaggtagaatccggtcagcagcattcctgcaatgccgccggcggcaccccacgtacagaagaccccggcggcgcggccaagggtcggcccccggttcagcaccatcttcgcgatgaccgggacggcagcacccggaagcagcgacggcaggagaaacaccagacaaacgtgcaggaagacatgaaagggccagctcagtctccacaaccacagccagcagcccaccagattgttgaggacgatgacggcgacgcacgcggcggaagacaaaccgaacaggaccgccagagccctccttgcatggaagcggtctgcgatgcggccgccgagacagccgccaagggccagacccgccagggtcacaccgaagaccgaagtccacgtatacagcgatgtccccacgctgccggccaccagtcgcaccgcgaccaagcccagagccatgacgcaaccgctcgtaagaaagacggtcgcgctcggaacgaaaacccgcagcacatctctgagtttacccatgcctctgtttctcatccatcggggtaagatgcgagtatagcagagacggcagacgctgacaaggcagcctcataaggacaccctcgcggggtccgaccttgacccggactcagaaatcgaaataccggacaccgtttcggtctgtgccgggccagtcgaggcggatggtcagtgtggagggctggtaaacccacccataatccccggtggcctccctcggaaacgatacgtcgttgccgatcatgaggatcgtgtgccggccgttgaacgggttctccggaatccgccgcatgtactttccctgtacaactgtctggtcgcgaaagaagctctcgtccagggccccattggggttgttgccgtcgtacccgggcgcgacgccggcatgattggcggcatagagttcgatcgtgctgcgcaggatccgcagactgtctctcgccgcggcggtcctcgcatccgtcgcctcattctgtacaaacggcacgacgagagcagccagaatgccgatgatgcatgcgatgatcaccaactcgacgagggaaagtccatttctcattgcctgcgccgttcttgagctatcatgcgccgcccctgatccgaagtcagaaactctatcggtgcctgcggcaagcgactgcatcgccgtggtggtgttatcggactcattcgacacgcgcatccggtccggtgccccgcgtgttgagccgctcgatcaatcgcggcttgccccctatggttggacttccaagactattcgccgataactgtacaggctcggctgtccgttgtctacaacctccaagatgatgtgaatcgtttggcacgcatctgtcttcggaacagtcagacaagctcggggcgttgcgcatttctcgatctccattggacctcggtacgtgccggcttcttcgtacacgaaccagcggtacgccagggcgtcaccatcgggatcatgcgttcccgacgcatcgagcagaatgctctgccccggccggacgaccatgtgtgcgaccgccttgctttcgttaccggcaaccacgaccaccggattgtgattggccttctcgaagcgatccgccacacaccagtccatccgggccgcgaagtcgtgctggtaggcccggcgccaccgccagatcgtcgcctgggccgttgtgtaggagaccccgttgtcggcaaccaccgtatcctggcagccttctgcgttggtccagatggggcgcgtctcgccgtaacaggcgtacagtacatagcgcccaccccatccaccgtatgcggggctgacctcgccgcccagtccgttgccgattaggttgaagaaggacggcgtgtccccttccatgatataggtcagacgcggatagagagcgccgagaggaccatggtcccggatgatgttcgcctccagccaggggttgtccaccagatagaactcgtgcatcggtccattcctgtagcggcggtccccggaaatgccggtccatgtcgccttgtagtactcgcgatagtcgaccgtgctcggcgtgacgatgtagaacaacgtcggaaacgtcgcgcgcagccagcggccggagtcgtcctgatcggagatcgcgtacacgcgaagcttcgatacgaaggcattcagctccgcctcggttcgcgcgttcttcacgtcccacaaggcctgcgccaggcagttggcccctccccacacgctgatccagaccggtcgcgggtcgggccggtccaccacctcgatgatgtgacgcgagccctcggagctgcgtcccggccctaccccctccatgccgaaaacgggccggcccgatttgatgacacccaggagatgcgcggcggtgggatagcccgaggcatggcgaagcaggttttcacgcacctggccgaaggcctcgacgcgctgccgaatcttgtcgggccgcacgttgtcacgcaaccagaccgaggtcgtcgcaatcataccctccacgtcatactcgttcgagtacacaaggaaacggaccatcgactgctcgtcgtccggctcgttggtgatgtccgtcagcacgatgacccgcggcttctcgcgcggctcgaaacgcacttcagcggccgtcgagtggcccggagcggtcatcgcaagcatcagcaggacaagacccacagacctgacggcggttcgatttgtcgatatccgagttcccatttgtctgctcccgtatcccataccaggtggttcagccaagtaacggcatggctgtcgtcgaatgacgcgttacgaccgcgttcggcagtcgcctctatctccgacgaaggaccgttcaagtcctttctaccccggccatcggctttgtgcaaccggctacggcagaatccccagtttgcccattggcacatctccgtcgatacggaaccggcccgggtacggaggtggcataacgaggtgacatcgacaagtccgcgcgcggcgaagggttgccttcgccggaacctccttctatattaggacggcgcctatgacgacggaccagagatctccggcgcagaccgacgtggaccgaactgaaagacctcgtcgtgcgtgttatctgtgtccggccgcccttagggaccggtgcgggctctcgtccgtgcctgggcttcacgcaaatgagagcatcgaaggtacactgagagaatggtcatagctgacgacggcagaaaacgcgtggtgatcgacagcgtgcgcccgcaaatcgacgcggggcgcttcgcgatcaagcgctcgctcggcgaaaccgtgaccgtgcgggccgacgtcttcacagacggccatgaccgtatccacgtcgagctgctgtaccgcggcccgcaccaggattcgtggacggtccagccgatgaccgcccgcgtcaacgacgagtgggttgcgagtttcacggtctgcgccttgggcgagtatctctacacggttcgcgcctgggtggaccaattcgcgacgtggcaggcggatctggcccggagagtcgaaaaaggccaggatatcgccctcgagttccggatcggcgccgcgatgctcacgaccgtcgccaaacgtgccgggggatccgacgccgaagccctcaagagacaggcgaggcgtctgcgcgccgccaagccgacgcgcgccgccatcgaggcggcactgagcgaggacctgacctcgctggtggccaagtaccccgaccggtcactcgccagcctgtacgacaaggagttggcggtcatcgtggaccggccgaaggcggtgttcagcgcgtggtacgagctgtttccccgttcgttcggcagaggcggccggcacgggacctttcgcgactgcgagcggcttctgccggagatcgcgcggatggggttcgacgtgctgtacctgcctccgatccatccgatcgggcgaacgcatcgcaagggccgcaacaacaccaccgtctgcgcaccgggcgacccgggctgcccttgggccatcggcagcgacgaaggcggccatacggccatcgcccgcgaattgggtacgcggagcgacttccgccagctgctgaagaaggctggcgagcacggtctggaaattgccatggacctggcctttcaatgttcacccgaccacccctacgtgaaatcccacccggaatggtttcgctggcgaccagatggcacggtgcaattcgccgagaacccaccgaagaaatacgaagacatcctgccgctggacttcgagacgccgcactggagggcactctgggaagaattgcgtgacgtcgtgctcttctggatcgaccagggcgtgcgaatcttccgcgtggacaacccgcacacgaaaccgttcggtttctggcagtggctgatcggcgaggtccgccggcgccaccccgatgtcctcttcctggcagaggcattcacgcggcccaaggtcatgcagcgtctggcgaagatcggcttcaaccagtcctatacgtacttcgcctggcgcaacaccaaatgggagctggagcactacatccgagagttgacgcagaccgaggtcgccgagtacatgcgtccgaacttctggcccaacacgcccgacatcctgccgcagtacctccaatacggcggtcgcgcggcgtttatcatccgcctggtcctggccgcgacgctgtcgtccagctacggcatctacgggccggccttcgaactgtgcgtcaccgaagccgtcgagggcgcagaggagtacctcaattcggagaagtatgagatcaagaggtgggactggaatcgcgaaggcaacatccgcgaggtaatcgagcgtctgaaccagattcgccgggaatgcccctgcctccagcggtttcgcaacgtccgtttgtacgaggtccagaacgagaacctgctgtgttacggcaagaccggcgacgaggcgggcgatgtcacggtggtcatcgtgaacctcgatccgcaccacacgcaggcgggccgggtgcaactgccgctggagactctgggcctcgacccacaccagtcctacttgatggacgatgccttgacaggcaagacgtatgtctggcagggaccgagcaactacatcgaactcgaccctgacgagatgcccgcctgcatcctgcgcctgcgacgcgcattgcgccgggagatcgacgtcgagtccactgtctgacaggagccgccgcccgtgcgcgaggcaagagagaagacatccgattcgctctggtacaaggacgccgtcgtctacgagctgcacatcaagtcgttccacgacagcaacgacgacggcgtcggggacatccgaggcgtgatcgagaagctcgattaccttcaggatctgggcgtcaccgccctgtggctgctgccgttttatccatcccccctgcttgacgatggttatgacatcgccgactacttcggcatccaccccgactacggcacgttgagcgacttcaagcggcttctgggcgaggcccaccggcgcgagcttcgcatcatcacggaattggtgatcaaccacacctccgaccagcaccagtggttccagcggtcccggcgggccgaaccgggctcgccctggcgcgatttctatgtctggagcgatacgacggagcggtacaaggacgcccggatcaccttcaccgacttcgagagttcgaactggacgtgggacccggtcgcacaggcgtactactggcatcggttctacaaacaccagccggatctgaactacgacaatccccgcgtccgccgggagatcctccgcgtgctggacttctggttccagatgggcgtcgacgggatgcgcctcgacgcggtgccttacctggtcgaacgcgaagacaccaactgcgagaacctgcccgagacccatgcggtactgaaagagctgcgggcccatctcgaccgcaagttcagcgaccgcctgctgctggccgaagcgaaccagtggccggaagacgccgccgcctacttcggcaacggcgacgaatgccatatggcgttccactttcccatcatgccccggctcgtcgggcggcgcggcggcaggtgtaccgcgatgctgccaggtggagcccttccccaaacctccggcgtcctgaaaaccacgcagagcaacacgtcgatcgtctatgaccgcacgttcttcctcaagctgtaccgccggctggaaccgcccgtcaatccggaggcggagttgttggagaacctgacggagcatactgacttcgcgaacctgccggcgtatgccggtgccattgaatggcagccgagccaggcgccctcggtgaccatcgcgtcactgctggagttcgtcccctgtgagaccgacgcctggtcctacacgctcgacaacgtcgaacggtccttcgggcacgcccagaccctcaaggacaggctggccgagtttcccgtggtgccaccgtcgttctttgacatcaaccccgatgcaataccgatgcatatccgcaacttcgtcggatccgtgtatatcgagatggtggtgttgctggggcggcggactgcccagttgcaccgcgctctggcgtccctgacgcatacccccgaggtaaccagtgaaccattctcactgctctaccagaagtctcttcatcagtcgattcgcggcatgacgttgaaaatcttcgcggaactggaccgcagtctggcaaagctggatgcggaaagcgccgccgtcattcgaggcgtcctggcggagcggaagaccattctggcccgactgcgccgcatcggcgagcggaagatccgcgccaagaaaatccggatccatggcaactatcacctgggccaggtcctgtacaccggaaaggacttcaccatcgtcgacttcgaaggtgagccggcccggccgattacggaacgccgcctcagacaatcggccctgcgggacgtggccgggatgatacgatcctttcactacgccgcacacggcgctatcctgcggcgcgccgccagacagggcgccgacatcgactacctcgagtactgggccgacttatggtacacatacaccgccggggccttcctccatgcctacacgcaggaagtggccgacgcggacttcgtgccagccgaccgggcggacttcgcccttctgctcgacacgttccttctggaaaaagcggtctacgaactgggttacgagttgaataaacgcccggaatggctgatgataccggcacgtggcattgtacagatactcaagggatgtactacttctgattcgtgatccgctgtgcgggacgccgtgggaggtgctgtccatgcatagcgaatccagagaggtcttatggacgagaaaacccaggttgcgacgggcttcaccctgttgaccgatcacgacatctacctgttcaaggagggcaaccactttcggctttacaacaagctgggcgcccacctcgtcgaacacgagggtgtcaaaggcgtcttctttgcggtatgggcgccgaacgccgcgagcgtttcggtgatcggggatttcaacggctgggattgggcggcccatcgactgaccgcccggcgggacgattcgggtatctgggaaggcttcatcccggggatcgggaaaggaaccatctacaagtaccacatcgtatcgagatacaatcactactgggtggacaagggcgatccctacgccttcttctgggaactgccgcccaacacggcctcggtcgtctgggaccttcagtacgactggggcgacagcgactggatggcgagacagcaggagcggaacgccctcgacgccccctacagcatctatgaggtgcatctgggttcgtggcgccgcgatccgagcgaacccgaccgcctgctgagctatcgcgagatcgcccccatgctggcccaatacgtcaaggagatggggttcacgcacgtcgagtttcttccggtgatggagcaccccttctatccctcgtggggataccagacaggcgggtactttgcgccgagccggcggtacggctgctgtcaggacctgatgtacctcatcgaccaccttcatcagaacgacatcggggtaatcctggactgggtcccttcgcactttccaaccgatgagtacggcttgtcctacttcgatggaacgcacctgtacgaacatgccgacccgcggctcggcttccacccggattggaaaagcggcatcttcaattacgggcgccatgaggtccgggcctatctgatcagcagcgccatgttctggctcgaccggtaccacgccgatgcactgcgcgtcgatgcggtcgcgtcgatgctctacctggactactcccgcaaggaaggcgaatggatccccaacgagaaaggtggacgcgagaacctcgaggccatcgcctttctgcggcggttcaacgaaatggtctaccgcgacttcccccatgtccagacgatcgcggaagagtccacggcttggccgatggtgacgcgccccaccttcaccggggggcttggcttcggcatgaaatggaatatgggctggatgcacgacacgctcgagtacttcagccaggacgccatctaccgcaaataccatcaggacaagctgaccttctcgatctggtacgccttttcggagaacttcgcgctgccgctgtcgcacgacgaggtcgtgcacggcaagggctcgctctacggcaagatgcccggcgacccctggcagaagcgcgccaatcttcgcctgctcttcgggtacatgtacacccatcccggcaagaagctgctgttcatgggaaacgagttcggccagcatcgggagtggagtcacctgcacagcctcgattggcacctgctcgaggacgcatcccaccggggccttcagaaatgggtacgcgatctgaaccacctttaccgcagcgagccggcgctgttcgagacggatttccaccgggacggtttcgcctggatcgatttccacgatgcggacaacagcgtcatcagctacctgcgcaaagacaaggccggccgctccattctggcggtgatctgcaactacacccccgttccccggtacaactaccgggtcggcgtggccgacggcggcttctgggaggagatcctcaacagcgatgcggttgagtacggcggcagcggtgtgggcaacatgggcggtgtcgaggcctcggcggcgtccttctatggaaacttcgactacacgttgtcggtgaccctgccgccgttgggcgtcgtggtcttccgaaaggtgccggacggcaagcccgagagcaagagctctccaaatccgtagcgcagccgcccgccggcgacctcgtcgcgttcacaggcggccgcaggtttccgtcagctcacgcagtcgcgccgccagacgcggtgtgagccggccgtcgcgcatccgccacagccagttgcccgtcgatttggcagggtaattcatgcgggccgaggcgcccagcgacaggacatcctgcatcgggataatagccagccgggcgacggacgccatggccaggcggattagctcccaggagacctcccgggccgccggcttgtgaccgagatactcgaagagacgtttgcgacgggcctggtccatttcgttgtcgaaccagccacgggtggtgttgttgtcatgtgtgcccgtatagacgatcgcattgggaatgtgattgtgcggcatatggacgttgcgcttcggatcaccgctgaaggcaaattgcagcacccgcatgcacgggaactcgtatttggcgacggtctcccgcacgtcgggcgtgatgtggccgagatcctcggcgaagatcgcggcaaaagggatctggtggaacaacgtgccgaagaaactctcgctcggcgctttgacccacttgccccgcgcggcggtcttgtggcctgccggcacctcccagtacgccaccagtccgcggaaatggtcgatccgaaccagatcgaacagcagaagattgtgccggattcgctgcatccaccaagcgaatccggtccgctccgcatagtcccagtcgtacaccgggttgccccatagctggccggtcttgctgaaataatccgggggcaccccgccgatgaacttcggcttcttgtcggctctgagcttgaacacctccgggtttgaccagacgtcggcgctgtcataggcgacatagatgggcagatcgccgatcacctggataccctgctcgtgcgcgtagcgctgcaagtcgaggtattgccgatagaacacgtactgaagaaaacgctctcgctcgaccgcatcggccagcgtggcctggatcgccttcagcgccttggcctttctgtccctcagagcggccggccagtcgcaccacggccgcccgtggaaatgcctcttgatggcgacgaacgaggcaaacggctccagccacgcctggtgctggatgcagaacggttcgtaatcggccggccgtggtcgttcccggaaccgtcgaaaggctcgatcgagcagctctcgcttgtatcgttccaccttcgggaagtccactcggtcggccggaaacgccggaggggcggcgatctcgccgcgccggagccatcccgcccggtatagcaggaccggactgatcagcagagggtttcccgcgaaggccgagaaacagttgtatggcgagtgtcccgtccgggacgtggtgtgattcaagggcagaatctgccagcagttctgcccggcccgccggaggaaatcgacaaaccggtacgtcgccggaccgaagtcgccgataccgaattccgaaggcaccgacgtcatgtgcatcaggatgccactcgatcgttgcttgagcatgctgtaaacctctcctgtccacccggagccggagattgaccggttctacggaatcgccagaccaagatgatgcgccagattcccgaaatgctcgacccacttggccgcttcctcgtcattggccgcggcgcggcgcttcatcaccggccacttgcgcttggcaatgttgaagaacacgttctgtgcgttttgcagatccagcgtggaggtcagcgtgcgaagaatctccagactctcttcgatcgaacagagcagcttcacatcgtcgctgcgttcggccagttgatccatcaggtcgttgatccggtgactgccttcgaaactcagacgttccttgtccagactcagcgacaggcgctccgcctcatcggcgagattgcgcagacgattcacgtcgatggcatcggcctgaatctccgcgcagagatcctcgttgaggatgaactccgccggtgccgacaacgccttcggcagtggcatgttcatattgcggatcatctgcatgatcgcgtaattgtgctcgtagatgtggcggaacgaactctcgatctcttcccaggtgctttccagaagctcgtggaggatctgccgctgcgggtctttgaacaggtgtgtcagcgaatagttcttacccccgaaggcgacgttcatcaggcgcatcacctcgttgctgtcgcttcggcgaaacgctttgttcagttcctcccgaacggcgttgaactcgtggtcgtccatgcgtgcccttacggtggcgaacagattgtgatcgcccagatagaagacgaccagatcggccgcatgccgctcgaaggtgatgttcgaccgaatcgtgacccggcccgtggtaagaacctgcaccccggcctctttgcgatccaggttgtccaccgtggccgtatagcaatagatctccgtcgtccgttcgcgcgcctcctcaaacaccgaactgagcgcgaagtgcgccgccacccggttcagatcgatccgagccggttcgacgaaggcctcgtagacttcacgcccgttggtaaacggtcgaacgttggccggagcgtgttgcagcatctccttgaactgcggcaccaggtcccagttctgcacttcctggcacagttgcatcgaccgggccgcatattgcatcacctgcacggcctcaatcccggtgatgttgtcgaagaaccacccgcagctcgtgtacatcagcatcgcgtgccgctgcatctccaggagtttgaggaacgtcaccttgtcctcgagcggcagcgtccgaccggtcgtttgggtgatgaaatcctcaacgttctcctgtgagcgattgttgatcgcggcgatatattcgttgcgcagcttccacgggtcggggtggtatctcgacatgcggtcctgatacacctcggcctccttgtcgcggacccaatccatggcctgtcgcaacggggcgcgccactgctgttttcccgaattggcctggtcggccgcgcagccgcaattgctcttccaccgctcgaccccatgcgcgcagctccaggagctgttctcccagatctcgacttcctggtccggcgggaatttttccaggtattcgccgtagatggtgaccttcgccagattgttgctctcgatatggtgaatgcagtacgccagggccatatcgccgtggcggtggtgatgcccgaacgattccccgtccgtcgccacgtggaccaggcgcgggccgtccccgtccgtgggaaacgcattgatcagccgggaggcgaagttggtgccgctgtgaagaaggcccccgtaggcgatgtcatgcgaagccggaccgttgtagaagaacagcacgatctgcttgccggaaggaaggacgcagatatagggaacgctggtgtccagatcggtctcgttgacgtctttccatcggcgcgcacccaccttgcggacccgcttggcctgccggggcgccagaatggtgaacttgatcccgtgctccgccaggacttccagtgacggcagatccgccgccgtctcggccagccacatgccctccggcgcccgctggaaccgttgcttgaaatcctgaatgccccagatcacctgcgtgtgcttgtcccgggtgttcgacaggggcaggatcatgtggttgtacacctgtgccagagcactgccgtggccggagaaccgctcccggctgttccggtcggcctgcagaatactctcgtagacgtccggggcgtgggtttcaagccaggacaggagcgtgggcccgaaattgaagctcatgcgttcgtagttgctgacgatatcgacgatcttgcggtcgggccccaggatgcgcgaggcggcgttctgacggtagcactcctcggtgatccgcgcattccagtcatggtagggataggccgaatcctgtaactccacatcctccagccatgcgttctcgcgcgggggctgatagaaatggccgtgtatgcagacgtacttgtccatctacaacctcacactgcacactgctttacgcagtggttatgctccgagtcacgccgacaggcatccgtcctcgccatgttgcgggcggatgcacggccggcccgtaccactccacgtgcagcccgtgccgcacgaagcacgtgatgataaggcaacttcccctgccaggcaaccgatcttcccaaattctcacccgtcgtctgcggcgcagactgcccgcaggtctgccggatcggcgttcttgacagcaattgtcaagtgttccatccggattcacattagaaggaccggccgccccatcaagtgaaaagccttcggcgttcgatgtcgttgtcatcattcaggcttcccggtattatcgtcatctggcggtttcgtgctccagcgtttaagacgcctgatgaagacaatccggaggtcgctaccatgcctcagtcagaccggccgcaaacctggatgcaatgcttaagaacgctaccactggcactgttcgcccttgttgcctatacaccccagaatgtcacggcggctttctcggtaccttcggggctgttgtgtgagctgatgacggagccgacaaagacagcgatcgtcgatccccgaccggagttttcctggatcgtacccttgctggaccggaacgacgtccagaccgcctaccagattctggtcgcctcgtccgcaagtgagatcgaacagggtcgcggcgacctatgggatagcggcaaggtccgatcctcccggtcggtcggcatcgagtatgccggcaggcccctctccccggacgcaacgtactgctggaaaatacgaacgtggaaccagcaggatcacgtcagcccctactcacaggtccagacattccgtacagggcctctggatggcccgtacacaacagtccgctacccgctggcgaccagcagaatcaaacccgtccggatcaccaccaagacagaccggcactacttcgtcgatttcggcaaggccgctttcggaaccgtcgaactgaccttgaccagccccgaagccgggcgtcatatcgaaatccatctgggcgaagtctgctctcagcctgacagcatcgaccgcaatccgggcgggtcccgacgatatcggcaactcgagctgacgctcgacgaaggtgcacacacgtacaggttgaccatcccgcccgataggcgaaacaccggtccgcaggcaatcaagatgccggaatccatcggggaggtcatgccgtttcggtactgcgaggtggtcaacagcccttcgacgctcgacgcctcgacgatttgccagatcgcggtccactatccattcgacgaggaggcttcccgcttccattcgtccgatccggtcctcaacgacgtgtgggagctgtgcaagtacagcatcaaggcgacgagcttctgtggcgtttacgtcgacggcgaccgggaacggatcccctacgaggccgacgcctacatcaaccagctctgccactattgcgtggaccgcgaatacacgatggcccgctacacgcatgagtacctgatgacgcacccgacctggccgaccgagtggattctgcattcggtgctgatggcctgggtcgactacctgtacacaggcgataccgactcgatcgaacacttctacgacgacctgaaggccaagacgctgctgacgctggcccgggaggatggactcatcagcacgcagaccggcctggtcagcgacacagtgctcgcgtcgatccacttccagggtacgctgcgggacatcgtggattggccgcacggaaacatcctcgggctgcaaggcggctacggcgagacggacgacttcgaattcaaacccatcaacaccgtcgtcaacgcctttcactatcgggccctcgtgctcatgagccgcatcgcccaagccctcggcgaagagcgggacgccacgcgattcgcctcggccgcagcgaaggtcaggcagtccttcaacgacaaactgctcgacaagaacaaaggcgtttacatcgacggcgaaggcagcacgcacagcgccctgcacgcaaacatgttcccactggcgttcggcctggtgccgccggagtacgtcgaatcggtcgccgcgttcgttcaaaatcgcggcatggtgtgcagcgtctacggcgcgcagtacctgctcgaagccctctatgaagcgggtctggacgacttcgccctgcatctgatgaccgaccgggacacagaccgaagctggccgcatatgatctacgacgtgggcacaaccatcacgctcgaagcatgggacaacaagtacaagcccaatcaggactggaaccacgcctggggcgctgcgcccgccaacatcatcccccgctgcctgatgggtgtcgagccggtcgagccgggtttcgccaaggtgcggatcagaccacaggtcggctcgctgacgcgcggcagccttgatctgcccacggttcggggcacgatccacgtggatttcgaggcggtcaagggacaatcgttcatcctgaacgtaaccacgcccgccaacatgcccgccgtcatctacctcccgaaactcggcagcgacagcacgcaggtgctgatggacggccggaccgttcagggtcgacgcgacggcaagttcatcgtactcgataacgtcgtcccgggcccccaccgcttcgagcggcgcccgtagcttgcgatgctatctggccagttcgccgaagcggttggcgatggccagggccgggtcgagggggacgtctacggcgaccgttcctttggcaatttcgatcgtcgggcgaggcgtcagcttccggcctttgaattcgggcaaccatttgcgctcggcttcgagcatctcgccggtcatgtcccggatctccttgagcgtgcagactgccgaggtcagcgggtccatcgccatcgcctgcatcgcccgctccggatcccccgtcagcgccgcctccaccgccaactcctgcacggtgacattgctctggttcaacgccgcgcactgcaccggcagctcgccgatcgtcaccggatgcaggccctgcgagtcaacgtacaccgggacctcgacacagcagccctgtggcaggttggtgatgtagccgtcgttgcggacattgccgttgagacggaacggtcggtccgtctcggccgcttcgagaatgtacgaacagtattcgacgctgcgacgcgtgatcttgggcgattccgtcgcgagatagtccaccttcttgtacttctccgccagcatgttgcagtagtgatagtaggcgccggacgccccaccgaaatcgggctgatcacagtacagctccagggcccttttgctgctgcggaaccacggtacgtattcggacaggtgccctgtgctctcggtcatgaaataaccgaagtgccgcatcacctcgcaccgcaccttctcattgacgtaatactcgggcttctcgatgttccgcttgaggatcggatacaaatcgcgcccgtcgcgcttgtccctcagcgacaggaaccaggccatgtggttgatccccgcgcagacgtaatccacctggtccttcgggacgttgacgtagcggctgatcaggtccagcgtggtctgcacgccgtgacaaagcccgatgaactgcacgtcggccacgcacccgagggccgagcagttggcgcccatcgggttggcgtagttcagcaggatcgcgtcgggacacagctcgttcatgtccgccgccatatccgccagaacgggaatcgtccgcagcgcgcgaaagatgccgccgggaccgatggaatcggcgatgcactgatcgacgccgtacttcagcgggatctcgtagtccatgcggaaggcttcgacgccgccgacctggatcatgttgatcacgtaatccgctccgtcgagcgcctcgcggcgattcagtgtcgcggtgaccttggcaggcaggccgttctccttgatgaccttcttgacaaaggcctccatcttggccagcttgggccgcgtccggttcatcagacagatttcgctttcttgaagggcctcggtggccaggatatccatgaccagcgtcttgcagaaaatcaggcttccggccccgatcatcgcgatcttcggtttcgacatgacaatcgtccttcgtccattgtccactacttgatgaggttctcgaagaggtacagtccgctcttgccgggggcgacgacgtcgatgtcgccgtcgctgtcgatatcggcagccgcggtgttgattccgaagcccacgcgaccgccctcatgcatcgtatgccgggtccacttgcccgaggcgatatcgaagtcgtaatagtaaacgcagacaggatcgttgccgcccgggtcgtgtccgttgtgggcgcgatggcgcttgccggtgaccaactccaatcgacggtcgtcgtccagatccgcaaggagcatgaaatgcgcctgggaccacgagttgtcgatcagatgcttttcccacatgcgagtcccttgtgcatccttcttctgttccagccagaacacgccgtaatcgtggcccaggccccagatcagatcggaatccccatcggcgtccacgtcgtgcacgagaatcggtatgccggcgtagcccaactcgaactccgcacgccatgtccacgagccgtcaggattctgctggagccagcccttcggtgtcacaatgtcgcacagaccgtcgacgttgatgtctccggcgcccagtccatgccccgccgcttcctggggcagcacgtgcttgtcccaccgcacaccctgcggggccgaggcgtcgcggcagaactcgtaccaggccgcagcgctcatgatgttgggcaggatgtcaatttggccatcgccgttgatatcataggctatcgcggtttccatattacccggcgtgtccacctggtgcagcgtccacggcccgccggcctggcccggattgcggacccagtaaaccatcttgtcgtgccaggcggcgccgacggtgtccgtccaaccatcaccatccacgtccatcggcaggttggcaaagtcgtaatggtactccccttcttccttgatctcgcggacgaagtgcttggtccaggtcggggcctcataccagaacccgccgcagtagatatcgagcttcccgtcgcggttcacgtcgagaatccccgccgcctcgaaacgcgattcggcgttgagcgtgtgcaccttgaagccatcgcctaccttggcctccgctgccgcagcggccgatcctgccaacagggtaccgatggccagtcccaccaggatgggggcaatatgtcgagttcgcatgggcgctccttttccaaaaccgtgtggtgttgtcgttctcatatgcaccagggactgcgcatcgcccgctggagcatcgaatcggcctgccggtcgttgacgaaccgctcggccgccgggtcccaccgcaggggccgtccgagccagtaggcgatattgcccaggtggcagacgctgatcgagcgatagccgacgtcggcgtcgcaggccggacggttccgcgtccggacacattcgaggaagttgtccggatggttcttgctctcgtaaagatgcacgtcgttggccgtgagggtctgcctgcgcaatgagtccggctcagtgatgagctgctcgcgcgtcacttcgatcatgccgtcggtcccctcgaaccgcacgcccggcgtgggctggctgatgccctctcgcgtcatcaccgtgccgttggcatagcggtaggtcaggaccttgaactcgttgccgtcggccggaatgatctcgaccgggcccgattcgtccattcccatcgcccactgggcgatgtcaaacatgtgctggccccagttggtcatctcgccgccggagaagtccttccaccgcatccagcccaggatgtcggggtggaacggatgccagggcgcctggcccagccatcggtcgtaatccagccagtccggcggcgagccctgcgcgggaaggtgacattcctcgggggggccgcccacgttgactttgatgtgcttgacgtgaccgatgtagccgctgcggaccagttcgcaggcgaaacggaactcgtaccagctccgctgctgcgtgccgctctggaagatacggccgtaccgcttcatcgtgcgggccaactcgcgcgcctcgtagaccgtcagcgaaatcggtttctcgcagtagatgtccttgcccgccttggcggcggcgatggagatcggcgtatgccagcggtcgccggcggcgcagaggatgatgtcgatgtcgtcgcggaccaacaggtcctcgaagttgtggtacgcgacgcagtcgtggttgccgtagtaggtgtcgatgatgctcttggcgttgttgaggttgttgcgattgacgtcgcaggccgcaacgacctgcacaccgggcttgctgaggaagccgccaccctggacccagataccgccgccgatgtggcgtgtgccctgtccgccgcagccgatagcccccatcaccaaccgttcgctggccggcgcccggccgccggcgccgagggccgacgacgtgatgacataaggaaccgcaacagccgatgcggtagctcgtaggaaggtcctgcgtgtgatgccccttcggtatgccatgcaacctcccatccatttcgtacgatacctcatggatatttcccgccatcttaccggcggccgccccacgacgcaatagcctgatcggccccgctcccttaccgtgtggggtgcacttgatgtttgtaggtagaccggcacggggggtcgcagtcgactctgtcattccgaccggagcgcagtggagtggaggaatccggctgcgaacgggctattgccttatcctcgcccagatttctccgtgcgggcttcgcccttcgtcgaaatgacatccgccacgtgcttcgagatgatagcccccccttcctggcctccccaggaacctacctataaacacgcagtgcaccctcccttgccgggtgcgaccgaaaagacgcgacttgacggagactccgtggtacaatgcccagtcagttgacttttcatgatgaaccgcacgattcgggaggttgagccgatgacaccttatgacccgcaccattggcgcaccgatagatgtgaagaccacagacgctgtcccaggacgggcaagctaatcgagatcgagccccgaactccccgcccatggatgctctggctgctgccgatcaccggcctgctggctctggcctggttcctgatccgcgtggtgcccaagccctcgcgagcgatgtatccctgtcagcgggcagccatgccgctggcgtccggcttcgtcgcctggctgctgggcatcggggcttgggcggcagccctgcgcaaggcccagacgagtctgcgcagcggacggtgtgcattggccgctgtaggcatcagcgtcgcggcgatctgggtggcgttcagcgtcaccactgagaagcgtctgctggccgatccccagccggccaaccagcccatcggcgtcgctcgagggatccatccagggcgagtcgtctgggtgcacaatcccgaagccaccgactggaagggtccgggcgatggccacctctggcaggacgaacacacgaatccggcggccgtcgacgaaatgatgtcgcaggctcttcgcaacctgacgggcgagacctccgacaaagcggcgtgggatgccctcttccgctaccacaacaagaccaggggcaagggcgatgtcggctacgagccgggccagaagatcatggtgaaagtcaatttcgtcggcttcatccgcaccaccgacgccgtgaatccccagacctacgcgttgcagagctgggtggactacatgaacacgtcgccccagatgatcgcctcgctgctgcggcaactgacggaaaccgtcggcgtcaaacagtccgacatcgcggtgggcgacaccctcgcctacttcgccaacgaatactacgacatgctgcaccggcagttcccgcatgtcatctacctcgactgccagggcggacccggccggacgaagaccgggccatcctcggttcccttgtattggagttgcaaccccgaagggtgcgcacgggactacgtgccgcaggcgtacgccgaggccgactacctcatcaatctggccaatctcaaggcccaccccagcgccggcgtcacgctgtgcgccaagaaccactacggctcactgatccgcctgccgtacgaaagaggctactacgacatgcacacgagcttccagaggaccacgggccggtaccggaacctcgtggacctgatgagccacagtgagcttggcggcaagacggttctctatctcatcgacggcctctacggcggcatccactacgtcgagcacgagccgcgacggttcgagtcggcgccgttcaacaacgactggaccagcagtctgttcgccagccaggaccccgtcgccatcgactcggtgggcctcgacttccttcaggccgaggccaatgtgcagaagtattcctgcatgccgggtaccgacgactacctgcacgaggcggcactgatcgacaacccgccttccggcacgttctacgaccccgaccacgccggcaacgtcgtgcggccggccagcctgggtgttcacgagcactggaacaacgcacaagagaagaagtactcccgcaacctgggccggaccgagggcatcgagctggtggctgtcatgaaaaaagccgaccaggcaaagacaagtggtgtcaccgctcccggtgccaaggtcaaattgctggccgacggctttcagttcaccgaaggccccgccgccgaccgcgagggcaacgtcttcttcaccgaccagcccaacgaccgcatctgcaaatggtccgtcgacggcaaactgacggacttcatgaagccttgcggccggtccaacggcctgttcttcgacaaagacggcaacctctgggcctgcgccgacatggataacgagctgtggatgatcgatccgcagggacacgtcacgatcttcgtccgccgcttcgacgacaagctgctcaacgggcccaacgacctctggatcgcccccgacggcggcatctatttcaccgacccactctacaagcggccctactggaagcgcaaccccgccatgcaacaggacggccagcacgtctattacgtcacgccggaccgcaagagcatcgtccgcgtcgccaatgatctcgtgcagcccaacggtatcatcggcaccccggacggcaagctcctgtacgtcgccgacatcggagaccgcaaaacgtatcgatacgtgatcaacaccgatggttcgctctcggacaagaagctcttctgctcgatgggctccgacggcatgacgatcgacaccgagggcaacgtctacctgaccggacgcggcgtcaccgtgttcaatcccgacggcgagaagatcgagcagatcgacgtcaacaaaggctggactgccaacgtctgtttcggcgggcccgaccggcggacccttttcatcaccgcctcggattcattgttcagcatcgagatgcgcgtcacgggcgcgtattgacaacggaacggatggggagattgcagcgccatgagaacacgaacgttcgcactgtttctggctttgttcaacagcttcgccgcagcagcggtggcacctatcgaggccgaaatcgtcgaggtcaagaagatctgggacgacgctgcccacaacgcgtttacggatttggtctggttcggcgagcagttctactgcgcttttcgcgaaggacgcggccacgtctcggccgacgggcggattcgcgtgttgcgttcggccgatgcggacacctggacgtcggcggccctgatttcgttccagggctacgacttccgcgatgcgcacctgtcgatcatgccggacggccggctgatgctgatcggcggtgctgcaccgcgaaaacaggacggcgaacacgtgcccactggcagcttcgtgtcgttctcccacgacggcacgacctggaccgagccggtgatcgtcagccagccgggccgctggctatggcgcgtcacctggcacgagggcaaagcctacggcgtgtcgtacaccgccggcggcagtagcgaccagtacctgtcgctgctaaccagcacggacgggatcaagtacgagccgctcgtcgagaggctgttcgacaagggctttccgaacgagacgacgctgcgattcggacctgacggcacgtgctatgccctggttcgccgcgacaactcgggcgacgcgccgagcagcacgatgctcgggatcagcaaccccgactatacacaatggaaatggcacgacctgggaactgagttcaacgctttcggcgggcccgacctgatccggctgccctcgggtctctggatcgccgccggacgcatgcaccagggcggcgtccacaccgccctaaccgtcctcgacgtcgagaacaagacgatgaggcgtctgctcgacctgcccagcggaggcgataccagctatcccggcctgctctggcgaaacgacctgctctacgtcagctactactccagccaccagggaaaaaccagcatctatctcgccaaaatcagattcggctcgtagtgacgccgtcaggcttcgatcttgcaggcgaggggcgattatggtatgataatatggtgcatgttcggggtcgctgcggccggggtttgtccggttggccggaggcgatctggaggcttgcggagaaagactgggtaagtgctttgggtacggccttagtcgcatttcttcgaggaggactggtatgttcaagaggcaaaccaagctggcttgttccgtgctcgggctgacactgatcctgatctccctcggcgtcgcggccgatccgtctctgatcgggtggtggacgttcgacgaaggatcgggaacagtcgcaaatgacgccagcggccggggccacaacggaacactccggggcggtccgacgtgggtaatcggacgggttgacggcgcgctgctgtttgacggcaaagacgactacgtcagtgtcgggagtgtgggaatcacgggggctgttgacaggacagtcatggcctgggtgaaggccggcataaccgccatacccgacaagacaagcatcttcggctttgtccccgacggaaacgtcgagggcacctacttcgacgtggaggtggacgacaagggcaactacgtcgcccacatctgcgggtaccagtggatcatcggaccggtcgatacggaatggcgccatcttgccggcacctatgaggccggcacgggccgttggtttctggacggccggcatatcgacagcgccgaaggagacatcgggacgatcgaccaggtgcgaatcggtgcgcggctcagcagcggcaggtacttccccggtctggtcgatgacgtgcgcatctacaaccgcgccctgacggaagccgagattcaatctgtgatggcgggcaccgacctggggcaggcgaccgagcccagcccggcggatggggcacgcgatgtgccgcgtgacgccgtgttgtcgtggacaccagacgtctccgccgtccggcacaacgtctatctgggcacaagctgggacgacgtgcgcgccgccaatatcggcgatccacgaggggtgctggtcggtcccgggcaggccgcagccacgttcgaccctgagggcctgtttgcgtttgaccagacgtattactggcgtgtggacggtgtcggcgccgctccagccaataccatattcaaaggcagggtctggagtttcgtgtcggagtctttcgcctatcccatcgagaatatcgtggccaccgcatcgcacgcggatgtcgacgccggaccggagaagacggtcgacggttccggcgtgaacgcccaggaccagcattccctgaactcacgggacatgtggctggccagtccgggccccgatgaggccgtgtggattcagtacagattcgatcgggtctacaagctccaccagatgctggtctggaactacaacggagagttcgaaccgctgctcggtttcggccttagaaccgtcacggtcgagtactccgtcgatggcatggactggatcacactgggagacgtcgaattcgcccaggcaacggccagtgcggcgtacgtgtacaacacgacggtggatttccagggcgttgcggcccggttcgtccgcctgaccgttcgcagcggctacgggctcgtcgggcggtacggcctcagcgaggtgcggttcctgtacatccccgcgcaggcgcgccggccgcagcccgccaacggcgccaccaacgtcaccatagacaccgttctgacctgggtcagcggtcgcgaagccgtcacgcacgaggtctatctgggcaccgatcccgcggccctcacaccggtcggcacgccggagaccgccagctgcacgcccgacaacctgaccttcggaacgatctactactggagggtggacgaggtcaacgaggctgaggccgtcggcctgtgggaaggcgatctctggagcttcaccgtcgaggaatacgcgagcatcgacgattttgaaagctacaacgacgacgtcgatgccggcacaacgatcttcgacacatggctcgacggctgggttaacaacaccggctccaccgttggctacctcaatgcgccgttcgctgagcggaccatcgtccacggcggcgaacagtcgatgcccctggcatacaataactcggtttcgccgttctactcggaggccgagcggaccttcgagcgggcgcaggattggacgatcgggggggccgaccgcgtgcggctgtggttccgtggcgacgccaagaacacgccgcagacgctctatgtcacgctggaagacagcgccggtcgcagcgccaccgtccgcagtatggacccggacgcaatcctcaagacggtctggcaggaatggcaaatcccgctgagccagttcaacggtatcaacctggtcaagatcgagaagataaccatcggtgtcggcaatcggaccagtccggccgccggcggaaccggcatcgtctacatcgacgacgtggggttcggccgccccgccgccacgccatagcgattggaccgatggcatctgctctcgcataccacggcgggccctgtccacacgacaagggcccgcttttttctgcgcgtcgattgcacatgcgtgcaatgagggacggacgtccgcccaagggttgacgccgggccggacagcgggtagcttggcgccatgccaaggtctgtgcggacaattgcggtcggttgtgcccgttccatcatgccgtggggcaccaaccgtcaggacgtatttctcgtcgacggcgatccctgattgaggagaaccatcctgtgaacatgctgcgtgtgtggccgattgtgtgccagttcggcgtcggcgcgatactgtgtctcgtcggcatctgggcgggctttcgaggcggatacctgaacctgcggatcgcggaggaccgccggctcctcgtgacgctcgtggccggatacgttcttctgctggcgctggcgtgtgtcttcacgtttctatcgccacactggtccaacggagggtccctatgattgcgcaagccatcggcggaaccctcgactacgccgtcatgctgacgtatttcctggccgtgctcgggttcggtctgtacttcggacgctacacggcgagcacaaaggacttctttttcggcggccagcgtttctcctggtggctgatcgccttttcgtgcatcgccacggtcgtcggcagctacagcttcatcaaatatagcgaagtcgggttccagtacggcatctccagcacgcagacctacttcaacgactggttctggatgccgatcctcgtgctcgcctggattcccatcatttactacaagaagatcgtctccattcccgaatacctggaggcgcggttcgacaagcgcacgcgcgtgatggcgacgttcatcatcctgctgtacctggtcggctacatcggcatcaatctcatcacgctgggcaagaccatgcacaccctgctcggatgggaggtcatgaccggggccaccgtgacggcggtggcggtcgccctgtacgtgtacgtgggtgggcagacggcggtcatcatgacggatctggtccagggactgatcctgctggccgccggcctcgggctgttcgtcggtgcgatctaccacttcgggggcttcggcgagttctgggcgctgttgccggccgaacacaagtacgccttctcggatttcaatgcgccgccgaagttcagcttcatcggcatctacgtccaggacggcctggccaacacaggggccctcatgctgatgcaccagggtttcatcatgcgcttcctttcgctgcggagcgtcaaggactcgcggcggatggtggtcgcgtggattctggtcctgacaccgctggcggccattgccaccagttgcggcgggtggatcgcccgggccctggtcaacaacggagagctggccaccaatgccgaggattcgttcgtcaaggcggcccatttcctttgtgcccccggcgtcttcggtttcgtgctggcggctttgacggcggcgctcatgagtacggccgactcgctggtcaacgcggtcagcgcgatcttcgtcaacgacatctggagaccctacgtcagaccgaacgccagtgacaagcaccatttgctggtggcgcggatcacgagtctgtgtgcggcgggaatgggcctggccctggtcccggtctttatgaaaggcaccatctatgaggcccacagcatgttcaccgccgccgtcaccccaccggtgttgatggcggtgtttctggggattctctggaagcggtacacgccagtcgccggctttgcgaccattgccggcggaagcatcctgatcggcctgtccttcgtgtggcccgatgcgctcgtcggtccgttcgacttcggcatgggctcgggaagctactcgttcatgcgggcgctgttcggtctgctggcggccggcgcgatcggcgtgctggtcacgtggtttaccagcccccggccgttgagtgaattgaagggcctcgtcgcggggactcagatcgacgccatgcgggaattcaagggcggcgaacccaatcgccggcccggcggaagggtgcgactgacggccaggatcgacgcgggcctctcgggcacgaacgccgcggtcgtgccgcaatcggccctcgacacgatggcggccgagccgggcgacctgctttacgccagcgacgtccgctggtggtatggcggcctgcgctccgtccacgtcaaggccggggcccccgccaatccggacggcgacgcgatgcgcatcagtccggaggacgccgccaccgcccacttcaccgaagggcagtcggtggtcgttgagaagatcatgtgagcaaatcggacggcgggtgacagcacacaaggcacgagagttgtgcaaaggtcagttcgatatctcgtgtggggcgtcccggcgacggcggttctggtcggcgccggattgggggttctgtccctgcgtgggacgggggtcgattccgaggcgatcctggcgtccctggcccgtgcgacgtcgccgggtcggatcgcgatcgagtacccgctggacgggacgctgtttccgccggagatcagcgcaccgacgctgcgatggaaggacgagaacgtccgcgcgaatctctggctggtcacgatcgtgtttgccgagggtcacagccacatcgaccatttcgcctcgcagccgcaatggcagccgcgaccgcgagtctgggaacagatcaaacggcggtccctggagagaccggcgctcgtgagggtggtcgggctcgatcgccgcacgccggagcaggcgttgtcggccggacaagtcacgatccggacctcatcagacgaggtcgcagcgccgctgttctatcgcgaggtgaacctgcccttcatcgacgccgtcaaggacccctccactattcgctggcgcttcggtccgatctccgcgacgtcgccgccgcccatcgtcctggagaagctgcccgtgtgcggcaactgccattcattctcctccgatggagccgtactgggcatggacgtcgactacgccaacgacaaaggctcgtatgccatcgcggcagtcgccaggtccatcacgctcgacaggaacgcgatcatcacctggagcgattacaggagggatgaacgcgagccgacgttcgggctgctgtcgcaggtctcgcccgatgggcgattcgtcgtgagcaccgtcaaggacgagtcggtctttgtgcccaagcccggcctggacttctcgcagttgttcttcccggtcaagggaatcctgtgcgtctacgaccggcagacgggcacattccagtcgctgccgggggccgacgacccgaaccgggtgcaaagcaacccgacgtggagcccggacggcaagcatatcgtctttgccgccacgcaggcgtaccgcgtacggcgcgccggcgatgagcacagggtgctgctgagcgcgtcggactgccgcgaattcctggtggagggcaagccgttccagttcgacctgtatcgtgtccccttcaacgagggacgcggcgggcaggccgagccgatcgccggggcctcgttcaacggcaagagcaactacttcccccgctactcgccggacggcaagtggatcgtgttctgccgggcgcagaactacatgctgctccagccggacagcgaactgtacatcatccccgccgaggggggccaggcccgccgtctgcgcgccaacaccaagtgcatgaactcctggcacagcttctcgcccaacggcaaatggctcgtcttctcgggcaagcccgactccccctacacgcggctgtacctgacccatatcgacgaacagggccagagcacgccgccggtcgtgctcgaccgcctgaccgcgccggatcgcgccgccaacatcccggagttcgtcaacgcggacgccgccgcgattcgacagattcgggagaagttcatcgacgatgtctcctacgcgcgggccgcatgggagtgcttcaaatcggacgacctggacggcgccgaacgtcacgcgagaaaggccctggagctgaatccgaacaacggcgaggcgctgcacacgctgggactggccttcttcgcccgccgccgctacggcgaggcgatccggcatctgtcgcaggcggctcaggccaaacccgacgacggccggatcctggccgatctgggaggcgccttcgtcgccgacaatcggctcgacgaaggcatccgccatctgcgccgggcgctgcagctggcgccggacgttcacgaggcgcacttcaatctcggcgtggcggaatcccgccggggcaacaagaccgaggcgatgaagtgctggctgcgaacggtccagctcgatccccacaactacacggctcaccacaacctcgcggtgctgctggacgagcaaggcgaaccggaccgggccctcgagcactaccgcctggcggcacggctcaagccgggcgattgcatggcgcaggcccatctggggatggcgctatgcgcccgaggggcaaccgaggagggcctgacgcagttgtcctacgccgcgagcctcgacccggccaacgtcgcggtccgctaccagttggccgtcacgctggctgggctccggcagcacgagcaggcgatcccgcacttcctccaggtcctgcggctggccccgcgccacaccgatgcgctgttggggctggcgaccagctacgcccaaatcggtcaggtagacaaggccgtcgcccgcttggaggaggccagacgcatcgcccagtccaccggcaaccaggaactcgtccagcgagtcaccagacagatcgagctgtaccaccggcgcggccaatagaaccggcgaaccacgtgtcagcgcttcacttggatggtgccgtcctcagcgatgtccacctgggcggacagggtcttggccgattggaatgcgaattcctgcttgccgcgcacgacgaccttgtcgcgatcggcgatcagacgcagggaccggtcgggctggcggcggcgcacgacattggccagcagaaaggccttttcgagaccatcccccctgccgtagttggcgacctcgtcgggctgggcgaggcggttgccgtcgtagatcgaggccggctcaagctgcccgagccaggcgtaaacctcgtcaagcggtcgggagccggcccgttcgagcgagacggggttgcgttcgacggcggctttgacaaacgggcgccagtcgcacgtgtccatgtcccgataggcatagaaagccagatcgatcgtcgggttgctctgtcgcctggattgcagcattgcgatgatctcctcgcggccttgatcgaccgacagcttgatgggctcgaccgccttgaagctcttctgcctgccgggcaacctcggccggatgtgcacgaagtcggccagcagctcgacgaaccgtccggcgtcgggcacgtgcggttcgaggaagcgacgcagggcctcgcgtccggccggctctctcaggtcgggcttctgcttcgcgaggaaatcgctcagccggtcgcaacggacgcgtcccggtatctcgtgccgcacgaagtcctcgtcggacacctcggccaggagtttgtcgtgggtggcatcgccgatcttgtacgggctgccgtgctcgtagtgaaagagcgtctcggccttgaggaactgcggctggccgtgacagtcgcgacaaatctggaaatgctcctggtactgccggtggcatcgcaggaagctcgcgaacgtcgtgatgttcaactcggccgagagatactcaccgatccttgcaacgaagtggtcgtagaccttcgggtcaatcgtcgcctcgtcgtagaagcaatggatgtacccgctcggatgcgcgacgatggtcacctgctcgttgcgcagggcccgctgggctttgtacgaaatctcggtgccgttgaaccacatggtcttggtgatgagccgtcggttgttggtaaggatgccgtcctgcatgtcgatgaagttctgcgaatgaagcggcgtgaggatcaggtagatgtcttccagcgggatgccgcagacgatgaacgacgcggcggcatacagcgtcgccagcgacacgcactcgccggccgcccggtcgtagcccggccggaagcgaaaggcctccatcgcctcgacggtctcggtcttccagtaggggatcacgtcgccgtcgtacttgtcgagcccgaagtgcctgcggatgtcaacatcgaaatagtactggtcgcctgtatagccgaacagcgcgttgctggcggcaatctgctcggggcggatcacgtgccggaagcggttgacttcggtctcctgtttggtcaggccccaggtctccaggtcgaggttgaagtcgaactcgtccatgatgtactgccgcatccgcatcagccgccggtagctggtcttgccctcgagcttggcgaagcaatcgacctgccgccacttccacagcagcgggctcatgatgttggccagcacaaggctgtacatcagctccgggaagacgaacacctccatgtccgaaagcgtgatcgccgacgaatacttctccaggtccttcgcatccatccgttcgattcctcaagtcaatgccactgttgccgccccaccccgccagcgatacgtcccacccgccgccggagtttaccagaaatcgcaacaaccgcaatccaagaaacacacgggaccctggggtgcccttctccatgcgtgtatcgattccgcgggctataccttgacagtcacgcgttcaatcccgaaaatggcttgcgatactcggacagtggcttcggtgagatgctcgagatgaacaagcgaaagctgctacagaagatcctcactagtcagaagaacgtgcgatttcaagacgtggtcgttcttgtggaggctttcggctttcgtctggcgcggaccgccggcagccaccatatcttcgtccatccgggaatacccgaactagtcaccttcagaatgtccaggaacaggccaaaccttatcagatacgccaggtcttacggctggtcgaacgccataacctgataatcgaggatgcatgatgcaggactatcacataaatatcttctactcgcaggacgacggcgggtacatcgccgatatacctgacctggaggcctgctcggccttcggacgaacgccagccgaggccctggaggaagtggagaaagcaaaggccctttggctggaggccgccaaagccgaaggcaagacgatcccagccccgcgataccggcccgtcatctaccaggcgggctgatttggtgtaccaagtgtccggcgtcgcctgtcctactggcgccatgacagggaaacggttgtcagcggccggaccgatccgcacggtggagacacacgtcgaagagttcgcagaattcgcagtcggggcgaaggcggccggtgcattcgtcgaggatgccgatgcgggacagcgagaaatcgtacttaaccggatcggccggcgtgatcgcggcgaaaccctccgtgacctgcacggcggtcgattgggaaatcgtgttgctgtcgtgaagcccgaggatgcggcaaaggcgggccatgtgtacgtcgagcggcacgatcagcttggccggggcaacgctcttccatagtcccggatcgacgtcgtcggcgcggaccatccaccgcaggaacaggtgcagcctcttgctggcgctgccccggctggggctggccagcaggtacatcagcccccggctgacccggccgccgtgatgctgggcatagccgtttgtcaggcggtcgcagaacctcgccaacgcgggcagaacgttccgttccctcggatcgaaacccttaacgaagaacgattcgatgctcccgtgccggcgaagcaccggacgcagcaactccagcaggtcgcccacgtcctcggcggtcgtgaagcggtgcttgaagccggccagacgcgaccggcgcgacggcgagaagttcatcacgaaatcgtatagaccgcaatccatgcgtgcgaacagatcgttcagactccgttgaatctgttgtacgcgaccgtaggctagaaccgccgcgaggaaggaggcgacctccgcatcctgcggccggtcgaaccgataggcgaattgaagcggatcggcaccgataagccggcgatggttgtaccgcgtgtggacccgttcgaggatctctgccaggaccttggctcgtggaggcgatacgagcaagacggtcattcggccctctgcgggatcttcttgcgcgggatgtcgcccgcgaaccggcattcgatctggccggtgtgggtgttgaacctcacgcgtcggccacgcgtcccgccgacctcctggcggacgacgcggatgccggcggccttcaggacctccagagccgccgcgacattgccgtccccgatgctcccatcggtgttcgggctcttcagcaccgccgcaccgccgaagatgctggcctcatagtgacgcggctcagggtcgatcttcagcatggcgttgacgatcttgcgggtggcggtcgtcccataggttcccacctccggatcggactcgttccggggccggtcgcgaaggaagtgattcatcgctccgaatccgccttcggtgttgtacagacaaaccgtgacgcaggagccgacaagggtctcggtcatcacgggccgccgggatgcgtagaactggcccggccgcaagaactttcgcatcaatccagtcacaggttttgcacgcccccagaaaacatcatcccaaatcggcggagcggacgctggcgaggaaccgcccgttgctcttgatcacctcgacccgacagtcgaacaaaaccgtcaggtgggccgaggtcagcagatcgtcgggcgtgccccggccgaccacccggccgcccttcatcaacacgatctggtcaaccgcggccggcagctcgtccagatgatgcgagacaatcacgaccgtcggcggccggctccgcgccaacagccgatccaggacggcgacgcaggccgcacgcgaaccgatgtccaggcctaccgtcggctcgtccagaagcagaatcttcgcgttcgagaccatcgcccgggccagaagcgtcttcatctgctcgccggaagacaggtcgccgtaggcccgctcgccgatctcggccagaccgacggaagccatctccgtgtccacgcgctgccactggctgtcggtcacgctgcgatggggaggcagcataatcgtcccgaacaggccggtggccacgacgtcgcgaacacacatccgctcgtcgaacttcggcgcccgcgaaggctcgatcagtccgatccggctgcggacgtcggccagattgacttgcccataggtgcggccgtccacgctgacgacgcccgtcgagggccagaggtagccggccagcaccgccatgagggccgatttgcccgagccgttaggcccgaggatcgcacagcaactgcccgcttcgacactcaggctgatctcggcaagaatgacgttgccccttcgggtgaccccgacgttcttcagttctatcgcgttgcgactcaaagccaaacccaggctaccgtcagccggccctccggaacgtgtcgatcagcgccgcgagcttggcggcgtccacgtcccgttcgcaaagcggacgcggatcatcgcgatacatctgcgtgttctcttcgaagctgttcttgggattgacgtagaagacaccgagaggcagccgatcggtttccgtcgccttggcaaaggccgccatgcggtccgcaggatcgtgcgaatcgtcgaggtagtacacgtggtctttgaaccattggtacgtgttgagcttgttgaacgtcacacacggctggaagatgtccacgagcgcgtagcccttgtgccggatggccttcttgaaaatctctttggtctgctcgcggtcgcccgagctggcccgcgcgacaaagctcgcgtccagcgcgatggccaccgccagcgggttgaacggttcgaggatcacgccggcgacctggacaggcgtcttgaacccgcgccggctcgtgggcgacgcctggccctttgtcaggccgtagaccatattgtcgtggacgatgttggtgatgtcgggattgcggcggatgcagtggatgaaatggtttccgccctcgccgtacatgtccccgtcgccgctctcggcgatcaccgtcagtttcggattgacggccttgatcgcggtggccggcggcagcgcccgaccgtgcaggccgttgaagaaatggcacttgagatagtggggaattttggccgcctgcccgatcccggagaccatcacgagctgtcgggggtcgatctggagttccgcgagcgcctccttgagcgtcttgagaatcgggtggttgccgcatcccggacaccaggcaatgtcgatgtcacccatctcgaaaacatccgtcgccatcgggcacagtccttacgaaaagatctcggtgagtccttcgaccacgtcttcgaccgtaaagccgaggccgtcgtacgtgaccagggcctcgtccacatccgcgccggcgtacagccggatcagcttgcggaactgtcccgtcgcgttgccttcgaccacgacggtcctgcgggccttgcgaataaggccggccgtgctcgagtgcagcgggtacacctggctgtaatgcagcatcgcggtgtcggtccgccccaactcggccagggcctcccgaacgacgtggtatgtcgagccccagcagatcacgagtttcttgtagttcttcggcccgatcagctcaggacgtacgatgtccttcttgagcgattcgcctttggccagacgcttgtccaccatggccacgcgcacgttgaggtcctccgtgatgtggccttcctcatcgtgctcgtcgctgtcgaccgcgaccagcccctcgccgtatcctgggatgccgcgaggcgaaatcccattcttcgtcaatttgtagcggcgatagtccggcgcggtcttaacgatgtgcctgtccaccttcgccttcgacaggtcgaaacccttgcagttgtagtaggaatcgatcagatactcatcggtcaggacaaacgcaggaatctggtacttgtcggcgaggttgaacgccctctgcgtcagatagaaggcttgttcaagcgtcccgggcgcgaagaggatgcgcgggaactcgccgtgtccggcgtaaagggccagttcgaggtctgcctgctcggtccgcgtgggcaggcctgtcgccggtcccggccgctgggccaggtgaatcaccacgggacattcgagcatacccgccaggctcacgccttcggtcatcagggcaaagccgccgcccgacgtggtcaccagggcgcgggcgccggcgtacgcagcgccgatcgccatgttgatcgccgcaatctcgtcctccgcctgctcgaccaggaccccctgctcgaggccgtgctgggcaaggaaggtcagcacattggtcgatggggacattggataggacgaaacgaagttgcagccgcccgcgatcgcgccgagcccgaccgcttcggcgccgctgagcagcatctcatccgcaaccttggcgctgggcttgaaggtcaacttcagcccatccgggagatcgagcttgccgacggcatcgtagccggcctgcaccgccttgacgttgttggcgacgatgtcttcggacttcttcgcgaagaaccgccggacataggcgaccaccgcctccggatcgagtcccagcaggcccgcgatcgcgccgaccgccaccacgttcgagtaaatcttgccgccgatatcggaagcaatctgcgtgaatggaacaaccaggagtcgatgtgattcagcggcctcgtcggcgaccacctcgcgctcaccgacgagcaccgtctcgggcgagagcctttcggcgacatgggcgacggtgcccttgttcaggggcacgagaatgtccatgcggctgatcggcgccgcgacgcgcttgctgcagacgcggatcgtcgtcgaattggcgccgccccgcacacgagacatgtactctttcgtggcaaaaacgtgatagccggcggccttcaggatgcgcgtcaacagatgctcgaccgtctgcacaccttgtccggcctgcccacacaggacgatggacacatcctgcttcctcgcggcctgctgcgtaaccctcattcggtcatcctcggttcatcggactcgattgcctggcgagatcacaatccgcccttcttacccatccacccaagaccgcgcacaggccagcgttgccagcggtattatgatacacggttcaacggtgtcaacggttcagtggaattggtgttccgtgcacacccgccccccctgcttgggtgcctcgccgaacctgccgtcacgtgatttgttccagcgactggacgaggatacgaacgtgcttcatctcctcctgaatgacctcttctatcgtccggcggtcgatctcctgcgggacaaagtccttcagtccggtgtagtagacgatcgaatccttctccttttcgatggccagtctcaggacgtcggccctgctctcgttgccggtcagctcctggctcggatcgggctggatcccgaacaccgccagtcccgccatggcccgcgcgtcgggcccatcgagccggtccggacgcaagtctccgagctgccagtggtgactcgccaggcgctcgcgcatctgccggaacacctcgatgtgcttgctttcccactgggccagttggacaaacagcgtactgatgctcggatcgtcgcataatcccgccgcccggcggtagaacttcaccccatttcgctcgatcttctcggcgatttcgagcacctcgtagccgctcatttccacatccatcgttctgactcccacatccgaaccgactccggtgcccgacagaaattccgcgcactgcccattctatcagctctttataggccgccaaggcccgggcggttcagaaatgcgagggttccctctggtcaaatcatccccgacacggtagactatcgatatcattatggacgagattcggagaaggttggcccatatcgaggcgcagctcagcgggcagagtctgcatgcacgtctgatcgacaccgccggtctgttctttccggcggtcggtctcatgacaggcattgttgcccagcacgcgatgacggcatggctcgaaccaggtgactcggtagagcggctgcgtccggagaccattgtaccggtgctcctgacggcggcactctgcgtcggaatggcctgcacgtatcggcgcctgcggccccccgtcgcggcgtggggcgcgctgctctgcttcgtgggacttggcgccgtacatctgagcgcctatcagacggccggcggcaacgacattcgtcactgcgtgggcgcggagcgggtcctggcgacgatacgtggacgcattctcacacagccgtcgcacgtccgggaggactggtgcttcgctgagttgacgttcaccgatccacagatggttttctatgtgaaagtagaccagatcaagaccggcagcggctggatcgatgcgcgcggcgtcgtacgcgtgcagatcgacggaccaacactgaatctgagggtcggtaacgccatccaggcttactgctggctgtatcgattcgccaagccgagaaacccggggcagtccgatctggccgcgcacctggcgcgccgcaacatctacgtcggcgcttcggtcccctcggcagattccatccagaggcgtgacacccatcgtacgaacctgctggcccgtctgcgcatgcgattcagccaggccgcttccgcagcgttgctgtgcggctcggcgtcggtgaatgaccctcatggcttggcggaggctctactgctgggcaagcgggaccgcatcgaccggcgcacgttcgaggcatttcgccggacgggactgctccatctggtcagcctctccggcatgcacctgggcatcttcgccggggcgatctggtggctgggcagaacagcaggcctgatgaagccgggacgcgccgtcctgtgcgctcttgccgtcgcggctttcctgctgatcgtcccgacgcgggcgcccaccgttcgcggcgcggtcatcgtctgggccttctgcgccgcagcgatagcacgccgtcgcaccagcacgctgaacgccttgtgtctggccgcgatcgttttgctgctgatccgcccgacccagttgttcgaagcgggctggcagttgtcgttcgcggctgtagcgggaattctcgcactgaccggccccatcgagggctgcctccatgacctcacgtacggctggttccgccggcaggagttgtcgttgaacccgcccttgcacgcggtcaaacgcatgggcggcggcatgatccgactgcttgcggcgggactgggcgcctggatcggcggcgcaggaatcctgctgtaccacttctggaccattacaccgctggccagtctctggacgatgctggtgtctcctctggtgtctgcgatcctgacgattggctttgtgaagatcatcctgttctttctgttgccgagcttggccgccgtcctgggcccgttgctcgcgctgtgcaccgacttgctcgctcagatcgtgatactcatgagccacctggataccaacacgatcgtcatcggtcgcgtcacggtgggactggtcgcaatctactatgggctggtgcttttcgcccgcttcggacgcatccgccggccgcatctgaagcacggcctgtgcgtcgcgctggccattgtcctggccgcctggatcagcacggtgaaatggagccgcacccaccgagatcacctgcaaatgacctgcctggacgtggggcacggccaggcgatcgtcgttcaactgcccggcgccaagaccgtcctcttcgacgccggctcgatgtatcaccgcgacatcggatcgcgcatcgtcgtgcccttcctgaacgccgcgggcattgtggaactcgaagccatcatcgtcagtcacagcgacgtggaccacgtcaacggaatcccggaaatcgtggatgcctgcacggtccgtcacgtgtatgccggcagggcgttcggcgtcccgcctcggagcgatccgacggccgatctgctggtcgaatccctgcgtcacagggggcgtcggatagaacccctgccggcgcttctcgatgccggaccagccacgatccgcacgctctggcctcccgacgacccgtcgtccacgcgcgaactgagcgacaacgaccgttccctggtcctgctcatcgaattcgcgggcgtgaagattctcctgtgttcggacatcgaggaactcgcccagcagcagcttcaggtccgatatcccgaactcagagcggacatcgtagtcgttccgcatcacggctcgaccacgacgcaggacaagacgttcctggaagggcttggggcctgcgtgcagatcagcagttgcgacgaaaaacagtacgcgcgcaggggcaattcggccgaagaagaaaataccggcagactcgcaaccgctcggaacggcgcgattagcatttgcatagacaacagcggtatggtatcagcaacggtacagattccggatttagaaggagatcaggccaatgacgaatcgtcgccacgtgtggacagccaccactttgatgatcaccctcgtagtcctgtcctggacgaccctgtcagcagcggaggtcttcaactatccaactcctcagacggacccgaacgacatcagcttctaccatgcgccggccaggatggagtcgtatccggccggagccgcccgggtccgaaacgtcatcctttgcatcggcgatggcatgggcctgggccaggtcaccctggcgcgcatgaaggcaatcggcgccgagggcaagatccacatgcagcgactgccggtccatgggctgatttccactcactcggccaaccggctggtaacagactcagcggccggaggaaccgccctggcctgcgggatcaagaccaacaacgggatgatcggcatggcacccgatgagacaccgtacacgagcattctggaggccgcccaggcccgtgggatggcgaccggcctggtcgtcacctgcacgatgtcacacgccacgcccgcggtgttcggcgcgcacgtcaagagccgcaagatggaaccggagatagccgagcagttgatcaagaatcggatcaacgtcctgttcggcggaggacgcaagtacttcctgcccaagtctcattccgacagcgggcgaaaggacgacagggatctgctggccgaggccgaagacgccggatacacaatcatccagaccgccaatcagttgcgatgggttcgcgggcctttcgtgctgggtttgttccaggtcgatgccctgacgacgctgaagcccgaaccgatgctggcagagatgaccaggaaggccatcgacatcctcgacgagaccgcaaccgactcgcggaaatacggccggggtttctttctcatggtcgagggcagccagatcgactgggcctgccatgcaaacgatcccaacgcctgcgtacgacaggttctgttgttcgatgaagccgttcgtgcggcggttgacttcgccgttgccgacggacgcaccctggtggtggttaccgccgaccatgagaccggcggtctgaccatccccgaagggagcctcaaaggggacaaaatcaaggtgcactggtcgaccaagggacacagcgcctcgcccgtgccggtctatgccatcgggccgaagtcggagagatttgggggcgtctacgacaacacggaaatcccgcagagaatcgctcaggtactgggaatcaaaccgtttccgcaggccaggaaatgagccaccaacgtatcctacgaatggacgccacgtgcgcgccggccgttcaggcgggtgaccaggtccgcaaggggcagaacctttgtgcgccgcaggccgaggatgcctgcgtctgccccgtgacagggacggtggtggaagtccggttcgacccggcggagcatgagttcgtggtcacgatagagccgtccaagccgggctgagattcagtgtcccgcagggcgggcaaccgagcgtgtcgcgctatcgcatgtggacaacgatctcgacgcggcggttcttggccttaccggcggcggtcgtgttgggagccacggggcgggccggaccacatccggcggcacgaatctgtgcagcgggaatgccctgtgccatcaaatagcgcgctaccgaaagcgcccgctcggcggacagctcccagttgtctttccacaggtctttggtcttggcgatggggtcggtgtccgtgtgcccgacgacgtcgatctccttgccggcgtatttcgacttcagcacggacaggatgtggtcaagctcggcgctggtggcgctcttcaactcggctttgcctgactcgaacaggatcgtgttgggcagcgtcacggtgatcgttccggcggccgcatcgaaagccacgtcatacccctcgccgaaacccgttgcctgggcaggcgtctgattcagttcctcgatctgacgacgcagttcatcgatcgtctgctggtcctggctgatccgctgggccagttgttgcttttcgttctggaggttctcgaaacgccctttgaggttctggtgttcgacgttgaggtaatcgtatttcttcttgtaatccgtgcagccggaaaccagagacagcccaacgaccaacagcagcgggacaaccgctttgaccttgacgacgtgcattcgagacctccttgcaatcctatgaacgcaactgtgccctcttagtgcaagaaaagaaaggcaaattcctttacgattcgatcgtggaaaatcataacggtcaagacagctaaagacaagaacggaccgtagggaatctggcgaatttttttgaaaaacgtctggaagagcgcccagcccagtccgaagaacggtgcgacgaagaacgcgacgaccaccatcagcgggccgatcaccgctccggcggcgcccatcaggtgaacatcacccagtcccatcgcctccttgccgaaggcgagtgtcccgagaacccgggtcgcccagacgacggcgcagccgacgaagtagccgaacaggctgccaaggaacccggcgaccaccgggttcgccagcaggcccgcccaccatgccgcaaccaccgccggcccggtcaatacgacgtgggccgcaatcgccccgagcacaatgggcgtcaggaagatgacctctcgcatcgcttcgaggcgatggttgaactcgggatcgtcggcaaacggaaaggccccctgctcgacctcgggcttctcgttggcgggcctgaccggtgccggcaactcgggcacctggtagctgcgatggatcagacccgcccggagaagcagcagactgatcgccaaaccgattccggcgccgacggccaaggcgccggttcctggcgaggcgaccggcagcagcgagaaggctctgatgacttcggggtcgatcagataccccccaagcgccgagccgacgaaccccacggcggtagcaaaccagcagatcgacagcgggatgatccaaagctccaagtcgattgccgagccggcgatgaacgccgccagcaggacgacatggacaacatagacgaaccgtccgtacggcacctgcatgccctgccgcaacgacgagtggaaatagaccaggtacagcccgagaaacatcagcccggtgagcagctctacgacgaaatatcgcggcgagatccgcatgtcgcagtagcggcacttcgctcgcaggacgagccacgagaccagcgggatgttgtcgtagaaccggatgggcttgccgcaaccgggacaggctgatccggggctcaccagcgacttctcacggggcaggcgatagatcacgacgttgaggaagctgccgatgcagcatccgaacgcaaaggtgaacgcactgatgatccattcctgtgccgccacatcgcctcccgtgccatcgtggacgccctgccgctcgtacgggcaaatgcccctgggttacttgtcgcccttctgctgtcgacgcgcgaccgctccagccaccctcattggcagcccgaatagccgaatgaagcccttcgcatcggtcgggtcgtactcggcgcccatcttgaagctggccaggtccgcttggtagaggctgtgcgggctcttcatgccggccggcgtgcaacggcccttgaacagcttgacccggacgtcaccgacgacactgcgttgcgtgacattgatgaaggcatccagcgcctcacgaagcggactgaaccattggccgtaatagaccagttcggcgtatttgagcgccacctgctgcttgtagtgcatcgtttcgcgatccatcgtcaggctttcgagcgcggcgtgggcggtcatcaggatcgttccgccgggtgtctcataaaccccgcgcgacttcatgcccaccaggcggttttccacaacgtccacctggccaacggcgtgccggccgccgatctcattgagcgtctcaatcatcttgacgccgctggtcagcttgccgtcaaggcgaaccgggacaccctcatgaaacccaatggtcacgtaatccggtttgtccggcgtacggctgaccggctgcgacatcacgaacagatcgtccttgggctcgttggcagggtcttcgaggtccgcgccctcatggctgatgtgccagaggttgcgatcgcgggagtaaatcttcttcttgctctgctcgatcgggatgttgtgctgctgggcgtactcgaccgctgcttcgcggctggtcagcttgaagttcggatccttccacggcgcgatgatctccagcgtcgggtccagagccatgaaggtcaactcgaaccggacctgatcgttgcccttgcccgtagcgccgtgcgccacggcaccggccttctctgcgtgtgcgacgtccacctggtgcttggcgatcaacggccgggcaatgctggtgcccagcaggtacccgttctcgtatatggcgccgctcttgagcatcggccagaggtagtcctcgacgaactcccgccgcaggtccttgacaatgcacttgctggccccactggccagggccttcttcttgatgcccgccagttcgtcgccttggcccaactcggcggcaaacgcgatgacatcgtacccgtaggtttccttcagccaaggcaggatcacgctcgtatcgagcccgccgctgtatgccaacacgaccttcttctgctgctgcttcgccataatgccatcctcaaaacgccaagaatttagaaacgcggattatacgcataccccgggcgcgattcaacggaatatcgcgggcagacacccttcaaaagcggatggccggaattcggccccgatcacctcttcaggcggtacactcgctctgcggcttctgtgcccagccgccgggggcgtctttgcgccggtcgcggctgtagtagaaatacagcgacaggtccaccgccaccaggaccatgttcagaacatacaggccgatgatccagtcgaagggctgcgaggccttgtaaatgacgccattaaggtacccgaaacagacaatcgccatgaacagcgggctcttgccttcgaccttgcgggtgcgcagtgacttggcaatcgagatcggccagctcaccccgaaacacaccagcatcaccgcttcaaacacagacatattgcgtaactcctcgcctacaacaggacaacagcggaagacgcatcccgccctacgcggtgctcctgtgtgcagcggcaatccggcaggagacagacgtacgtcccgcagcgcaccttatctcccgtaccggggtatgcaaggcgcaaaaaccaccccccgcgcagcgacgcgtccgctcgtacgtacttctgcggtaggcgccagtagaggattcgcccctactccatctgctcgatcaggtagttctggaagccgatctgcttgatctggtcgagctgcacctcgatccagtcgatatgctcttcttcctcgcggagaatcgacaccagcagctcgcgcgtgccgtggtccccggcgtcgccggccaactggatatcggcgttgtaatccttgatggcggcctcttccgccttccagtcgttcttgagctgcttctccacgtcggagccgatgctgatcttgttcagcttgctgaccgtaggctggccttcgaggaacaggatccgctcgatgagcttttcggcgtgtttcatctcagcgatggcccgcttctgaatggcttcgtgaagacgtccatagccccagttctcgcacatttcggagtgaaccatgtactggttgatcgcggtcaactcgtcggccagccgggcatcgagcgccgcaatgactttctcgtttcccttcatcggtgtttctctccttacctgtgatatctcatctgcccccgcgggcagttctcggacataaccacgcacgcgatactaacgccccggccgagacgacgcaaagaggggaattccctgattttcggcaaagaaggtgagcgggcggcatcagtcgatttccctgatcttcatgttgcggaagtagatcggcgcaccggcgtgcttgccctggagcccgatgtggccatgcgtaggcagctcggccaagggcgtgctcagccaggacgggatctcgctgccgtccgggttggtcttggcactggtccacaaagccatgttcatgaccgagaccatctccccgttgagcatgacgtagatcatctgatcacggcaggtaacagtcatacggttccactcgccgggcctcttgaccatgctcttggtcggcgccaggtggccgaagatcgcaccgcagtgccacgtggctggctgcttggcccactcctgcgagaaatcatcggcgatctggatctccacggagttgggaatccagttctgcatatcggtgcagtagacgatcacaccgctgttggtgccttcggcggtcttgaattccaggtcgaggatgaagttgtcgtactccttcttcgtccagatcgcctcgtccttgctggcagtgaggataccgttctcgaacgtccaaaccccctcggggtacgtcgcattggacaggtcgggggcaaacaggtcgttccacgagctgaccttcgggtgcgtcttcggcggcacggcgaggttttgagtgcatgacgacaacaggagactgccaccgaccaccgccaacaccactgccttcttcatttccttgctcctttagaagaaccgacacttgcctcgattcggcgccctgtggcgcggaccgccgggatattgtaccggcctgccctggcgaccgccacccccaaccgactatatgcggacgcttcgtaccgtctcgaaggcgacggccgccaggatgaccgagccgcccaccacggtgcgcagtgccagggtttcgtcgtggatcaggtagccgaagaacgccgcgtagaacggcagcagcgtcgcgatgatcccgaccgtcttggcactgaggtgtttgaagctggcggagaacagggtgtgcggaaccgccgtgaagaccacgcccagcaggagcagcaggccgcccgcgccgggcgtccaggccaccggctcgatgaacagccagggcacaagcaccactcctgtcacgagcatctgccagaacatcagcacgctgccggtgtactgatgcacgtacttgcgcgtcagcagattgcgggccatgaagaacaggccggagatcacccccagcacaattccccgggtcgtcgcgtccgacaggctcattgtgggcgtcataatcacaatcccgaggaagaccaccaccgccaggaggacgtccgactttcgcagacgctcagagaagaggaacggctcgatgatcgccgtgatcacgggataggtgtgcagcgacaggatcgccaccgcggcggtggagaccttcagtgccttgaagtaggtcagccagtgggcgcagagcagcaatccgagcgtgagcatcagcccgtagtgccggcccccgttgaccttcagcggccttcgcagggtcgcgagcatggccaccagcgccgccgccccgatcagcgaccgcaggcagatgatgtgcggcacgggcagcgcgatgcccttggcgaacatcgcggtgccgccccacatcaggacggcaatattgagctgaatgagactgaccttcctgggctgcatatcacgtcacgagactgccgaacggtcccgaccctttatgctgcagatgcctgacgaacacaaggatgaaatcgtgttgccgccacatcgtcatggattctgtcttttcagaaccttgccttggcgagagaaaacccggataatccttccaccggacccgcccgggtgacgcaggatgcgaacggcccgaaggcgggtccgccaaacacagtggtgaccgcaaggggaaaggacgctgcgatgcgacggtggacattggttctcctgccggtgctctgggccgccctgtgccagggagcacatgaaccggatcttctcatctgcgatttcgaggccgacgactacgccggctgggaggccacgggcgatgcgttcggcaacgctccggcccgaggcacgttgcccgggcagttggcggtgaccggctttgtgggccacggtctggtcaacagctttcgcgaccgcgacgcatcgacaggcacactgacctcgccgccgttccggatcgagcgccgctacattcacttcctgatcggcggtggcggctatccccgcctgacctgcatggacctgatcgtcgacggcaggatggtccgcacggccaccgggcgcaacaaccgccccggaggctccgagcgattgaccgcaaggtcctgggacgtctccgacctcgtgggcaagaccgcacagcttcgcatcatagacaatcacacgcgcctctggggccacatcaccgtcgatcacatcttccagagcaactcgcagagcgacttcgaccagagcaaagagcttctgctcggcgcgcgatacctcaacttcccggtcaagaacggcgccgcgaagcgccgtgcccgggtcgtgatcgacgagcgtgtcgtccgcgaattcgagatcgagctggccgacgtgagcccggacttctgggtcttcctggacatcagtgccttccagggcaagacggccgtcatcgaggtggacgggctgcctcgttcctcacgcggcctgcacctcatcggccaggccgacgagattcgaggcgccgagaacctgtaccgcgagaagcttcggccgcagtttcatttcacgtcgcgacggggctggaacaacgactccaacggcctggtcttccacaacggccaataccacctctattaccagcacaatccctacggcatccagtggggcaacatgcactggggccacgccgtcagcgccgacctggtccattggaccgagcttccgatcgcgctgtatccgcagcagtttggcgactggtgcttctcgggcagcgccgtagtcgacgtgaacaacaccgccggctttcagaaaggtgacgagccgcccatcgtggccgcctacaccagcacggggcggggcgagtgcatcgtctacagcaacgatggcggactgaccttcaccgagtacgagggcaatccggtcgtcaagcaccagggacgcgatccgaaggtcatctggtacgagcccggcgggcactgggtcatggcgctctatgacgaggccgacgagaagcgcgccattgcgttctacacctccgacgatctcaagagttggcagtgcaccagccggatcgagggcttctttgaatgccccgagatcttcgagctgccggtcgacggcaaggcggacaacaagcgatgggtcctctacgccgccgacggcgattaccggatcggcgcgttcgacggcaagaccttcacgcccgaatcggacaagatcagattcagccacggcaactgcttctacgcctcgcagacgtacagcgacatcccgccggaggatggacggcgcatccagatcgcctggggtcgggtcgagatgcctggtatgccgttcaaccagatgatgctgttcccggtcgagctgacgcttcgaatgacggaggaagggccgcgtctgttcgcggcacccgtccgggagatcgagaagctccaggagccgcatcgtggctggactaaccagaaactggcgccgcgaaaggacctgctctccggcgtcaagggcgagttgtttcgcgtccgcgcccggttcgaggcgggcgaggcgcagcgcgtgaccctggacattcgcggtgttcgcatcgttctcgagccgaagaagaaccagctctcgtgcctggacaagaccgccccgctgtcgcccgaggacggcaagatcgcgctggacgtgctggtcgatcgcacctcgatcgagatcttcgccaacgacggccgggtctatatgccgatgggcgtgaagtttactgacgagaaccggtccctgggcttcttctgcgagggcgctccgatcaccgtccactcgctcgaagtcttcgagatcgcctcgatctggccataggcccgagtcatcgtcccgcctggcacttggcatatacaccggaagaatcaccggggattcttcgccggcaaactctgcgctttatttcgcatgatcccttcgaaccgttgaactggaaatgctcctgacaagtaggatcaaacaagtctgatattaagaccgttgacaatgtttcgttctacgccggtcaatctggcgcgaagggaggcatgaatcatggcaagattgcgaatcgagagcatgggggtcgcattggcagcgttgttcttcctggccggcgcctcggcgcaggctcaggcgcccgacgtggcctggacgttcggcgcgatcgggtcgtcttcgtaccggctggacgcgttcacgccggccggcatcgaattcggcgcgatcggcagcgcggacccgacgttgcccctggcgttgggcaaacgataccaagtcaaggtgaccgattacatgatgcacccgttcgaggtcatcgccaaatccccctcgccggcgcaggacaaggtgctgctgtcgatggcgatcgccgggccgttcgaatccgatgcgaaggtccgctggcaggacgacaatcgagggacgatcgcgttcacgctgacccgtgagttgtaccaggcgatgaccgaatcaggccgcacgccgggctatcggtgcaggccgcatttcatggagatgcgaggcgatttcaccgttaccggtctgcccctggccgacaccatccagccgtcgcccatccgaatcgacctgcaaaccgtcgctgcgggtctgatcgtccccgtggacctccagcctgacccgtccgtcgccggacggctgtacgttgtcgatcaggccggcctgatccggactatcgagcaaggacagctactcgaaacgcccttcctcgacgtgcgagaccgcctcgtccagcctttgggcatcctcggcagcttcgatgaggacgactacgacgaacgaggcctcctgggcctggcgttccatccgggattcgccgacccgagcagccccggctaccgcacgctgtacacctacaccagcgagccggttggcggacctgccgacttcaccctggacctggcttccgaggaggtgaatcaccagagcgtcgtcaccgagtggcagttggcacgggtacagaatgtggtcgatccgagcagcgcccgtgtggtgctgcgcatcgatcagccgcagttcaaccacaacggcggctatctcgccttcggcccggatggctatctctacatcgccttgggcgatgggggcgccgccaacgacgccggagcgggccacggtcccgacggcaacggccagaacatccacaccgttcacgggagcatcctgcggatcgatcccttgccgccggcctcgacgcccgacagccgcaacgccgcaagcgccaacgggcagtatcgcatcccctgggacaatgaattcgtcggcatcgacggcgtcgatgagatcttcgcgtacggcttccgcaacccgtaccgcttcagcttcgacaccctcaccggcgcgctgatcgtcgcggacgtcggacagagccacgtcgaagagatcaacatcgtgcgcaaaggcggcaattacggctggaagatcaaagagggtgacttcctcttcgatcccgaggatatcgcggtcggcatgccgttcgaggatgcggctctgatcgatccggcggcccagtacgaccacgacgacggcctggcggtggtcggcgggttcctgtacttcggaacgcaggtgcctccgttgcgggcgatgtacgtgttcggcgacttctcgcgcgcgttcagcgcgccccagggaaggctcttcgtcgccgacctctggtccggacagatcgcggagctgttggtcggcaacgaacagcagcctctcggcctgttcgtcaaggggatggggcaggaccgcgacggcgaggtctatgttctggccagcactgcgctgggaccctatggcaatacgggggtcgtgttcaagatcgtcgcggcccccgatccgtagcacagacagcgggacaaaccacggcagggacgctcgtcacggcctgaaaaacgcgagcgtccttgccgaccgagggcttggaggcaacgctcaaccgaagatcttgtgccggaagacgaagaagacggcgccgaagatgcacaggcccgcccagaggtagtccagccgcacctgctccttcatgtaaaggattgaaaacggtacgaagatcgtcagcgtgatggcctcctggaggatcttgagctgcccgacgttgagcacggtgtgcccgatccggttggccggcacctggatcagatactcgaagaacgcgatcccccaactcaccagcgccgcgatgatccacggccgatgtgacaggcaccgcaggtgcccgtaccaggcgaacgtcatgaagatgttgctgcaacacagcagcagcgtcgtcgtcagaatcacacgcatacaccgaaaccctttgccagcccaagacctttggcccccgtcgcgaccaccgcgaccgagcagccgcatatcaaacccgaaaagcggcaaatgcacaaggcccgccgtgccgtcgtgcgctacttcctgcggcggggtttgggggtggcgaggcgggtgatctcggcgagcaggtcgggacgctggcggtctcgcaggaattcggcgaggagggttcggtttccgctttggtagtaatgcatcagtgcggcctgcaggcgcttttcctttcgggaggtggggacgtggattttgcgtccggcggcatcgacgccgcagacgtacatcgccgtcgagagcgtcagcgggatcgggacgaaatcctgaacctgtcgtggccgccacgaacgggatatgaggtactcggtaagcttcagcgcgtcctcgggcgtgcaggccgggtgcgcgctgatgaagtacggcacgaggtaggcctccttgccgacccgccggcacgactcggcgaaccgccgctcgaactcctcgaacacctcgaagtgaggtttgcccatgcggtccagcacgtcggcgcagtagtgctccggcgcaaccttcagatggccgccaacgaagtgcttcacgagcatgtcgaggtaatcgcggctttgcagggccagatcgtgccggatgcctgacgcgacgaacacattggttcgcttcgatccgttgtggctccagcggacgaaggcctccatcatctcgagtatcgggccgtggtcgaaaccgccccgccggcaaggcgtcggaaacaggcaactggctcgcccgcacgtctcgctcgcgtcgcagtccatgccgtacatgttggccgatggcccgcccaggtcctcgatcgtgccgcgaaactgcggatgccggcggagccggtccgcttcggccagaagggacggcagtgatcgcgagcggatctgtttgccctggtgacatccgatcgagcagaacgagcagccgccgaagcaaccgcgatgggtggtgatggagaactgcaccggcgccagtgcgggcacacctccgtcgcggtcgtatcgcggatgccacgcgcgggcgaagggcaaatcgtacagtgcatccagctcttcgctgcggagcggctcggccgacggcatcaccacgagcgtgccggggtcctgctcctggacgaccggtcgcccttgccgtccggcctgcaactgatattgctgatgggccgtcatgaacagcgacttgtcgtcgttctgctgtgacagcgagggcagacgcaccgcgtggtcaggaacggcgacccccttgtgggcgatgtacgcggtgccgggaatgtcggttagttcgtggattgggcgacctgcgttcagacgggcggcaacctcggccacggcccgttcgcccatgccatggatcagcagatccgctttggcgtcaaccagcaccgaccgcttgagctggtcctcgatgtagtcgtaatggacgagccgccgcagactcgcttccagcccgccgagcacgatgggcacatcgcgataggcctcgcgggcgcgggccgagtagaccagcagcggccggctcgggcgcagacccgtgacgcggccgggactgtagacgtcctgccggcgccggtgccccagcgacgcgtagtcgttcagccgcgaatcgatacagccgctggtaatcccccagaacagccggggttttcccaacgcccggaacggctcgacacttcgccagtcgggctgggccagcacggcgacgcgatagcccagcttctggagccatcgtccgatcaaggccacgccgaaggacgggtggtccacgtacgcatcagccgtaaccaggatgacgtccgcctggtcccaacccctgcggtgcagctctgcggccgtcgtcgggagaaattgatcgatatactcgccgttcttgctcatgggacgattataccatagggccgcccgccatgtttgaagctccaacagtcagcctccccgtcaaagaaaacatatttgtctgaaaatcttcgcacattgacgacggttctgttatcctcatgtcggcttcctgatgctggcgccgtgccggatcgtcgatccggcttaccgcaggagcgtcgagaatgacacatgacgaaacgctcatgctgatcatctcgtgtgccgtggtcgtcgagatcgccgcgacgtaccgccacctccggcagattccgcacgcatttctcctcctcggcagtttcgccggtctggccttgggcagcctgtgcaccgtggtcgaaggcttcctctgggccgagctgttcaactggctggagcacctatcgttgatggcaggagcgatcctgctggccctgtggtgcgccctggtgttcggaccctggaacaggagggtccctgatgcgcccgatggcatacgttgacctgatatcattttctgccagcgtagtcgcggcggcgttcgtcgttcggggctgcaagcgggtgagctttgcgccggcggtcccgatcctcctggccgttctgctggccctgatggcgtgttaccacgctgccctgttcctggagtggtcgggtctggccgccggactgaactgggtggaggacatcgcaggcctcttcatccccttcacctgggccttcgtcctctacgcgttcgtcaagaacgccgtcgaggacgagttgcgggccaaccagcagaggcttcgatccctggcttccgagttgtctctggccgaagaacgcgagcggcgacggattgccgccggcctccatgactacgcctgccagaacctcgtcctgtccaaaatgaagctccagggcctgccggcgaccgaaacggatgagatcgaagacgtttgtgacaccatcgacaagaccatcgaaagcgtgcgcgggctgatcttcgatctgagttccccgacgctgtacaagttcggcctggaagcggctatcgaggaactgctggaggaaagggtgaaggcccagcatagtatcgactgcacctttcgcgacgacggcgccgccaagcccttggccgaagacgtccgtgtcgtactctttcaatccgttcgagagctgctgttcaatatcatcaaacacgcgcaggctcgcgccgtaaccgtggacatcgggcggctcgatgattcgatccgaatcacggtgaccgacgacgggatcggcttcgatatggaggaggccctggccggtccgtcccgccgtcatgggttcggcctcttccacatccgcgagcggctggatttcatcggcggccggctcgacatggagtcccaacccggacacggaagccgcttcacccttctcgcccccctggaaacagaaaccggcgtcacccgccagacccacgacgccccccaggactccgagggctgacagcgtccggctgtcgcgcccacaggctggagggattcccgaccgccccgcaaaggaaaaacaacagtggacttcgctggcgcagacagacggatagagtccgccccaagcagacgcgccggaaagaagaatggggacatcacgcccgtccgtcgcggtccgttcgaaggcgacggaggggcggatgtccccggaatcgattcggtcaggtttagaagtgatgcacccagcggacctggaagcggtcgccttcgggacgattcttgacgctggtctcgaagtaggcgttgaagaacaggtggtcgttctgtgagaggctccacagaacgccggggccaatgcccaggacctgctcgcggccggagacctcctcaccgtcctgttccgagtcggtcacctgcttgaagtagtagccgttgacgccggcccgcagcttcttgggaatcagctcatacgacgcggcgaagttcgcgtgaaccgcctgacccggctggacttcggtgtcgtcgttctcatcgttccagaggtagtgcagacgccacgacgcggtgagcttgggcgtgaagaaataggttcccgcccagtacggattgaacgagaagtggttgctgcccgggttcagtcccttgtcctcgtcgtacttgcccgtaggccagatggtctggagctcgacgcggtgcatgaacttcggaccgttggcgcccatgatggggtcccactggagatatgggccaacgagaatgtcgcccacgccggtcccgttgtcgttgaggggcgtcgcggcgtcgaaactgacgaccggaacaatcacgtcgaggccccacttgccgccgaacaggagcttctggtcggactggtagatgaactggttcaggctgacccagacgtccagttccggatcgaagggaggaccgtcaaccagttcgtcggaggtatagaattggatatactccgcgaaatagaagccgggtccggccggcggaccgccatccatgaaactggtgaagccgagattgaccgccggctggtcgaaccccgccaccggcagcgccaacagggacacgagcaacaggcccgcgccgaacatagatggacgacagcatttcatagcttacctcctaaaacggacacatattggccttcttgcacgagaatccatcgaagtccagtcgcatgttaatatcggaagtccgttccctgcgcgaccacattttaccgacctttttcccctgccgcgactccgaaatcgccagattctccgccgacccgaccaacaccggtcgctccggcgcgtctttcccagaacccgtgcgatatgccgtcgcagacaaacgtccgatatcgtgttaagtcctatggcagaaaggacttggcggccgccagcttccggggcaggtggtgctcgatcacgtggccgaggtcgtgggccgcgaaggcctgctgctcggccgtgacagccctctcgagcaactaccggatcacagaatcctgccggaaaccgcaggacttgacacatggaccttccgcagtgcgtccacaagggcacggggctcacggcccctatccacaacacttgcgccggacacgggaggtgctatgctctgtcgtattgcgggatcgggagcgtctcgccgcccttgagcgcggactggtgcgcgacaatcccagggacggtcatcgcgagggcctcgtagacgttcacgagcggctcgcggtcttcgagaatcgcggtgatgaactcgttggtcagcggcccgtgcgagccaccgtgcccgccggcaggcatgccgggcggcagcgccggcggcgcgatgtccggcaggtccttcagcagaccgtggtactccgtgtcctgcatccatccgcgctggccgtacacacgaccggtctcgacgaccacgtcctgtacgcccttgcacatgagcatgcgcgaggcgccgccctcgctggtctggaacagggcgatctcgtcactgaacggattgtcgtacctattggcacccggcctgttgtcgggcagacccgcatcgaaaccatggcacgagacggaggtaaaccgcccgccggtgacgccgacgtagtaggcggtcgaatgagtcggataccacagcggaggcgaaccgacgcgccatccgttgaacgacgggataggcgtcgggctgaagtgaaagtactcgccctcggaatagacgagcttgccgaagcctccggcccggtaaacctgccgcatcgcgcagcagtcggcgcggtagcagctcgtctcggccatcatgtacttcaggccggtcttccgcaccgtctcgacgagctgctcggcctgctcgatcgagccccacaccgccggaactgctgtcatcacgtgcttgccgtggttgagcacttccatgcagtgcttcgcgtggtttggcgcatcggtggccacgaagaccgcctcgatcttcgggtccttgacgagcatctccagcgactcgtatgacttctcgcagcggcacgcctgcatcagtccggcgcggcgctcggggatcagatcgctgaccgcgacgatctcgacgttcggatggtcctggaagccgaaggcggcgccgaactgacagacgccgtagccgacgatgcccacgcgcaccttccgatccgaaaccggctgccagaccttttctgtagatcgctggttgcccctggcagcgccggcggaaaagctcgccgccgctgtcgctccgagcgaaagccggcccaacgtttcgagaaaatcgcggcggtccatcggttccaatccagcagtcgacatcggtcagcctccttcatcgcaggcagtatgtgaaccggccgcagcacacatgcggctcgcggtccggcccgtccattctacgccgatccggcgcgccgcgccaagcagcgatgccgaagacaaatgtctgtgcatatctcagcgtaaagctcattgcagatggagagaaccgtgtgtggcagcctcaagctcgaagagcttggggatggttcttcgcattggcagtcttctggcatgcgcggagccgctgaagccaccatccccaaacgctgcgcgtttgaggctgccacacacatgccaggatgttctgacacacaccgaagacaaagtgatccggcatctctaccgggcctggcgccggtaggtctctttcatgattagcgtgcaggccagagccagaaccgatgcgaccaggagcaccaagagcacgacgcgatagccggcgagggggtatccggcatcaggagcgtggggataggcgtcgagaatccggccgagcagccacatgaacaccgcgcctccgaaaaacgggaacaggttcaccgttccgacggaggtccctgccatcgcgacgggaaacagctccttggtcgtggtgaaacccatgatcacgatggcggaggagaacaccgagaacaggaagaaccacacgaagagcgcccagtgcggcaggctggcgggccgcacaaccaccagcagcatcagcagcgaaaggatcgccgaggcgagtatgaacacccgcttgcgacttcgcagcagcctctcggacagcaggcccagcagcggactgccgacgatcatgccccaggcgagcatgctcaggaccgcccccgcctggcctttgctcatgccatagacgtgcatgagatacggaccgctccagaggccgccgaatccgaagaagatgccgcagtcgaagaagaaccagacggccaccggccagaaatgcgtcgtggcgaccacccgcttggcgcccgcgaacagaccgatgttcgtagtgacgccgtcaggcgtttcgtgcggcgctctcgtggacgcacttcgatcgcctgccggcgcgatcgaaggccagcccttgtcggcaggccggtcgcgcacgatgagccagaccaaggccatcagcagcagactcgcccctccgatcacctggaacgagacgcgccacccgaaccaggtggccagcagaccgagaagccacgtccccgccagcacgcccacgcccccgacggcgttgaggatgccggccatcacggcaaactcgccggcctgaaaccattgcgagaggatcttcatggtggggatgaagaccatcgagacgcctaggccgaccgcgacccgcgcggcaaaggcggtgcggatccccggcgccaggccgaagaacacgctgccggccgccgccagcagcagagagacggtgaccgtcttgcggggtccgacggagtcggccagcaggcccgccggaaactgcatggctgcatagcagtagaagtacaccgaaccgagcagccccaggacgccggccgcgacgccgaagtcggccgccagatcgtccgccacgacggacagcgagaggcgatggaagtagacgaagaaatacgccagccccagcaccgcgaagatggcccagcggtagatcaccatcctccgctcgtgcgacgtctctgccaccggacccattgtctgtagcgtcacaggcccacttccttcccgcattgaaaagactccgaggccgcagagtgcaggctgcaggaatcctcccagccttatggcccgttcatcccattctacagaggcacgtcacccggcgccaatccttcacacgacacgattatacgtgtcgagctggtgtggggcaggggcatagccgcgtgtggaaaatggaattggtcgtaggggcgaagcatgcttggctggttgtggcatgccggccggcacactacaaacgggcgaatcgttcggcgacgtggagggcagctttgataccgtcggcggcgctggaaatgatgccgccggcgtagccgctgccttcgccgacgaggtagaggttctcgaagccggcgcagaggcccgtcttgtcgcggaccgcctggatgggcgaggaggtcttgctttcgaggcccaggatggcaccggtctcgaagcctttgatcttacgggcaaagtccttcagcccctcagcgatggcgttgctgatctgcgaaggcagcatctcccacagcggcgcgggcttcaagccgagcggatagctcgattcgaggacgtcggacggccccctgcgcgtgacgaagtcggtgatgcggcacgccggagcggcaaagctgctagagtactcatagaagctgtgctccagcgagccgagccagtcgagcgcttccgtcggcgagattgctctatccagcagggattcgagattgaccgcggcaacacacgcggcgttggcgaaccgcccggctcggcggtagtagctcatgccattgacgatgttcgtgtccgcgtaggcggtcgccgggatcaccgccccacccggacacatgcagaacgtataaacaggcagatgcccttgggcgttgaaggtcaggcgatactcggcggccttgacgccgggcaggctcgtccggccccattgggcaaggttgatcaactcctgcggatgctcgacccggctgccgatggcgaagttcttcgtgcgaaacggcactcccttgccgatcaacatgcggtacgtctcgtacgccgagtgtccgggggcgatgagaaagcagtccgcttcgatcccgcccgatgaggtaaccgcctcgacgacgcggcccctttcgatggtcaggtcttcgagcatcgtatcgaacagcatccggccgcccagagccatgaactcctcgcgcaggcgcttgacgatccgccggaggttgtcgctgccgagatgcggatgagccatgtacgcgatctcctcgggagcgccggcgcggatatagctggcgaggatgaactgccgctccgacccgatgtgcttgctccgtgatgtgagcttgccatcggagaaggtccctgccccgccttcgccgaatgcgtagctgcaggaagggttgaacgcgccggtcttctcgaacgtgcgaatgccctcggcccgcgtgtcgacgtcggaacctcgctcgatcacggtgacgtggacgcccgccttctggaggaccagggccgcaaagaagccggcgggaccggagccgacgaccacggccttccgccccggggctacacgtgggatggacagaggcgcaggcgtctcgggagcgccgccctcgacctgctgcgacgtgaccccgacgcggacgagccagtgaatgtcgctcttgcggcaggcgtcgagactctgctgctcgatcgtgtaggagaactccgacagcgacagcgccttgccgatccgctcgcggagcatctcgtcgctgtagtcagtgggaagcttcagtgaaatcgcccggtatcccatgcgaaagccgccttgcgaccgaacgcggattctcactccaggctcgcgcggagggcccactgggccttgtccgcacgcgtggccctgtagctcaccagcctggccagcagcgcctccggcgtctggtccaccagcagtagttcacgatgggccgggtcgatgaatccctgcgccgtcgcgtggtcgacaaaacggatcaggtcgtcgaagtatcccacgacgttcagcaggcccgccggcttggcgtgaaacccaagctgcgcccaggtgaggatttcgagaatttcttccatcgtcccgaagccgcccggcatcgcgatgaaggcatcggccagtttcgccatcagggccttgcgctcgtgcatgtcggcgacgatccgcatgtccgccacatcggtcagcgccagattcatgtcgtgcagcgccctggggatcacaccggtgacccggccgccatgatccaacacggtacgggcaattacgcccatcaggccgatccggcccccgccaaacaccaggtgcagcccgcgtttggcgaggaccgtgcccagcatgcgtgccgcctcagcgtattccggccgcgttccgaccccactgccgcaatagacacaaactcgtttcattcgtatggcctcggacgtcgagagaacatgtgcagaggctcgaccgccgacacagcgaggcagaaggtagtcccgccggttgcgcctgtcaaatggaatcgagttgggactccaaagacaggctgaatgctggttgacacctcacgacaccaccgcgacaatcacaacagagacagcagataccggcaccgcggaacagagatgcgatgaaatcgaggagcgttccgatgcacccctgcatcgcagaaaggagtgaaccccatggagccgattctggccaggtgcggctatcgttgtgacctctgcccggccttcgaggccaatctcaagagcgagcaggacaagaaaaggctgagcaaggcactggccaggtactacagttgccgggtccgtcccgaggaaatccacccgtgcaagggatgccaggccgccacagaggctcccgacaaggactgccaggtctatccctgtgtcgtcaggagagggttggagaactgcgggcagtgtcctcagttcggctgcgacaagctcaagacccgcatggacgtggtggaagaatgccttgccaaacactcggacgtgagcaatgaggactaccgacgcttcttccgcccttatctcagtcgagcggccctgacgcagatccatctgtcacgcaacggttagggccgcggcaacacccttcggtacatgcggtcagcggccaagaaaccgacgggcgaaatcggcataaggcacatcgcggaaatacctttcgtggatcgcgtgcgtcagcttcgcgtcatccatgtcgtcgtactgcgggtacttccggcggacctgcgtgatggtcatcttctccagcatccgcctggttgcgacatctcccggctgtacgggagccaccatctccgtcgctgtttccggagcggggaccgtatcgggcgcagtcgcttttgcctccgcggcctcggcttgcacggtcgaggccggcgggtacactttcacccccgacttgcggagttccgccgcccggcggtccatctgccccgccgtcatggtgttcggatcgaacgcgtacccctgcggtttccaatacgccgcgttgcgaatagcctgcgcccgctcgaacatctgctcgcaggtcatcgtgttgggatcgaacgtgaatcccttggccttccagctctcggcgcagatcgccgcccgctcacgatcccggtccacgtcgggaccggtactggaagaagcagcacagcccaaggccagccagggcagggtcaacagcatcacaacacgacttttcatgacagactccatcaatttcagataccctttcatggagccgccatgatacgtgaagccaccctctcctgtccaccccctttccgaacatgatgtcactcagtcggccagcgtgaaggccggcaggcggacgatcttgccgcccttctgggccgactggtgggcgcagaggcccacacaagtccagttggcgctggtgacggcgttgggccgcggatcgcggtcttcgaggagcgccgagacgaattcgtggaccaggtgcggatgcgatccgccgtgaccgccgccctggatgaacgagagatgcccggcatcctggatcgtgcgcgtgaacttgcgaatctcttgcggcagccgatgggcgtagtccggcacccgcacccgcgagggaatctcgggctcgggcttcttggcggtgtggatcacgtgctcttcgccctcgaccagcgtccactcgaagctctttttcgagccgtacacgtcgaagctctcgcggtactgccgggccgtgtcgaacaggaaccgccagatgtgagccgcgacgtccgagtccttgatcttgatgtgacaggactcgatggcaaatttgttgccgctcttgcgggccagtcttgggttgatggcgccggagccgaaacaggagacatactcagccctgccgtcgaccaggcccagcacgggcgaaaccacgtgcgtagcgtagtgcatcgggatcatccgctcccaatactcgggccagccctccatgtcctggggatgtgacgcctgcatatactggatcctgcccaactcgcccttctcgtacatctccttgaggaacaggaactcgcggctgtacaccaccgtctcggccatcatgtacttcagccccgtcttcttgacgagcgagacgatctgccggcactcgtcgatggtcgtcgccatcgggacggtgcacatcacatgcttgcctgccttcagcgccgcaatcgacatcggcgcgtggtccgggatcggcgagttgatgtggacgaaatcaattgccggatcggccagcagtctctcatagctcgtgtagcgcttttcgatcccgcaggcgtcgccgatctggttgagtttggccttattgcgccggcagatcgcctccacatgagccttcggatgcgcctggtagatgggaatgaactccgctccgaacccgagccccacaatcgccacgttgacctgtccgcctttgcccatgatccgctctccttcgcttaaggatgccatgaaggtccatgccatgccgagcgcctcggtactccgatcagactaccgcggtcggatggcgccgtcaaatccaatgccgccctgttgaccctcttctgccacaaaggactcctctccgtatttctctggacaggcggataccaggacgatctaacgatggcatccatggcaacagaaaccgacaaggcgtcaaggtcggtgtattccgcgggaagaacgcggatggttggcggagtgacaatgatgcggacggcgttaattacgggggcgagttcgggcatcggcgcgacctgcgcggcagccctggcggcaaagggattcggcgtgttcctgatggccaggcgtcagcaacaactggagcaagttgctgcaaagatcaagaagggccacggggcgggcgatcgtgtggcgtggttcgccggtgacgttacggacgccgcggcgcgtcgaggcgcggtacggaccatgatggacggctggggccgcatcgatgtgttggtcaacaacgcaggatatgccctgcccggcgtgtgcgaagaagtctccttggacgatgtgcgcaaccagtttgaagtgaacaccttcgcggctctggcgatgatgcaactggtcgggccgcagatgcgcatgcagggtcacgggcgcatcatcaacatcagctcgatctccggccgattgtcgttcccgagcctgggcgtgtatgctgccagcaagcacgcgctggaggcgatcagcgatgcggcaagacaggagtaccggccgtggaacatcaaggtggtgctgatcgagcccagcgagatcgcctcggagatctggctccggaaccgaacgcttgtccgggagaaacaggaccagattccccacggcccgttcgccacgttctacacccgacaggcacggtggatcacccgcgtcctgaagagcggcgcggcttcggcagatgccgtcgcccgcactgtctgccgcgctgcaaccgtccggcgtccgcgcgcacgctattgcctgcccgcgaaggcccgcgtccgcatgcttatggcccacctgccggcctcgtggcaggactggctgattcgccaggcattgcgccgtgtcgaggatcgctgattcgcagacgcatccttgacacggaccgccccggcacacatacttccgccagtcttcacgattgagttcattaccgcttccgaatctggacatgcatgatgaaggaaacgccgttcatccatgaacgacaggtagcgatcgcggcggctcgatgcgccggcgcctatctcagagctaatcagcgtcaggccgcaatcgcacagatcaaaagcggtccccatgactatgccactgcccaggacctcggcgccgagagattgatcctggatgtgatccacgaacgcttccccgacgatgcgatcctctcggaagagtcgcacgcgcaacagtccggcggcgaacggctttgggtcgtcgacccgctggacggaacgcgcaactatgccaacggcctgccccattttgcggtctccatcgccttctgctggcgcggacaggcggtggtgggggttgtgtacgtcccctgcgaaggggacgagctgttctgggccgagcgtgagtgcggtgccttcctgaacgaacagcccctccagatggcgtccccgtcgaagtccctatcggccagcttggtcgcgacgggcttcgcgtactaccagggcgccgagcttgccccccacgtcgcgacgctggaggcggtaatgaacgtcgcgacggatgtgctgcggctgggatcggcggccaccgacatcagctacgttgccgccggacggctcggggcttattacgaatcgggtctcaagccgtgggacgtcgccgccgcggcgctgatcgtgcaggaagccggaggcatcgtctccgacacctcgggccaagccctcgatctgttcgcccgggacggcgccgcattctccctgaacgcgttggtcgccaagaacgctgccatccagcgccaactgatcgaactgctggccacgccgtgaatctcccacgaccttttcgtgacattcgagacaccttcttcccattgtgcccaacctcgccactcgacaatacgtagtttccacaattgacaaacgcctcgctaaaatcatatagtgcgagcgtatcggcacgttcggagtacgtcgccggcaaaggcatacccgtataaacggaaggcggggacacccggaaccattttctgcaaggaggcaggaccatgggaaagcaccaagttactgtatgcgcgctactcgcgctggcgggcaccgcggccgcccagagcatcactcttccatctctggttcgcaaaggcgcgatcgaaaccctggccgtggagccaacagagccgaccacagcctcaactgtggtgctgcgcgcgacggtcgccgacgccctgcgcctgattcgggcggagacccagcggatcggaagcaccttcatggtcaaaatctactggagcgagtcgtcggtcggcaacgcgagctcaggagtgtgtcgggagccgctgggaaagctggctaaaggaacctacttcgccatcgtgcagtccttctgcgacggtcatctggccggcagcaagcaactgtccttcaaggtggtcgaggctccgacgcccccggcgtggaaggcgatctacgatgtgtgggtcacgccccagaatccgaccacctcggacaacacggtcgtgaacgtttacggcaagtggccgacgggcggctactcgcagacggcttcgctggcacgtctcagcggccgaaccggcactgtggacctgtactgggaagcgccgcaggactccgtcgaccaggcggtgactcccttctactacggcgcgtcgctgaaaatggccctggccggcacatacacaatccgcgtgagagtctatctcgacgggcagctcgtggattgggaagagatctccgtcgaagtcgccgaaggcggcggaaacacgtggccgtgggaccccttcttctggggcatcgatctgccgtagaaaacgccggtttgcgggagtgtcccgccgcacgtcgggatactcccatcaccaccagtcggacgaccgcccgtccttgccatcgacccggcttcccaacggtcaaacggacaacgccgggagcagacgcacattgttagtgggtgcgacgcgcgaccaaccttcgacaagaagagaaacgggaatggcgggcaccgcctccccctcgttcatcaccctgaccgtacggtaagaatccattcccaagaaacggtgcccaccgcccttccatgggcaacaactgtatcgtacagccctggccgccggcgcctattgtggcaattgcgtattctccatcgtcaattctgatgagtcgccggtggcaaatcgcgtcagcgccggcacgaagcgagccggccgcctccgaatgggagcaacacacgcatcaaaagagggatttctgttgttttggcggccgctgtctggtacaaatgatagagtacggaagcgcaagttcgtgagcgcatcgccggcgcgcggcatcatgaaccagacacgccgccgggacggctcgcatcaagagtagtttcggaggccgcaacgcagggcactctgccgagcatgtggcagacatgaaacgcacgtacatctgcctggtgaacgatccaacggctttcttgaaggaggacgatcatgtcgagcaagctgatccgtgtgatggcattgacgtttgttctggcctgggccggaggtctcgccttcgcacaggacaatcagatcgtcaacggcgaatttgacgacggtctgaccggatggggccgctacggcacaaccggcttcgacgtgtcggtcgttcgcaacgcggggctatcgggcgcgaatgctgtcctgctggacgtaaccaacgccgcggcgaccgcaagcatcgggatcgcccagagcggcctgctgctggagccgggaaagacctaccccatcgggttcactgcgaaagcacagcagagccgagagatggtggtcctcgtccagacaaacctcaacaacacgaactggcccacccaggtggagcggaaagtgaatctgactcctaccgcccagacctatctcatcgaatacacgcacaccggagacaccttgggcgatcaggcgggcgagactgtaactctttacctgatgctgaagggtacctggtggccaatggtcggcagtgacctgaacgtgaaggtctggttcgaccgggtgtacttcggggcagagcccccgccaccacgaagagacctaccgaccgaccccgacccggccgacggcgccgcggacatctggcgggacacggacctcgtctggacatccggcgcattcgcgcagacgcacgacgtatacctcggaacggtcttcgccgacgtcaacgcagccgaccgagccaatcctatgggcgtgctggtcagccagggccagagcgacgcagcatacgacccgggccgcctcgaactcggccaaacctattactggcgaatcgacgaggtgaacgcgccgcccgacagcacgatcgtcaaagggccggtttggagcttcacgaccgagccgctggcatacccaatcgagaacatcatcgccaccagcaacggagtctccgagcccgccgccggaccgcagaacacggtcaacgggtccgggctcgatgccgccgatcagcactcgaccgtcagcagcaccatgtggttggccacgccgggcgctgagcctctgtacatacagtacgagttcgaccgcgtctatcaactgcaccagatgctggtctggaactacaacgtggattttgaactgattctcggcttcggactcaagggcgtcaccgtggcgtactccacggacggcgtcgactgggccgtgctgggagacgtggagttcgcccgggcgacggccaagccggggtacgtctacaatacgaccgtggattttggcggcgcggctgccaaatacgtccggctgaccgtcaacagcggctggggcatgctgggccagtacgggttgagcgaagtccgcttcctgtccatccccgcctatgcgaccagaccccagccggccgacggccagaccgaggtggacgtggcaacagccctgagctggcggcccagccgggcggcggcctcccaccggatctacttcggcacggatcccggcaccgtagccaccggcgccgaacccactgccaccgtcaccggcaatcgctatgtgcccgatgcgatccagtttagaggaaactactactggagaatcgatgaggtcaacgaagccgagccgaccccgatctggaaaggcgacgtctggagcttctcgacacaggcctacgaagtgatcgacgacttcgagagctacaccgacaatctcgacgccgggcaagccatcttcgacacctgggtcgatggctgggtcaacaacaccggagccacggtcggctacttcgatgtcccgttcgccgagcggaccatcgtccacggcggaacgcagtccatgccgctggagtacgacaacacagtctcgccgttctactccgaggccgagcggacctgggacagcccgcaggactggacggtgcacggcgccgataccctgaccgttcacttccgaggcaacccgccggccttcctggagacggccgacggcaacatcatcatgggcggcatcggggcggacatctggggaaccgccgatcagttccgcttcgcctacaagaacctcagcggaaacggctccatcgttgcgagggtcgagagcatcgcgaacacctggccctgggccaaaggcggcgtcatgatccgcgagcgcatcgaccccggtgcggcacacgcgatggtcgtgctcacgccggagaacggcgtggccctgcaataccgtcctacaatgaatggtaccagcctgaatgtcaatgagccggggctcgtggcgccgtactgggtaaaactcacgcgcacgggcaacgtgttcactgccgaacggtccgaggacggagtcacctgggtcagcatcaccgccgatccggccgcttcgtcggtccagatcactatggccgccaacgtatacatcgggctggccgtgacgagcaccaccctcaacgcggtcaccggcgccgagttctcaggcgtcgctaccacgggcaacgtcaccggacaatggcagaccgcctcaatcggactcgaacagccggccggcaataccgccgacacgctctatgtagccgtggaggacaacgccggaaagaccggcgtcgtggcacaccccgatccgctggcggtcctgcgacctgaatggcaggcatggcagattccggtggacgcgttcacttctgccggggtgaggatgaacaacgtcaagaccatgtacatcggcacaggcgagcgcgacaacccggcctcgggcggcgcgggcctgatctacatcgacgacatcaccttcggccgacccgttgcgggccagtagcggcgtccggccgaaacgggcggagcatcagggcgggttctcgaaccaggcgtaaatcgggaacccgccctgtctgatccggatcgtttgcgcccggtgtccagaggttcgtagtgacgccgtaaggcgttatcgctcccgggcgaagtatgccctcacgggcacaccacaaaccgggcggctacgcctgaaggacgtgctcctttgtgtcgatagaaaagcccggtgcgtgagggattattgttgccgacctgccacgggtttggtatcaatagagaggctcaggatggcgttttctcggacctactgcagccggagcggtctcggcccccgaaggccgagccggcggatcagttcttttatcggtcggaggttctggtgtcgggtctgccgcttcacacgaaccgaggctgaagtgcgagacctcacaccccgggatttccggctcgtcaattcgatctcgtggccggcgttttggctgaaggaaggaggtgagcgcggatctgacagcatttcacgtctgaaggaaggatctgaaagtacccccggaggcaactgcgtcgctggacgctgcatggggccagagctttgagattcggatgaagcgcaatcgtttctttggtctgtggaaggagaacactcatgtgcaggggattgaaccatctcattgtcgtgatgttgctgttgggagttgccgtgggccaggccctgggcagtccgtacatccgcgtcgcctactgggacgcaagtcaaggcaccgcctgggcgggagacggaatcgccgtgcgtgatgcgctggcacaggcggggtatgaggtgctcgatgcggccgcgctcaagacctggatggatgaccgcatcgccgaccgacggctcagcgtggtcgtgatgtgccgagacgtcgtcccgaccaccgtggccgagacccaggacgccaactgtacgatccgtcggtatctggacgccggcggcaaggtcgtctggtattcggactggcctttctattaccgcggtaccaccgggacgacgtggggttcgaacggcgccgtccaggtgctgggattcaacgccgccaccggaccgaatgaccagaatcagcaggtaaccttcaccgaagccgggattcgatgggggctggtcacaccctggtcgtccacgcgaccgacgtcaccgacggtgaccgacaacctgaccgtcctggcgctggacaacaacggcaacgccgccggctgggtcaagcattacctgccgggcgacaccttccgcggattcgtccgcatcgaggaccacagcggcgccccggccaatatccagaacctcatcgccgtggcagagtacgccgagtcgatcaacaccgcctccgggccggtgcctgaagacggcgcgaccgacatcccgcgcgacgtcgtgttgagctgggccgcaggcgagtccgccgtcacgcatgacgtctacttcggcgcctcgttcgaagacgtcaacgccgccagccggggcaatccgctgggcgtgttgctcagccagagccagtcgggcaccacgttcgatccgcccggcgtcctcgacttcgggacgacctactactggcgcatcgacgaggtcaacggcgctcccgatttcacggtcttcaagggcgaggtgtggagcttcaccgccgaaccgttcgcctacgcgatcgccaacatcatcgccaccaccaacgcgacctcggacgtgggagcggggcccgagaacacgatcaacggttccggcctcaacgccggcgatcaacactcgatcaacagcaccgatatgtggctcgcccggccggcggacaccgagccggtatggattcaatacgagttcgacagcgtctacaagctctacgagatgctcgtctggaactacaacgtgcagttcgagttgctgctgggcttcgggatcaaagacgtgaccgtcgagtactccgagaacggcaccgactggaccaccctgggcgacgtgcaactggcccaggccaccgcccgatcgacctacgccgccaacacgacggtggacctccagggcgtgcccgccaagttcgtccgcatgaccgtccacagcggttacggcatgatgccgcagtacgggctgagcgaagtccgcttcctgtacattcctgcacatccgcgggagccgcacccggccgacggcacgatcggcgtgagcccgacgaccacgttgagctggcgagccggacgagaggccgcctcgcacgaaatctatctgagcaccagcaaatcggctgtggccgacggcacggctctggccgccacggtcgataccgccagctacagtccggccgacgtcgaattcggatcgcgatactactggaaggtcgccgaggtcaatgacgccgaggccatcagcacctgggccggaccggtctggagctttgtcacgcaggaatacgagaacatcgaaggattcgaagactacaacgatgatctcgacgccaagacgaccatcttcgacacctggctggacggctggatcaacaacacgggctcgaccgtcggctacttcgacgccccgtttgccgagaggaccatcgtccgcagcggccggcaggccatgccgttgacgtatgacaacacgaagtcgccgttctactccgaggccgagcggacctgggacaccgcccagaactggaccggccatggggccgacaccctcgtgctgtacgtgcgaggcaatgcgccgtccttcgtggagaccgccggcgggggcatcctcatgagcgccatcggcacggacatctggaacaatacagaccagttccgttacgcctacaagagcctgggcggcaacggctcgatcacggtccgcgtcgacagcctggtcctcagcaacgagtgggccaaagccggtgtgatgatccgcgagacgctggagccgggctcgaagcacgcgttcgtggcgttgacgccgacaccgtcgcatggcctctcgttccagcatcgtccggtggccggacaggccagcgccaatacggacgtggccaatatcccgcttccgcactgggtgcgtctgacgcggacgggcaatatcttcaccgcccaccactcggccgacggcgtcacctggagcgaggtcgtggtcagcccggcgctggatatccagatggccagcaacgtgtacatcggtttggcgctgtgcagccacgatgggactatctcgaccgccgccgagttctccaatatcgcgacgaccggcaacgtaacgggcgcctggcagacggcggagatcggcgtcgcgcagccgaagggcaatgctgccgatgcgatgtacgtccggatcgaggacagcgccggcaagaccaagacggtcgtcaacgccgacgccgccattacggtgcgtccaacgtggcaggaatggaggattccgtacagcgagctaaacggggtgaacctcggccgcgtcgagaagatggtgatcggcgtcggaagcgctaccgcgccgaaagccggcggcaccggtaccgtctatatcgacgacatcggctacggtcgtccggccccggagccgacctatgtgaacctgctggccaacggcggctttgaggatggggtcatggcgccgtggagcacctatggcaacgtgaccgccgaggtcgtctctgccggggccatagaaggcgattcctgtctgcacctcacggtacactctgccggcgcgaatttctgggatgccggcttgcagcacaccgggcatgtgttcgaggcgggcaagcagtacacgctttcggcctttctgcggtgcagcgccgggacgctggacatcaacttcaagccggaactggcggccgatccctggacgggctatggcgatcagatcttcaccatgacggacgaatggacggagttcagcgtcacgacccccgttctgagcgccaccgtcagcccggcggccatcaccttccatattgctttcgcggccgccgatttctggatcgataatgtgagattctacgaagggcagtacgttgcgccgtagcacggcagtctgacggcagaaatggagtatcaaccgagggcagggcgaccacaggttaccctgcccttttccatggctcggccaacggcatgcagatcgccgagatcgaactgctgggtacggtcgaataaccacccatctcgcggccgaaggtatgccagggggcctgcaccctcgcggtgcgggccccttctattccttgctgacgtgacctcgtgctcctcggctcggtcaggaacctgtgttgccgccgaagagcagatcgagcaggtcgtgccactgggagaagtcgggcacaacgatctgggcaccggccttgatcaggcgcgtgcgcttctccggattgagaccatagcgacgaacctcatccgaagcaatgccgacggcgatgccaccccgcttgtgacactcacgcatctctacgggaccgtctccgaagaccgccagctcgggcccggacaggtggttctccgtcatgatccgatcgatgaccatgcgtttcgagtacttggtgacatcgccgacggcaccgtaaatgccgccgttgaaaaactcggcgtagttcaggacgcgggactcacgaaccacatcctcctgatcggtcccgctggccagatacagcgtgacccctcgattgcgcagggccgccaggaaatcgacggcccctttgaccgtaaaatcgctgacatcgagctggccgcgttcgagccgcgcgatgcgctggttcaccacctccatgagggcccgattgtagatgtccttgtagccgaacttgtcgagaaccttgtcgggcgcaacgaggccgaattcccggaccatctcgacgagcgcttccatctggaggatcgtctggatgccggtcgactggtcgatgtattcgagcacccggcgacgcaccttctcgtaaagcgacacatcggccgtacgatactgctcgcccagaatggcctcgatcatcacgggggccatcacctgctcccaaccctggcggagcgtgctgacggtgccgtcggcgtcgaagaccgcgtgtttgatccggccgaacggaatcgcctccccgcacagctcgatgtcgcttccttccacataacgggcctttcgcaggtcttcggccagctcgggctgatagatgtagtccggcgacttgccgaccacgaggatctcctgccccgaagccgtacctgtctgaaacagcttctggaccgtcaccgccgccgccaggttggcgaactcggccgcttcagcacaagagacgcctgctccgaggcacaatgccagtgcgctggtcacggtgtcgccggccccgaccggatcgagtttcttgagcagttggatacccggaatctcatgaagaccatcgcgatcgacggcgaggatgccgcgaggcccgcgggtcaggaacacgggcttgcgggactgctcgtacaaacgacgggcatacatccgaacatcttccagcggcagactttcggccaggcccacctcgaccccgttgagcgaggccgcctcgcggtcattggtcttgcggcagatccccttgaatttccggccatagtgacgcgaatcgagcaggacaaccttctcggggaattctgcgaagagcgcgttggcccggtcgataaagctctcatcgggaatgctgccggggacctgttgattgacgatcagcgcgtcggcggtctccagggcccggcggatgccggccagcaacgcctcatcggtttccggactgcgccggttgaagaagccgaagtccatccgcggctgctcgcggtcgtccaggtacggcttggcgaacgtcactgtatcgtagttctcgcgctggatcaccaggctcgtcgcatccacgcccagcgcatccaattgccggcgcagctcgcgtccgtacaggtcgtcgcccaccaccccgatgacctggatcgcccgcggttccagcgccgccagattggcgacgacgttcgaggcgccgccgagcgaataatagtgccgcgccaccgcccgggcctggaggccggtctcgacggagacctccgaccctttcggatcgagaatccagtaggcgtcgagacagaaatcgccataaacggcgacggttacattcctgatacgatccagaatctcacggatgcgctgctcgttcatcctgcccctctcagagtccctggagaatcgcccgatacaacagcggaaacgtcgcccgctggtcgccctgcacgtacagcccgcggccgccaaaggcttgaggaatccgggtcacgacgctcttttgatcacggaagtaataccctggcgccgcttcgtcggccatctggcccgggtcatgcgggcgcaggtcaaagtcgatcgtcaggatgtcacgcggggtggcgccgacgttggcggccatcgagacagccttgagcaacacctcgggcccggtgacggcgctgccgatattgagcacgacgccgccttcggtcagcttcgtgacctcgtggacatagatcaggaaatcgcggccggaacagccgcccttggcctgcccgtcgaagctcgggtgctggtcgatcacatcggtcccgatccccacgtgcacggtgaaaggcacctcgtgacgatagcaggccgccagcacactggcctccggatgagcaaaccgccgcggcgacccttcccgcgccacgagagccagaatctgcttgcggaatgcctcgtcacagatcatccggccgagcgtctcgccatagcccagcttctgctggttgcccacgctcagcgccatgttgatgtaagcgaactcgtaggccatgccgaactgccctttgcccagagcggccggaacgttctcgctggtttggccgatcagggccagctcgaaatcgtgaatcgtcgtcgccgcgttgcccgccacaagcgtgacaaagcggcgttcgaccagatcgaccaaaagcggccccagcccgttcttgatcagatgcgcgccggtaaagaggatgaccggctttttcgcccgacgggctgcgacgacggcttcggccaccatgcgaatgtcacgcgccgtcggctcgggcacatcgaggtgcagtgcatcgagcccgcccggaaagaccagatcgccgagcatgaccttgttgctgcggccttcgagcggatacgttgcgatccggctcgaatcgaatgccttgtatctgccttcgtactccatcgcgtcgtccgctcagaggctcgcccgcaacttctccaggcgtttgatgcactcgatcatacagcgaatggtgtggtagttgaccttccacgaatggctcatgtgcgtccagatgggttggccctcgcgggtcatcagaggccaccactcccccaccgagtggtggatcattttgtcgaaaacgaagcggtgaacattcacatacgccggccagtagaccttcggcccgaaccgcaggcagccctccagcatgccgatcatcacctcggcctgctgccagaattccttctccatgtcgtagacgccgccggcgtgcggaccctcggtgtagacgccgccgaactcggggtcgatgccgttcttgcggccgtggtccatcgccttcttgatgatcttctggtagtcgtcccaacccgtgccgagaacatcggtggcatgggccagcagccaggcgaactcgacgttgtgtccggcggacgtgttgtcctcggcatgggccttcttgccgccctcggcaaagcggtcccagccccagacgatatcgaacttgatctgcggggcgaccttccagtccgcggtgaattgcggaatcccggtggcataccgcgggtgcaggatgcgcttgcacagcaactcgatgtcttcgagcagggtgcggcgatggatgttctggccggtgcattcgaacaggttcgtgaaggcttccatcaggtgcatgtgcacgtcgagggtcttgcggtcgcccccctggggtccgggcccacacaggtcccagttgcgctcgaacatctcccagtaccccccgtacgtcgtctcggcgcagtacttcttgacgagatcgaacgttttctccgcgtattcctgccctcgcgggtcgccggtggccatcgtgtattcggtcagcccgtacatggcgaagctcaggccgtagaggatcttcttgtcgatcgtcacttcgcccttgcggttggtcatccagtagaagccgccgtactgcttgtcccacatcttctcgataacgaaatcgacaccgtgcctggcgtactcggcacagcggccgccgccatagccggcgcgatgggccgctgacatcgagtagatcgtccgcatctggctcagcatcgacttctcatcggttccggcgtctttgccgtccttgtcgaagtgcgtgatgtacccgccgttgacgtcgtccttgcaccgatccagccagaacggcagcagttccgtcgtgaaatgcttcttgcactcgtccagacagctcgatacttgatcgcggtcgatacgcattgccgaaccctttcacccagtcgccatagctcaaaacccgcacgcaatccgggcattctatgcccccccgccgcagccgtcaataacaccttcgatcaccgccagggcaatcgcaaagtcatgccgtgaggaccttcaggaggtagtcttcgtcccaaccggctcgcaggcgtttgactttgatgcccactttctcggtggtctctcgcttgagcaggttcagagcgatgcgtcgcagtcgcgagaaattctcggccgcgtagccgttgcgaatccggc

SEQ ID NO: 504 - DNA, 394668 bp, Artificial Sequence
  Synthetic Oligonucleotide
gccggattcgcaacggctacgcggccgagaatttctcgcgactgcgacgcatcgctctgaacctgctcaagcgagagaccaccgagaaagtgggcatcaaagtcaaacgcctgcgagccggttgggacgaagactacctcctgaaggtcctcacggcatgactttgcgattgccctggcggtgatcgaaggtgttattgacggctgcggcgggggggcatagaatgcccggattgcgtgcgggttttgagctatggcgactgggtgaaagggttcggcaatgcgtatcgaccgcgatcaagtatcgagctgtctggacgagtgcaagaagcatttcacgacggaactgctgccgttctggctggatcggtgcaaggacgacgtcaacggcgggtacatcacgcacttcgacaaggacggcaaagacgccggaaccgatgagaagtcgatgctgagccagatgcggacgatctactcgatgtcagcggcccatcgcgccggctatggcggcggccgctgtgccgagtacgccaggcacggtgtcgatttcgttatcgagaagatgtgggacaagcagtacggcggcttctactggatgaccaaccgcaagggcgaagtgacgatcgacaagaagatcctctacggcctgagcttcgccatgtacgggctgaccgaatacacgatggccaccggcgacccgcgagggcaggaatacgcggagaaaacgttcgatctcgtcaagaagtactgcgccgagacgacgtacggggggtactgggagatgttcgagcgcaactgggacctgtgtgggcccggaccccaggggggcgaccgcaagaccctcgacgtgcacatgcacctgatggaagccttcacgaacctgttcgaatgcaccggccagaacatccatcgccgcaccctgctcgaagacatcgagttgctgtgcaagcgcatcctgcacccgcggtatgccaccgggattccgcaattcaccgcggactggaaggtcgccccgcagatcaagttcgatatcgtctggggctgggaccgctttgccgagggcggcaagaaggcccatgccgaggacaacacgtccgccggacacaacgtcgagttcgcctggctgctggcccatgccaccgatgttctcggcacgggttgggacgactaccagaagatcatcaagaaggcgatggaccacggccgcaagaacggcatcgaccccgagttcggcggcgtctacaccgagggtccgcacgccggcggcgtctacgacatggagaaggaattctggcagcaggccgaggtgatgatcggcatgctggagggctgcctgcggttcgggccgaaggtctactggccggcgtatgtgaatgttcaccgcttcgttttcgacaaaatgatccaccactcggtgggggagtggtggcctctgatgacccgcgagggccaacccatctggacgcacatgagccattcgtggaaggtcaactaccacaccattcgctgtatgatcgagtgcatcaaacgcctggagaagttgcgggcgagcctctgagcggacgacgcgatggagtacgaaggcagatacaaggcattcgattcgagccggatcgcaacgtatccgctcgaaggccgcagcaacaaggtcatgctcggcgatctggtctttccgggcgggctcgatgcactgcacctcgatgtgcccgagccgacggcgcgtgacattcgcatggtggccgaagccgtcgtcgcagcccgtcgggcgaaaaagccggtcatcctctttaccggcgcgcatctgatcaagaacgggctggggccgcttttggtcgatctggtcgaacgccgctttgtcacgcttgtggcgggcaacgcggcgacgacgattcacgatttcgagctggccctgatcggccaaaccagcgagaacgttccggccgctctgggcaaagggcagttcggcatggcctacgagttcgcttacatcaacatggcgctgagcgtgggcaaccagcagaagctgggctatggcgagacgctcggccggatgatctgtgacgaggcattccgcaagcagattctggctctcgtggcgcgggaagggtcgccgcggcggtttgctcatccggaggccagtgtgctggcggcctgctatcgtcacgaggtgcctttcaccgtgcacgtggggatcgggaccgatgtgatcgaccagcacccgagcttcgacgggcaggccaagggcggctgttccggccgcgatttcctgatctatgtccacgaggtcacgaagctgaccgaaggcggcgtcgtgctcaatatcggcagcgccgtcaccgggcccgaggtgttgctcaaggctgtctcgatggccgccaacgtcggcgccaccccgcgtgacatcctgacgatcgactttgacctgcgcccgcatgacccgggccagatggccgacgaagcggcgccagggtattacttccgtgatcaaaagagcgtcgtgacccggattcctcaagcctttggcggccgcgggctgtacgtgcagggcgaccagcgggcgacgtttccgctgttgtatcgggcgattctccagggactctgagaggggcaggatgaacgagcagcgcatccgtgagattctggatcgtatcaggaatgtaaccgtcgccgtttatggcgatttctgtctcgacgcctactggattctcgatccgaaagggtcggaggtctccgtcgagaccggcctccaggcccgggcggtggcgcggcactattattcgctcggcggcgcctcgaacgtcgtcgccaatctggcggcgctggaaccgcgggcgatccaggtcatcggggtggtgggcgacgacctgtacggacgcgagctgcgccggcaattggatgcgctgggcgtggatgcgacgagcctggtgatccagcgcgagaactacgatacagtgacgttcgccaagccgtacctggacgaccgcgagcagccgcggatggacttcggcttcttcaaccggcgcagtccggaaaccgatgaggcgttgctggccggcatccgccgggccctggagaccgccgacgcgctgatcgtcaatcaacaggtccccggcagcattcccgatgagagctttatcgaccgggccaacgcgctcttcgcagaattccccgagaaggttgtcctgctcgattcgcgtcactatggccggaaattcaaggggatctgccgcaagaccaatgaccgcgaggcggcctcgctcaacggggtcgaggtgggcctggccgaaagtctgccgctggaagatgttcggatgtatgcccgtcgtttgtacgagcagtcccgcaagcccgtgttcctgacccgcgggcctcgcggcatcctcgccgtcgatcgcgatggtcttcatgagattccgggtatccaactgctcaagaaactcgatccggtcggggccggcgacaccgtgaccagcgcactggcattgtgcctcggagcaggcgtctcttgtgctgaagcggccgagttcgccaacctggcggcggcggtgacggtccagaagctgtttcagacaggtacggcttcggggcaggagatcctcgtggtcggcaagtcgccggactacatctatcagcccgagctggccgaagacctgcgaaaggcccgttatgtggaaggaagcgacatcgagctgtgcggggaggcgattccgttcggccggatcaaacacgcggtcttcgacgccgacggcaccgtcagcacgctccgccagggttgggagcaggtgatggcccccgtgatgatcgaggccattctgggcgagcagtatcgtacggccgatgtgtcgctttacgagaaggtgcgtcgccgggtgctcgaatacatcgaccagtcgaccggcatccagacgatcctccagatggaagcgctcgtcgagatggtccgggaattcggcctcgttgcgcccgacaaggttctcgacaagttcggctacaaggacatctacaatcgggccctcatggaggtggtgaaccagcgcatcgcgcggctcgaacgcggccagctcgatgtcagcgattttacggtcaaaggggccgtcgatttcctggcggccctgcgcaatcgaggggtcacgctgtatctggccagcgggaccgatcaggaggatgtggttcgtgagtcccgcgtcctgaactacgccgagtttttcaacggcggcatttacggtgccgtcggcgatgtcaccaagtactcgaaacgcatggtcatcgatcggatcatgacggagaaccacctgtccgggcccgagctggcggtcttcggagacggtcccgtagagatgcgtgagtgtcacaagcggggtggcatcgccgtcggcattgcttcggatgaggttcgtcgctatggtctcaatccggagaagcgcacgcgcctgatcaaggccggtgcccagatcgttgtgcccgacttctcccagtggcacgacctgctcgatctgctcttcggcggcaacacaggttcctgaccgagccgaggagcacgaggtcacgtcagcaaggaatagaaggggcccgcaccgcgagggtgcaggccccctggcataccttcggccgcgagatgggtggttattcgaccgtacccagcagttcgatctcggcgatctgcatgccgttggccgagccatggaaaagggcagggtaacctgtggtcgccctgccctcggttgatactccatttctgccgtcagactgccgtgctacggcgcaacgtactgcccttcgtagaatctcacattatcgatccagaaatcggcggccgcgaaagcaatatggaaggtgatggccgccgggctgacggtggcgctcagaacgggggtcgtgacgctgaactccgtccattcgtccgtcatggtgaagatctgatcgccatagcccgtccagggatcggccgccagttccggcttgaagttgatgtccagcgtcccggcgctgcaccgcagaaaggccgaaagcgtgtactgcttgcccgcctcgaacacatgcccggtgtgctgcaagccggcatcccagaaattcgcgccggcagagtgtaccgtgaggtgcagacaggaatcgccttctatggccccggcagagacgacctcggcggtcacgttgccataggtgctccacggcgccatgaccccatcctcaaagccgccgttggccagcaggttcacataggtcggctccggggccggacgaccgtagccgatgtcgtcgatatagacggtaccggtgccgccggctttcggcgcggtagcgcttccgacgccgatcaccatcttctcgacgcggccgaggttcaccccgtttagctcgctgtacggaatcctccattcctgccacgttggacgcaccgtaatggcggcgtcggcgttgacgaccgtcttggtcttgccggcgctgtcctcgatccggacgtacatcgcatcggcagcattgcccttcggctgcgcgacgccgatctccgccgtctgccaggcgcccgttacgttgccggtcgtcgcgatattggagaactcggcggcggtcgagatagtcccatcgtggctgcacagcgccaaaccgatgtacacgttgctggccatctggatatccagcgccgggctgaccacgacctcgctccaggtgacgccgtcggccgagtggtgggcggtgaagatattgcccgtccgcgtcagacgcacccagtgcggaagcgggatattggccacgtccgtattggcgctggcctgtccggccaccggacgatgctggaacgagaggccatgcgacggtgtcggcgtcaacgccacgaacgcgtgcttcgagcccggctccagcgtctcgcggatcatcacaccggctttggcccactcgttgctgaggaccaggctgtcgacgcggaccgtgatcgagccgttgccgcccaggctcttgtaggcgtaacggaactggtctgtattgttccagatgtccgtgccgatggcgctcatgaggatgcccccgccggcggtctccacgaaggacggcgcattgcctcgcacgtacagcacgagggtgtcggccccatggccggtccagttctgggcggtgtcccaggtccgctcggcctcggagtagaacggcgacttcgtgttgtcatacgtcaacggcatggcctgccggccgctgcggacgatggtcctctcggcaaacggggcgtcgaagtagccgacggtcgagcccgtgttgttgatccagccgtccagccaggtgtcgaagatggtcgtcttggcgtcgagatcatcgttgtagtcttcgaatccttcgatgttctcgtattcctgcgtgacaaagctccagaccggtccggcccaggtgctgatggcctcggcgtcattgacctcggcgaccttccagtagtatcgcgatccgaattcgacgtcggccggactgtagctggcggtatcgaccgtggcggccagagccgtgccgtcggccacagccgatttgctggtgctcagatagatttcgtgcgaggcggcctctcgtccggctcgccagctcaacgtggtcgtcgggctcacgccgatcgtgccgtcggccgggtgcggctcccgcggatgtgcaggaatgtacaggaagcggacttcgctcagcccgtactgcggcatcatgccgtaaccgctgtggacggtcatgcggacgaacttggcgggcacgccctggaggtccaccgtcgtgttggcggcgtaggtcgatcgggcggtggcctgggccagttgcacgtcgcccagggtggtccagtcggtgccgttctcggagtactcgacggtcacgtctttgatcccgaagcccagcagcaactcgaactgcacgttgtagttccagacgagcatctcgtagagcttgtagacgctgtcgaactcgtattgaatccataccggctcggtgtccgccggccgggcgagccacatatcggtgctgttgatcgagtgttgatcgccggcgttgaggccggaaccgttgatcgtgttctcgggccccgctcccacgtccgaggtcgcgttggtggtggcgatgatgttggcgatcgcgtaggcgaacggttcggcggtgaagctccacacctcgcccttgaagaccgtgaaatcgggagcgccgttgacctcgtcgatgcgccagtagtaggtcgtcccgaagtcgaggacgccgggcggatcgaacgtggtgcccgactggctctggctgagcaacacgcccagcggattgccccggctggcggcgttgacgtcttcgaacgaggcgccgaagtagacgtcatgcgtgacggcggactcgcctgcggcccagctcaacacgacgtcgcgcgggatgtcggtcgcgccgtcttcaggcaccggcccggaggcggtgttgatcgactcggcgtactctgccacggcgatgaggttctggatattggccggggcgccgctgtggtcctcgatgcggacgaatccgcggaaggtgtcgcccggcaggtaatgcttgacccagccggcggcgttgccgttgttgtccagcgccaggacggtcaggttgtcggtcaccgtcggtgacgtcggtcgcgtggacgaccagggtgtgaccagcccccatcgaatcccggcttcggtgaaggttacctgctgattctggtcattcggtccggtggcggcgttgaatcccagcacctggacggcgccgttcgaaccccacgtcgtcccggtggtaccgcggtaatagaaaggccagtccgaataccagacgaccttgccgccggcgtccagataccgacggatcgtacagttggcgtcctgggtctcggccacggtggtcgggacgacgtctcggcacatcacgaccacgctgagccgtcggtcggcgatgcggtcatccatccaggtcttgagcgcggccgcatcgagcacctcataccccgcctgtgccagcgcatcacgcacggcgattccgtctcccgcccaggcggtgccttgacttgcgtcccagtaggcgacgcggatgtacggactgcccagggcctggcccacggcaactcccaacagcaacatcacgacaatgagatggttcaatcccctgcacatgagtgttctccttccacagaccaaagaaacgattgcgcttcatccgaatctcaaagctctggccccatgcagcgtccagcgacgcagttgcctccgggggtactttcagatccttccttcagacgtgaaatgctgtcagatccgcgctcacctccttccttcagccaaaacgccggccacgagatcgaattgacgagccggaaatcccggggtgtgaggtctcgcacttcagcctcggttcgtgtgaagcggcagacccgacaccagaacctccgaccgataaaagaactgatccgccggctcggccttcgggggccgagaccgctccggctgcagtaggtccgagaaaacgccatcctgagcctctctattgataccaaacccgtggcaggtcggcaacaataatccctcacgcaccgggcttttctatcgacacaaaggagcacgtccttcaggcgtagccgcccggtttgtggtgtgcccgtgagggcatacttcgcccgggagcgataacgccttacggcgtcactacgaacctctggacaccgggcgcaaacgatccggatcagacagggcgggttcccgatttacgcctggttcgagaacccgccctgatgctccgcccgtttcggccggacgccgctactggcccgcaacgggtcggccgaaggtgatgtcgtcgatgtagatcaggcccgcgccgcccgaggccgggttgtcgcgctcgcctgtgccgatgtacatggtcttgacgttgttcatcctcaccccggcagaagtgaacgcgtccaccggaatctgccatgcctgccattcaggtcgcaggaccgccagcggatcggggtgtgccacgacgccggtctttccggcgttgtcctccacggctacatagagcgtgtcggcggtattgccggccggctgttcgagtccgattgaggcggtctgccattgtccggtgacgttgcccgtggtagcgacgcctgagaactcggcgccggtgaccgcgttgagggtggtgctcgtcacggccagcccgatgtatacgttggcggccatagtgatctggaccgacgaagcggccggatcggcggtgatgctgacccaggtgactccgtcctcggaccgttcggcagtgaacacgttgcccgtgcgcgtgagttttacccagtacggcgccacgagccccggctcattgacattcaggctggtaccattcattgtaggacggtattgcagggccacgccgttctccggcgtgagcacgaccatcgcgtgtgccgcaccggggtcgatgcgctcgcggatcatgacgccgcctttggcccagggccaggtgttcgcgatgctctcgaccctcgcaacgatggagccgtttccgctgaggttcttgtaggcgaagcggaactgatcggcggttccccagatgtccgccccgatgccgcccatgatgatgttgccgtcggccgtctccaggaaggccggcgggttgcctcggaagtgaacggtcagggtatcggcgccgtgcaccgtccagtcctgcgggctgtcccaggtccgctcggcctcggagtagaacggcgagactgtgttgtcgtactccagcggcatggactgcgttccgccgtggacgatggtccgctcggcgaacgggacatcgaagtagccgaccgtggctccggtgttgttgacccagccatcgacccaggtgtcgaagatggcttgcccggcgtcgagattgtcggtgtagctctcgaagtcgtcgatcacttcgtaggcctgtgtcgagaagctccagacgtcgcctttccagatcggggtcggctcggcttcgttgacctcatcgattctccagtagtagtttcctctaaactggatcgcatcgggcacatagcgattgccggtgacggtggcagtgggttcggcgccggtggctacggtgccgggatccgtgccgaagtagatccggtgggaggccgccgcccggctgggccgccagctcagggctgttgccacgtccacctcggtctggccgtcggccggctggggtctggtcgcataggcggggatggacaggaagcggacttcgctcaacccgtactggcccagcatgccccagccgctgttgacggtcagccggacgtatttggcagccgcgccgccaaaatccacggtcgtattgtagacgtaccccggcttggccgtcgcccgggcgaactccacgtctcccagcacggcccagtcgacgccgtccgtggagtacgccacggtgacgcccttgagtccgaagccgagaatcagttcaaaatccacgttgtagttccagaccagcatctggtgcagttgatagacgcggtcgaactcgtactgtatgtacagaggctcagcgcccggcgtggccaaccacatggtgctgctgacggtcgagtgctgatcggcggcatcgagcccggacccgttgaccgtgttctgcggtccggcggcgggctcggagactccgttgctggtggcgatgatgttctcgattgggtatgccagcggctcggtcgtgaagctccaaaccggccctttgacgatcgtgctgtcgggcggcgcgttcacctcgtcgattcgccagtaataggtttggccgagttcgaggcggcccgggtcgtatgctgcgtcgctctggccctggctgaccagcacgcccataggattggctcggtcggctgcgttgacgtcggcgaagaccgttccgaggtatacgtcgtgcgtctgcgcgaatgcgccggatgtccagacgaggtccgtgtcccgccagatgtccgcggcgccgtcggccgggtcggggtcggtcggtaggtctcttcgtggtggcgggggctctgccccgaagtacacccggtcgaaccagaccttcacgttcaggtcactgccgaccattggccaccaggtacccttcagcatcaggtaaagagttacagtctcgcccgcctgatcgcccaaggtgtctccggtgtgcgtgtattcgatgagataggtctgggcggtaggagtcagattcactttccgctccacctgggtgggccagttcgtgttgttgaggtttgtctggacgaggaccaccatctctcggctctgctgtgctttcgcagtgaacccgatggggtaggtctttcccggctccagcagcaggccgctctgggcgatcccgatgcttgcggtcgccgcggcgttggttacgtccagcaggacagcattcgcgcccgatagccccgcgttgcgaacgaccgacacgtcgaagccggttgtgccgtagcggccccatccggtcagaccgtcgtcaaattcgccgttgacgatctgattgtcctgtgcgaaggcgagacctccggcccaggccagaacaaacgtcaatgccatcacacggatcagcttgctcgacatgatcgtcctccttcaagaaagccgttggatcgttcaccaggcagatgtacgtgcgtttcatgtctgccacatgctcggcagagtgccctgcgttgcggcctccgaaactactcttgatgcgagccgtcccggcggcgtgtctggttcatgatgccgcgcgccggcgatgcgctcacgaacttgcgcttccgtactctatcatttgtaccagacagcggccgccaaaacaacagaaatccctcttttgatgcgtgtgttgctcccattcggaggcggccggctcgcttcgtgccggcgctgacgcgatttgccaccggcgactcatcagaattgacgatggagaatacgcaattgccacaataggcgccggcggccagggctgtacgatacagttgttgcccatggaagggcggtgggcaccgtttcttgggaatggattcttaccgtacggtcagggtgatgaacgagggggaggcggtgcccgccattcccgtttctcttcttgtcgaaggttggtcgcgcgtcgcacccactaacaatgtgcgtctgctcccggcgttgtccgtttgaccgttgggaagccgggtcgatggcaaggacgggcggtcgtccgactggtggtgatgggagtatcccgacgtgcggcgggacactcccgcaaaccggcgttttctacggcagatcgatgccccagaagaaggggtcccacggccacgtgtttccgccgccttcggcgacttcgacggagatctcttcccaatccacgagctgcccgtcgagatagactctcacgcggattgtgtatgtgccggccagggccattttcagcgacgcgccgtagtagaagggagtcaccgcctggtcgacggagtcctgcggcgcttcccagtacaggtccacagtgccggttcggccgctgagacgtgccagcgaagccgtctgcgagtagccgcccgtcggccacttgccgtaaacgttcacgaccgtgttgtccgaggtggtcggattctggggcgtgacccacacatcgtagatcgccttccacgccgggggcgtcggagcctcgaccaccttgaaggacagttgcttgctgccggccagatgaccgtcgcagaaggactgcacgatggcgaagtaggttcctttagccagctttcccagcggctcccgacacactcctgagctcgcgttgccgaccgacgactcgctccagtagattttgaccatgaaggtgcttccgatccgctgggtctccgcccgaatcaggcgcagggcgtcggcgaccgtcgcgcgcagcaccacagttgaggctgtggtcggctctgttggctccacggccagggtttcgatcgcgcctttgcgaaccagagatggaagagtgatgctctgggcggccgcggtgcccgccagcgcgagtagcgcgcatacagtaacttggtgctttcccatggtcctgcctccttgcagaaaatggttccgggtgtccccgccttccgtttatacgggtatgcctttgccggcgacgtactccgaacgtgccgatacgctcgcactatatgattttagcgaggcgtttgtcaattgtggaaactacgtattgtcgagtggcgaggttgggcacaatgggaagaaggtgtctcgaatgtcacgaaaaggtcgtgggagattcacggcgtggccagcagttcgatcagttggcgctggatggcagcgttcttggcgaccaacgcgttcagggagaatgcggcgccgtcccgggcgaacagatcgagggcttggcccgaggtgtcggagacgatgcctccggcttcctgcacgatcagcgccgcggcggcgacgtcccacggcttgagacccgattcgtaataagccccgagccgtccggcggcaacgtagctgatgtcggtggccgccgatcccagccgcagcacatccgtcgcgacgttcattaccgcctccagcgtcgcgacgtggggggcaagctcggcgccctggtagtacgcgaagcccgtcgcgaccaagctggccgatagggacttcgacggggacgccatctggaggggctgttcgttcaggaaggcaccgcactcacgctcggcccagaacagctcgtccccttcgcaggggacgtacacaacccccaccaccgcctgtccgcgccagcagaaggcgatggagaccgcaaaatggggcaggccgttggcatagttgcgcgttccgtccagcgggtcgacgacccaaagccgttcgccgccggactgttgcgcgtgcgactcttccgagaggatcgcatcgtcggggaagcgttcgtggatcacatccaggatcaatctctcggcgccgaggtcctgggcagtggcatagtcatggggaccgcttttgatctgtgcgattgcggcctgacgctgattagctctgagataggcgccggcgcatcgagccgccgcgatcgctacctgtcgttcatggatgaacggcgtttccttcatcatgcatgtccagattcggaagcggtaatgaactcaatcgtgaagactggcggaagtatgtgtgccggggcggtccgtgtcaaggatgcgtctgcgaatcagcgatcctcgacacggcgcaatgcctggcgaatcagccagtcctgccacgaggccggcaggtgggccataagcatgcggacgcgggccttcgcgggcaggcaatagcgtgcgcgcggacgccggacggttgcagcgcggcagacagtgcgggcgacggcatctgccgaagccgcgccgctcttcaggacgcgggtgatccaccgtgcctgtcgggtgtagaacgtggcgaacgggccgtggggaatctggtcctgtttctcccggacaagcgttcggttccggagccagatctccgaggcgatctcgctgggctcgatcagcaccaccttgatgttccacggccggtactcctgtcttgccgcatcgctgatcgcctccagcgcgtgcttgctggcagcatacacgcccaggctcgggaacgacaatcggccggagatcgagctgatgttgatgatgcgcccgtgaccctgcatgcgcatctgcggcccgaccagttgcatcatcgccagagccgcgaaggtgttcacttcaaactggttgcgcacatcgtccaaggagacttcttcgcacacgccgggcagggcatatcctgcgttgttgaccaacacatcgatgcggccccagccgtccatcatggtccgtaccgcgcctcgacgcgccgcggcgtccgtaacgtcaccggcgaaccacgccacacgatcgcccgccccgtggcccttcttgatctttgcagcaacttgctccagttgttgctgacgcctggccatcaggaacacgccgaatccctttgccgccagggctgccgcgcaggtcgcgccgatgcccgaactcgcccccgtaattaacgccgtccgcatcattgtcactccgccaaccatccgcgttcttcccgcggaatacaccgaccttgacgccttgtcggtttctgttgccatggatgccatcgttagatcgtcctggtatccgcctgtccagagaaatacggagaggagtcctttgtggcagaagagggtcaacagggcggcattggatttgacggcgccatccgaccgcggtagtctgatcggagtaccgaggcgctcggcatggcatggaccttcatggcatccttaagcgaaggagagcggatcatgggcaaaggcggacaggtcaacgtggcgattgtggggctcgggttcggagcggagttcattcccatctaccaggcgcatccgaaggctcatgtggaggcgatctgccggcgcaataaggccaaactcaaccagatcggcgacgcctgcgggatcgaaaagcgctacacgagctatgagagactgctggccgatccggcaattgatttcgtccacatcaactcgccgatcccggaccacgcgccgatgtcgattgcggcgctgaaggcaggcaagcatgtgatgtgcaccgtcccgatggcgacgaccatcgacgagtgccggcagatcgtctcgctcgtcaagaagacggggctgaagtacatgatggccgagacggtggtgtacagccgcgagttcctgttcctcaaggagatgtacgagaagggcgagttgggcaggatccagtatatgcaggcgtcacatccccaggacatggagggctggcccgagtattgggagcggatgatcccgatgcactacgctacgcacgtggtttcgcccgtgctgggcctggtcgacggcagggctgagtatgtctcctgtttcggctccggcgccatcaacccaagactggcccgcaagagcggcaacaaatttgccatcgagtcctgtcacatcaagatcaaggactcggacgtcgcggctcacatctggcggttcctgttcgacacggcccggcagtaccgcgagagcttcgacgtgtacggctcgaaaaagagcttcgagtggacgctggtcgagggcgaagagcacgtgatccacaccgccaagaagcccgagcccgagattccctcgcgggtgcgggtgccggactacgcccatcggctgccgcaagagattcgcaagttcacgcgcacgatccaggatgccgggcatctctcgttcatccagggcggcggtcacggcggatcgcatccgcacctggtccacgaattcgtctcggcgctcctcgaagaccgcgatccgcggcccaacgccgtcaccagcgccaactggacttgtgtgggcctctgcgcccaccagtcggcccagaagggcggcaagatcgtccgcctgccggccttcacgctggccgactgagtgacatcatgttcggaaagggggtggacaggagagggtggcttcacgtatcatggcggctccatgaaagggtatctgaaattgatggagtctgtcatgaaaagtcgtgttgtgatgctgttgaccctgccctggctggccttgggctgtgctgcttcttccagtaccggtcccgacgtggaccgggatcgtgagcgggcggcgatctgcgccgagagctggaaggccaagggattcacgttcgatcccaacacgatgacctgcgagcagatgttcgagcgggcgcaggctattcgcaacgcggcgtattggaaaccgcaggggtacgcgttcgatccgaacaccatgacggcggggcagatggaccgccgggcggcggaactccgcaagtcgggggtgaaagtgtacccgccggcctcgaccgtgcaagccgaggccgcggaggcaaaagcgactgcgcccgatacggtccccgctccggaaacagcgacggagatggtggctcccgtacagccgggagatgtcgcaaccaggcggatgctggagaagatgaccatcacgcaggtccgccggaagtacccgcagtacgacgacatggatgacgcgaagctgacgcacgcgatccacgaaaggtatttccgcgatgtgccttatgccgatttcgcccgtcggtttcttggccgctgaccgcatgtaccgaagggtgttgccgcggccctaaccgttgcgtgacagatggatctgcgtcagggccgctcgactgagataagggcggaagaagcgtcggtagtcctcattgctcacgtccgagtgtttggcaaggcattcttccaccacgtccatgcgggtcttgagcttgtcgcagccgaactgaggacactgcccgcagttctccaaccctctcctgacgacacagggatagacctggcagtccttgtcgggagcctctgtggcggcctggcatcccttgcacgggtggatttcctcgggacggacccggcaactgtagtacctggccagtgccttgctcagccttttcttgtcctgctcgctcttgagattggcctcgaaggccgggcagaggtcacaacgatagccgcacctggccagaatcggctccatggggttcactcctttctgcgatgcaggggtgcatcggaacgctcctcgatttcatcgcatctctgttccgcggtgccggtatctgctgtctctgttgtgattgtcgcggtggtgtcgtgaggtgtcaaccagcattcagcctgtctttggagtcccaactcgattccatttgacaggcgcaaccggcgggactaccttctgcctcgctgtgtcggcggtcgagcctctgcacatgttctctcgacgtccgaggccatacgaatgaaacgagtttgtgtctattgcggcagtggggtcggaacgcggccggaatacgctgaggcggcacgcatgctgggcacggtcctcgccaaacgcgggctgcacctggtgtttggcgggggccggatcggcctgatgggcgtaattgcccgtaccgtgttggatcatggcggccgggtcaccggtgtgatccccagggcgctgcacgacatgaatctggcgctgaccgatgtggcggacatgcggatcgtcgccgacatgcacgagcgcaaggccctgatggcgaaactggccgatgccttcatcgcgatgccgggcggcttcgggacgatggaagaaattctcgaaatcctcacctgggcgcagcttgggtttcacgccaagccggcgggcctgctgaacgtcgtgggatacttcgacgacctgatccgttttgtcgaccacgcgacggcgcagggattcatcgacccggcccatcgtgaactactgctggtggaccagacgccggaggcgctgctggccaggctggtgagctacagggccacgcgtgcggacaaggcccagtgggccctccgcgcgagcctggagtgagaatccgcgttcggtcgcaaggcggctttcgcatgggataccgggcgatttcactgaagcttcccactgactacagcgacgagatgctccgcgagcggatcggcaaggcgctgtcgctgtcggagttctcctacacgatcgagcagcagagtctcgacgcctgccgcaagagcgacattcactggctcgtccgcgtcggggtcacgtcgcagcaggtcgagggcggcgctcccgagacgcctgcgcctctgtccatcccacgtgtagccccggggcggaaggccgtggtcgtcggctccggtcccgccggcttctttgcggccctggtcctccagaaggcgggcgtccacgtcaccgtgatcgagcgaggttccgacgtcgacacgcgggccgagggcattcgcacgttcgagaagaccggcgcgttcaacccttcctgcagctacgcattcggcgaaggcggggcagggaccttctccgatggcaagctcacatcacggagcaagcacatcgggtcggagcggcagttcatcctcgccagctatatccgcgccggcgctcccgaggagatcgcgtacatggctcatccgcatctcggcagcgacaacctccggcggatcgtcaagcgcctgcgcgaggagttcatggctctgggcggccggatgctgttcgatacgatgctcgaagacctgaccatcgaaaggggccgcgtcgtcgaggcggttacctcatcgggcgggatcgaagcggactgctttctcatcgcccccggacactcggcgtacgagacgtaccgcatgttgatcggcaagggagtgccgtttcgcacgaagaacttcgccatcggcagccgggtcgagcatccgcaggagttgatcaaccttgcccaatggggccggacgagcctgcccggcgtcaaggccgccgagtatcgcctgaccttcaacgcccaagggcatctgcctgtttatacgttctgcatgtgtccgggtggggcggtgatcccggcgaccgcctacgcggacacgaacatcgtcaatggcatgagctactaccgccgagccgggcggttcgccaacgccgcgtgtgttgccgcggtcaatctcgaatccctgctggatagagcaatctcgccgacggaagcgctcgactggctcggctcgctggagcacagcttctatgagtactctagcagctttgccgctccggcgtgccgcatcaccgacttcgtcacgcgcagggggccgtccgacgtcctcgaatcgagctatccgctcggcttgaagcccgcgccgctgtgggagatgctgccttcgcagatcagcaacgccatcgctgaggggctgaaggactttgcccgtaagatcaaaggcttcgagaccggtgccatcctgggcctcgaaagcaagacctcctcgcccatccaggcggtccgcgacaagacgggcctctgcgccggcttcgagaacctctacctcgtcggcgaaggcagcggctacgccggcggcatcatttccagcgccgccgacggtatcaaagctgccctccacgtcgccgaacgattcgcccgtttgtagtgtgccggccggcatgccacaaccagccaagcatgcttcgcccctacgaccaattccattttccacacgcggctatgcccctgccccacaccagctcgacacgtataatcgtgtcgtgtgaaggattggcgccgggtgacgtgcctctgtagaatgggatgaacgggccataaggctgggaggattcctgcagcctgcactctgcggcctcggagtcttttcaatgcgggaaggaagtgggcctgtgacgctacagacaatgggtccggtggcagagacgtcgcacgagcggaggatggtgatctaccgctgggccatcttcgcggtgctggggctggcgtatttcttcgtctacttccatcgcctctcgctgtccgtcgtggcggacgatctggcggccgacttcggcgtcgcggccggcgtcctggggctgctcggttcggtgtacttctactgctatgcagccatgcagtttccggcgggcctgctggccgactccgtcggaccccgcaagacggtcaccgtctctctgctgctggcggcggccggcagcgtgttcttcggcctggcgccggggatccgcaccgcctttgccgcgcgggtcgcggtcggcctaggcgtctcgatggtcttcatccccaccatgaagatcctctcgcaatggtttcaggccggcgagtttgccgtgatggccggcatcctcaacgccgtcgggggcgtgggcgtgctggcggggacgtggcttctcggtctgctggccacctggttcgggtggcgcgtctcgttccaggtgatcggaggggcgagtctgctgctgatggccttggtctggctcatcgtgcgcgaccggcctgccgacaagggctggccttcgatcgcgccggcaggcgatcgaagtgcgtccacgagagcgccgcacgaaacgcctgacggcgtcactacgaacatcggtctgttcgcgggcgccaagcgggtggtcgccacgacgcatttctggccggtggccgtctggttcttcttcgactgcggcatcttcttcggattcggcggcctctggagcggtccgtatctcatgcacgtctatggcatgagcaaaggccaggcgggggcggtcctgagcatgctcgcctggggcatgatcgtcggcagtccgctgctgggcctgctgtccgagaggctgctgcgaagtcgcaagcgggtgttcatactcgcctcggcgatcctttcgctgctgatgctgctggtggttgtgcggcccgccagcctgccgcactgggcgctcttcgtgtggttcttcctgttctcggtgttctcctccgccatcgtgatcatgggtttcaccacgaccaaggagctgtttcccgtcgcgatggcagggacctccgtcggaacggtgaacctgttcccgtttttcggaggcgcggtgttcatgtggctgctcggccggattctcgacgcctatccccacgctcctgatgccggataccccctcgccggctatcgcgtcgtgctcttggtgctcctggtcgcatcggttctggctctggcctgcacgctaatcatgaaagagacctaccggcgccaggcccggtagagatgccggatcactttgtcttcggtgtgtgtcagaacatcctggcatgtgtgtggcagcctcaaacgcgcagcgtttggggatggtggcttcagcggctccgcgcatgccagaagactgccaatgcgaagaaccatccccaagctcttcgagcttgaggctgccacacacggttctctccatctgcaatgagctttacgctgagatatgcacagacatttgtcttcggcatcgctgcttggcgcggcgcgccggatcggcgtagaatggacgggccggaccgcgagccgcatgtgtgctgcggccggttcacatactgcctgcgatgaaggaggctgaccgatgtcgactgctggattggaaccgatggaccgccgcgattttctcgaaacgttgggccggctttcgctcggagcgacagcggcggcgagcttttccgccggcgctgccaggggcaaccagcgatctacagaaaaggtctggcagccggtttcggatcggaaggtgcgcgtgggcatcgtcggctacggcgtctgtcagttcggcgccgccttcggcttccaggaccatccgaacgtcgagatcgtcgcggtcagcgatctgatccccgagcgccgcgccggactgatgcaggcgtgccgctgcgagaagtcatacgagtcgctggagatgctcgtcaaggacccgaagatcgaggcggtcttcgtggccaccgatgcgccaaaccacgcgaagcactgcatggaagtgctcaaccacggcaagcacgtgatgacagcagttccggcggtgtggggctcgatcgagcaggccgagcagctcgtcgagacggtgcggaagaccggcctgaagtacatgatggccgagacgagctgctaccgcgccgactgctgcgcgatgcggcaggtttaccgggccggaggcttcggcaagctcgtctattccgagggcgagtactttcacttcagcccgacgcctatcccgtcgttcaacggatggcgcgtcggttcgcctccgctgtggtatccgactcattcgaccgcctactacgtcggcgtcaccggcgggcggtttacctccgtctcgtgccatggtttcgatgcgggtctgcccgacaacaggccgggtgccaataggtacgacaatccgttcagtgacgagatcgccctgttccagaccagcgagggcggcgcctcgcgcatgctcatgtgcaagggcgtacaggacgtggtcgtcgagaccggtcgtgtgtacggccagcgcggatggatgcaggacacggagtaccacggtctgctgaaggacctgccggacatcgcgccgccggcgctgccgcccggcatgcctgccggcgggcacggtggctcgcacgggccgctgaccaacgagttcatcaccgcgattctcgaagaccgcgagccgctcgtgaacgtctacgaggccctcgcgatgaccgtccctgggattgtcgcgcaccagtccgcgctcaagggcggcgagacgctcccgatcccgcaatacgacagagcatagcacctcccgtgtccggcgcaagtgttgtggataggggccgtgagccccgtgcccttgtggacgcactgcggaaggtccatgtgtcaagtcctgcggtttccggcaggattctgtgatccggtagttgctcgagagggctgtcacggccgagcagcaggccttcgcggcccacgacctcggccacgtgatcgagcaccacctgccccggaagctggcggccgccaagtcctttctgccataggacttaacacgatatcggacgtttgtctgcgacggcatatcgcacgggttctgggaaagacgcgccggagcgaccggtgttggtcgggtcggcggagaatctggcgatttcggagtcgcggcaggggaaaaaggtcggtaaaatgtggtcgcgcagggaacggacttccgatattaacatgcgactggacttcgatggattctcgtgcaagaaggccaatatgtgtccgttttaggaggtaagctatgaaatgctgtcgtccatctatgttcggcgcgggcctgttgctcgtgtccctgttggcgctgccggtggcggggttcgaccagccggcggtcaatctcggcttcaccagtttcatggatggcggtccgccggccggacccggcttctatttcgcggagtatatccaattctatacctccgacgaactggttgacggtcctcccttcgatccggaactggacgtctgggtcagcctgaaccagttcatctaccagtccgaccagaagctcctgttcggcggcaagtggggcctcgacgtgattgttccggtcgtcagtttcgacgccgcgacgcccctcaacgacaacgggaccggcgtgggcgacattctcgttggcccatatctccagtgggaccccatcatgggcgccaacggtccgaagttcatgcaccgcgtcgagctccagaccatctggcctacgggcaagtacgacgaggacaagggactgaacccgggcagcaaccacttctcgttcaatccgtactgggcgggaacctatttcttcacgcccaagctcaccgcgtcgtggcgtctgcactacctctggaacgatgagaacgacgacaccgaagtccagccgggtcaggcggttcacgcgaacttcgccgcgtcgtatgagctgattcccaagaagctgcgggccggcgtcaacggctactacttcaagcaggtgaccgactcggaacaggacggtgaggaggtctccggccgcgagcaggtcctgggcattggccccggcgttctgtggagcctctcacagaacgaccacctgttcttcaacgcctacttcgagaccagcgtcaagaatcgtcccgaaggcgaccgcttccaggtccgctgggtgcatcacttctaaacctgaccgaatcgattccggggacatccgcccctccgtcgccttcgaacggaccgcgacggacgggcgtgatgtccccattcttctttccggcgcgtctgcttggggcggactctatccgtctgtctgcgccagcgaagtccactgttgtttttcctttgcggggcggtcgggaatccctccagcctgtgggcgcgacagccggacgctgtcagccctcggagtcctggggggcgtcgtgggtctggcgggtgacgccggtttctgtttccaggggggcgagaagggtgaagcggcttccgtgtccgggttgggactccatgtcgagccggccgccgatgaaatccagccgctcgcggatgtggaagaggccgaacccatgacggcgggacggaccggccagggcctcctccatatcgaagccgatcccgtcgtcggtcaccgtgattcggatcgaatcatcgagccgcccgatgtccacggttacggcgcgagcctgcgcgtgtttgatgatattgaacagcagctctcgaacggattgaaagagtacgacacggacgtcttcggccaagggcttggcggcgccgtcgtcgcgaaaggtgcagtcgatactatgctgggccttcaccctttcctccagcagttcctcgatagccgcttccaggccgaacttgtacagcgtcggggaactcagatcgaagatcagcccgcgcacgctttcgatggtcttgtcgatggtgtcacaaacgtcttcgatctcatccgtttcggtcgccggcaggccctggagcttcattttggacaggacgaggttctggcaggcgtagtcatggaggccggcggcaatccgtcgccgctcgcgttcttcggccagagacaactcggaagccagggatcgaagcctctgctggttggcccgcaactcgtcctcgacggcgttcttgacgaacgcgtagaggacgaaggcccaggtgaaggggatgaagaggcctgcgatgtcctccacccagttcagtccggcggccagacccgaccactccaggaacagggcagcgtggtaacacgccatcagggccagcagaacggccaggaggatcgggaccgccggcgcaaagctcacccgcttgcagccccgaacgacgaacgccgccgcgactacgctggcagaaaatgatatcaggtcaacgtatgccatcgggcgcatcagggaccctcctgttccagggtccgaacaccagggcgcaccacagggccagcaggatcgctcctgccatcaacgataggtgctccagccagttgaacagctcggcccagaggaagccttcgaccacggtgcacaggctgcccaaggccagaccggcgaaactgccgaggaggagaaatgcgtgcggaatctgccggaggtggcggtacgtcgcggcgatctcgacgaccacggcacacgagatgatcagcatgagcgtttcgtcatgtgtcattctcgacgctcctgcggtaagccggatcgacgatccggcacggcgccagcatcaggaagccgacatgaggataacagaaccgtcgtcaatgtgcgaagattttcagacaaatatgttttctttgacggggaggctgactgttggagcttcaaacatggcgggcggccctatggtataatcgtcccatgagcaagaacggcgagtatatcgatcaatttctcccgacgacggccgcagagctgcaccgcaggggttgggaccaggcggacgtcatcctggttacggctgatgcgtacgtggaccacccgtccttcggcgtggccttgatcggacgatggctccagaagctgggctatcgcgtcgccgtgctggcccagcccgactggcgaagtgtcgagccgttccgggcgttgggaaaaccccggctgttctgggggattaccagcggctgtatcgattcgcggctgaacgactacgcgtcgctggggcaccggcgccggcaggacgtctacagtcccggccgcgtcacgggtctgcgcccgagccggccgctgctggtctactcggcccgcgcccgcgaggcctatcgcgatgtgcccatcgtgctcggcgggctggaagcgagtctgcggcggctcgtccattacgactacatcgaggaccagctcaagcggtcggtgctggttgacgccaaagcggatctgctgatccatggcatgggcgaacgggccgtggccgaggttgccgcccgtctgaacgcaggtcgcccaatccacgaactaaccgacattcccggcaccgcgtacatcgcccacaagggggtcgccgttcctgaccacgcggtgcgtctgccctcgctgtcacagcagaacgacgacaagtcgctgttcatgacggcccatcagcaatatcagttgcaggccggacggcaagggcgaccggtcgtccaggagcaggaccccggcacgctcgtggtgatgccgtcggccgagccgctccgcagcgaagagctggatgcactgtacgatttgcccttcgcccgcgcgtggcatccgcgatacgaccgcgacggaggtgtgcccgcactggcgccggtgcagttctccatcaccacccatcgcggttgcttcggcggctgctcgttctgctcgatcggatgtcaccagggcaaacagatccgctcgcgatcactgccgtcccttctggccgaagcggaccggctccgccggcatccgcagtttcgcggcacgatcgaggacctgggcgggccatcggccaacatgtacggcatggactgcgacgcgagcgagacgtgcgggcgagccagttgcctgtttccgacgccttgccggcggggcggtttcgaccacggcccgatactcgagatgatggaggccttcgtccgctggagccacaacggatcgaagcgaaccaatgtgttcgtcgcgtcaggcatccggcacgatctggccctgcaaagccgcgattacctcgacatgctcgtgaagcacttcgttggcggccatctgaaggttgcgccggagcactactgcgccgacgtgctggaccgcatgggcaaacctcacttcgaggtgttcgaggagttcgagcggcggttcgccgagtcgtgccggcgggtcggcaaggaggcctacctcgtgccgtacttcatcagcgcgcacccggcctgcacgcccgaggacgcgctgaagcttaccgagtacctcatatcccgttcgtggcggccacgacaggttcaggatttcgtcccgatcccgctgacgctctcgacggcgatgtacgtctgcggcgtcgatgccgccggacgcaaaatccacgtccccacctcccgaaaggaaaagcgcctgcaggccgcactgatgcattactaccaaagcggaaaccgaaccctcctcgccgaattcctgcgagaccgccagcgtcccgacctgctcgccgagatcacccgcctcgccacccccaaaccccgccgcaggaagtagcgcacgacggcacggcgggccttgtgcatttgccgcttttcgggtttgatatgcggctgctcggtcgcggtggtcgcgacgggggccaaaggtcttgggctggcaaagggtttcggtgtatgcgtgtgattctgacgacgacgctgctgctgtgttgcagcaacatcttcatgacgttcgcctggtacgggcacctgcggtgcctgtcacatcggccgtggatcatcgcggcgctggtgagttgggggatcgcgttcttcgagtatctgatccaggtgccggccaaccggatcgggcacaccgtgctcaacgtcgggcagctcaagatcctccaggaggccatcacgctgacgatcttcgtaccgttttcaatcctttacatgaaggagcaggtgcggctggactacctctgggcgggcctgtgcatcttcggcgccgtcttcttcgtcttccggcacaagatcttcggttgagcgttgcctccaagccctcggtcggcaaggacgctcgcgtttttcaggccgtgacgagcgtccctgccgtggtttgtcccgctgtctgtgctacggatcgggggccgcgacgatcttgaacacgacccccgtattgccatagggtcccagcgcagtgctggccagaacatagacctcgccgtcgcggtcctgccccatccccttgacgaacaggccgagaggctgctgttcgttgccgaccaacagctccgcgatctgtccggaccagaggtcggcgacgaagagccttccctggggcgcgctgaacgcgcgcgagaagtcgccgaacacgtacatcgcccgcaacggaggcacctgcgttccgaagtacaggaacccgccgaccaccgccaggccgtcgtcgtggtcgtactgggccgccggatcgatcagagccgcatcctcgaacggcatgccgaccgcgatatcctcgggatcgaagaggaagtcaccctctttgatcttccagccgtaattgccgcctttgcgcacgatgttgatctcttcgacgtggctctgtccgacgtccgcgacgatcagcgcgccggtgagggtgtcgaagctgaagcggtacgggttgcggaagccgtacgcgaagatctcatcgacgccgtcgatgccgacgaattcattgtcccaggggatgcgatactgcccgttggcgcttgcggcgttgcggctgtcgggcgtcgaggccggcggcaagggatcgatccgcaggatgctcccgtgaacggtgtggatgttctggccgttgccgtcgggaccgtggcccgctccggcgtcgttggcggcgcccccatcgcccaaggcgatgtagagatagccatccgggccgaaggcgagatagccgccgttgtggttgaactgcggctgatcgatgcgcagcaccacacgggcgctgctcggatcgaccacattctgtacccgtgccaactgccactcggtgacgacgctctggtgattcacctcctcggaagccaggtccagggtgaagtcggcaggtccgccaaccggctcgctggtgtaggtgtacagcgtgcggtagccggggctgctcgggtcggcgaatcccggatggaacgccaggcccaggaggcctcgttcgtcgtagtcgtcctcatcgaagctgccgaggatgcccaaaggctggacgaggcggtctcgcacgtcgaggaagggcgtttcgagtagctgtccttgctcgatagtccggatcaggccggcctgatcgacaacgtacagccgtccggcgacggacgggtcaggctggaggtccacggggacgatcagacccgcagcgacggtttgcaggtcgattcggatgggcgacggctggatggtgtcggccaggggcagaccggtaacggtgaaatcgcctcgcatctccatgaaatgcggcctgcaccgatagcccggcgtgcggcctgattcggtcatcgcctggtacaactcacgggtcagcgtgaacgcgatcgtccctcgattgtcgtcctgccagcggaccttcgcatcggattcgaacggcccggcgatcgccatcgacagcagcaccttgtcctgcgccggcgagggggatttggcgatgacctcgaacgggtgcatcatgtaatcggtcaccttgacttggtatcgtttgcccaacgccaggggcaacgtcgggtccgcgctgccgatcgcgccgaattcgatgccggccggcgtgaacgcgtccagccggtacgaagacgacccgatcgcgccgaacgtccaggccacgtcgggcgcctgagcctgcgccgaggcgccggccaggaagaacaacgctgccaatgcgacccccatgctctcgattcgcaatcttgccatgattcatgcctcccttcgcgccagattgaccggcgtagaacgaaacattgtcaacggtcttaatatcagacttgtttgatcctacttgtcaggagcatttccagttcaacggttcgaagggatcatgcgaaataaagcgcagagtttgccggcgaagaatccccggtgattcttccggtgtatatgccaagtgccaggcgggacgatgactcgggcctatggccagatcgaggcgatctcgaagacttcgagcgagtggacggtgatcggagcgccctcgcagaagaagcccagggaccggttctcgtcagtaaacttcacgcccatcggcatatagacccggccgtcgttggcgaagatctcgatcgaggtgcgatcgaccagcacgtccagcgcgatcttgccgtcctcgggcgacagcggggcggtcttgtccaggcacgagagctggttcttcttcggctcgagaacgatgcgaacaccgcgaatgtccagggtcacgcgctgcgcctcgcccgcctcgaaccgggcgcggacgcgaaacaactcgcccttgacgccggagagcaggtcctttcgcggcgccagtttctggttagtccagccacgatgcggctcctggagcttctcgatctcccggacgggtgccgcgaacagacgcggcccttcctccgtcattcgaagcgtcagctcgaccgggaacagcatcatctggttgaacggcataccaggcatctcgacccgaccccaggcgatctggatgcgccgtccatcctccggcgggatgtcgctgtacgtctgcgaggcgtagaagcagttgccgtggctgaatctgatcttgtccgattcgggcgtgaaggtcttgccgtcgaacgcgccgatccggtaatcgccgtcggcggcgtagaggacccatcgcttgttgtccgccttgccgtcgaccggcagctcgaagatctcggggcattcaaagaagccctcgatccggctggtgcactgccaactcttgagatcgtcggaggtgtagaacgcaatggcgcgcttctcgtcggcctcgtcatagagcgccatgacccagtgcccgccgggctcgtaccagatgaccttcggatcgcgtccctggtgcttgacgaccggattgccctcgtactcggtgaaggtcagtccgccatcgttgctgtagacgatgcactcgccccgccccgtgctggtgtaggcggccacgatgggcggctcgtcacctttctgaaagccggcggtgttgttcacgtcgactacggcgctgcccgagaagcaccagtcgccaaactgctgcggatacagcgcgatcggaagctcggtccaatggaccaggtcggcgctgacggcgtggccccagtgcatgttgccccactggatgccgtagggattgtgctggtaatagaggtggtattggccgttgtggaagaccaggccgttggagtcgttgttccagccccgtcgcgacgtgaaatgaaactgcggccgaagcttctcgcggtacaggttctcggcgcctcgaatctcgtcggcctggccgatgaggtgcaggccgcgtgaggaacgaggcagcccgtccacctcgatgacggccgtcttgccctggaaggcactgatgtccaggaagacccagaagtccgggctcacgtcggccagctcgatctcgaattcgcggacgacacgctcgtcgatcacgacccgggcacggcgcttcgcggcgccgttcttgaccgggaagttgaggtatcgcgcgccgagcagaagctctttgctctggtcgaagtcgctctgcgagttgctctggaagatgtgatcgacggtgatgtggccccagaggcgcgtgtgattgtctatgatgcgaagctgtgcggtcttgcccacgaggtcggagacgtcccaggaccttgcggtcaatcgctcggagcctccggggcggttgttgcgcccggtggccgtgcggaccatcctgccgtcgacgatcaggtccatgcaggtcaggcggggatagccgccaccgccgatcaggaagtgaatgtagcggcgctcgatccggaacggcggcgaggtcagtgtgcctgtcgatgcgtcgcggtcgcgaaagctgttgaccagaccgtggcccacaaagccggtcaccgccaactgcccgggcaacgtgcctcgggccggagcgttgccgaacgcatcgcccgtggcctcccagccggcgtagtcgtcggcctcgaaatcgcagatgagaagatccggttcatgtgctccctggcacagggcggcccagagcaccggcaggagaaccaatgtccaccgtcgcatcgcagcgtcctttccccttgcggtcaccactgtgtttggcggacccgccttcgggccgttcgcatcctgcgtcacccgggcgggtccggtggaaggattatccgggttttctctcgccaaggcaaggttctgaaaagacagaatccatgacgatgtggcggcaacacgatttcatccttgtgttcgtcaggcatctgcagcataaagggtcgggaccgttcggcagtctcgtgacgtgatatgcagcccaggaaggtcagtctcattcagctcaatattgccgtcctgatgtggggcggcaccgcgatgttcgccaagggcatcgcgctgcccgtgccgcacatcatctgcctgcggtcgctgatcggggcggcggcgctggtggccatgctcgcgaccctgcgaaggccgctgaaggtcaacgggggccggcactacgggctgatgctcacgctcggattgctgctctgcgcccactggctgacctacttcaaggcactgaaggtctccaccgccgcggtggcgatcctgtcgctgcacacctatcccgtgatcacggcgatcatcgagccgttcctcttctctgagcgtctgcgaaagtcggacgtcctcctggcggtggtggtcttcctcgggattgtgattatgacgcccacaatgagcctgtcggacgcgacgacccggggaattgtgctgggggtgatctccggcctgttcttcatggcccgcaatctgctgacgcgcaagtacgtgcatcagtacaccggcagcgtgctgatgttctggcagatgctcgtgacaggagtggtgcttgtgccctggctgttcatcgagccggtggcctggacgcccggcgcgggcggcctgctgctcctgctgggcgtggtcttcacggcggttccgcacaccctgttctccgccagcttcaaacacctcagtgccaagacggtcgggatcatcgcgacgctgctgccgttctacgcggcgttcttcggctacctgatccacgacgaaaccctggcactgcgcaccgtggtgggcggctcggtcatcctggcggccgtcgccttcgagacggtacgaagcgtccgcatatagtcggttgggggtggcggtcgccagggcaggccggtacaatatcccggcggtccgcgccacagggcgccgaatcgaggcaagtgtcggttcttctaaaggagcaaggaaatgaagaaggcagtggtgttggcggtggtcggtggcagtctcctgttgtcgtcatgcactcaaaacctcgccgtgccgccgaagacgcacccgaaggtcagctcgtggaacgacctgtttgcccccgacctgtccaatgcgacgtaccccgagggggtttggacgttcgagaacggtatcctcactgccagcaaggacgaggcgatctggacgaagaaggagtacgacaacttcatcctcgacctggaattcaagaccgccgaaggcaccaacagcggtgtgatcgtctactgcaccgatatgcagaactggattcccaactccgtggagatccagatcgccgatgatttctcgcaggagtgggccaagcagccagccacgtggcactgcggtgcgatcttcggccacctggcgccgaccaagagcatggtcaagaggcccggcgagtggaaccgtatgactgttacctgccgtgatcagatgatctacgtcatgctcaacggggagatggtctcggtcatgaacatggctttgtggaccagtgccaagaccaacccggacggcagcgagatcccgtcctggctgagcacgcccttggccgagctgcctacgcatggccacatcgggctccagggcaagcacgccggtgcgccgatctacttccgcaacatgaagatcagggaaatcgactgatgccgcccgctcaccttctttgccgaaaatcagggaattcccctctttgcgtcgtctcggccggggcgttagtatcgcgtgcgtggttatgtccgagaactgcccgcgggggcagatgagatatcacaggtaaggagagaaacaccgatgaagggaaacgagaaagtcattgcggcgctcgatgcccggctggccgacgagttgaccgcgatcaaccagtacatggttcactccgaaatgtgcgagaactggggctatggacgtcttcacgaagccattcagaagcgggccatcgctgagatgaaacacgccgaaaagctcatcgagcggatcctgttcctcgaaggccagcctacggtcagcaagctgaacaagatcagcatcggctccgacgtggagaagcagctcaagaacgactggaaggcggaagaggccgccatcaaggattacaacgccgatatccagttggccggcgacgccggggaccacggcacgcgcgagctgctggtgtcgattctccgcgaggaagaagagcatatcgactggatcgaggtgcagctcgaccagatcaagcagatcggcttccagaactacctgatcgagcagatggagtaggggcgaatcctctactggcgcctaccgcagaagtacgtacgagcggacgcgtcgctgcgcggggggtggtttttgcgccttgcataccccggtacgggagataaggtgcgctgcgggacgtacgtctgtctcctgccggattgccgctgcacacaggagcaccgcgtagggcgggatgcgtcttccgctgttgtcctgttgtaggcgaggagttacgcaatatgtctgtgtttgaagcggtgatgctggtgtgtttcggggtgagctggccgatctcgattgccaagtcactgcgcacccgcaaggtcgaaggcaagagcccgctgttcatggcgattgtctgtttcgggtaccttaatggcgtcatttacaaggcctcgcagcccttcgactggatcatcggcctgtatgttctgaacatggtcctggtggcggtggacctgtcgctgtatttctactacagccgcgaccggcgcaaagacgcccccggcggctgggcacagaagccgcagagcgagtgtaccgcctgaagaggtgatcggggccgaattccggccatccgcttttgaagggtgtctgcccgcgatattccgttgaatcgcgcccggggtatgcgtataatccgcgtttctaaattcttggcgttttgaggatggcattatggcgaagcagcagcagaagaaggtcgtgttggcatacagcggcgggctcgatacgagcgtgatcctgccttggctgaaggaaacctacgggtacgatgtcatcgcgtttgccgccgagttgggccaaggcgacgaactggcgggcatcaagaagaaggccctggccagtggggccagcaagtgcattgtcaaggacctgcggcgggagttcgtcgaggactacctctggccgatgctcaagagcggcgccatatacgagaacgggtacctgctgggcaccagcattgcccggccgttgatcgccaagcaccaggtggacgtcgcacacgcagagaaggccggtgccgtggcgcacggcgctacgggcaagggcaacgatcaggtccggttcgagttgaccttcatggctctggacccgacgctggagatcatcgcgccgtggaaggatccgaacttcaagctgaccagccgcgaagcagcggtcgagtacgcccagcagcacaacatcccgatcgagcagagcaagaagaagatttactcccgcgatcgcaacctctggcacatcagccatgagggcgcggacctcgaagaccctgccaacgagcccaaggacgatctgttcgtgatgtcgcagccggtcagccgtacgccggacaaaccggattacgtgaccattgggtttcatgagggtgtcccggttcgccttgacggcaagctgaccagcggcgtcaagatgattgagacgctcaatgagatcggcggccggcacgccgttggccaggtggacgttgtggaaaaccgcctggtgggcatgaagtcgcgcggggtttatgagacacccggcggaacgatcctgatgaccgcccacgccgcgctcgaaagcctgacgatggatcgcgaaacgatgcactacaagcagcaggtggcgctcaaatacgccgaactggtctattacggccaatggttcagtccgcttcgtgaggcgctggatgccttcatcaatgtcacgcaacgcagtgtcgtcggtgacgtccgggtcaagctgttcaagggccgttgcacgccggccggcatgaagagcccgcacagcctctaccaagcggacctggccagcttcaagatgggcgccgagtacgacccgaccgatgcgaagggcttcattcggctattcgggctgccaatgagggtggctggagcggtcgcgcgtcgacagcagaagggcgacaagtaacccaggggcatttgcccgtacgagcggcagggcgtccacgatggcacgggaggcgatgtggcggcacaggaatggatcatcagtgcgttcacctttgcgttcggatgctgcatcggcagcttcctcaacgtcgtgatctatcgcctgccccgtgagaagtcgctggtgagccccggatcagcctgtcccggttgcggcaagcccatccggttctacgacaacatcccgctggtctcgtggctcgtcctgcgagcgaagtgccgctactgcgacatgcggatctcgccgcgatatttcgtcgtagagctgctcaccgggctgatgtttctcgggctgtacctggtctatttccactcgtcgttgcggcagggcatgcaggtgccgtacggacggttcgtctatgttgtccatgtcgtcctgctggcggcgttcatcgccggctcggcaatcgacttggagctttggatcatcccgctgtcgatctgctggtttgctaccgccgtggggttcgtcggctcggcgcttggggggtatctgatcgaccccgaagtcatcagagccttctcgctgctgccggtcgcctcgccaggaaccggcgccttggccgtcggcgccggaatcggtttggcgatcagtctgctgcttctccgggcgggtctgatccatcgcagctaccaggtgcccgagttgccggcaccggtcaggcccgccaacgagaagcccgaggtcgagcagggggcctttccgtttgccgacgatcccgagttcaaccatcgcctcgaagcgatgcgagaggtcatcttcctgacgcccattgtgctcggggcgattgcggcccacgtcgtattgaccgggccggcggtggttgcggcatggtgggcgggcctgctggcgaacccggtggtcgccgggttccttggcagcctgttcggctacttcgtcggctgcgccgtcgtctgggcgacccgggttctcgggacactcgccttcggcaaggaggcgatgggactgggtgatgttcacctgatgggcgccgccggagcggtgatcggcccgctgatggtggtcgtcgcgttcttcgtcgcaccgttcttcggactgggctgggcgctcttccagacgtttttcaaaaaaattcgccagattccctacggtccgttcttgtctttagctgtcttgaccgttatgattttccacgatcgaatcgtaaaggaatttgcctttcttttcttgcactaagagggcacagttgcgttcataggattgcaaggaggtctcgaatgcacgtcgtcaaggtcaaagcggttgtcccgctgctgttggtcgttgggctgtctctggtttccggctgcacggattacaagaagaaatacgattacctcaacgtcgaacaccagaacctcaaagggcgtttcgagaacctccagaacgaaaagcaacaactggcccagcggatcagccaggaccagcagacgatcgatgaactgcgtcgtcagatcgaggaactgaatcagacgcctgcccaggcaacgggtttcggcgaggggtatgacgtggctttcgatgcggccgccggaacgatcaccgtgacgctgcccaacacgatcctgttcgagtcaggcaaagccgagttgaagagcgccaccagcgccgagcttgaccacatcctgtccgtgctgaagtcgaaatacgccggcaaggagatcgacgtcgtcgggcacacggacaccgaccccatcgccaagaccaaagacctgtggaaagacaactgggagctgtccgccgagcgggcgctttcggtagcgcgctatttgatggcacagggcattcccgctgcacagattcgtgccgccggatgtggtccggcccgccccgtggctcccaacacgaccgccgccggtaaggccaagaaccgccgcgtcgagatcgttgtccacatgcgatagcgcgacacgctcggttgcccgccctgcgggacactgaatctcagcccggcttggacggctctatcgtgaccacgaactcatgctccgccgggtcgaaccggacttccaccaccgtccctgtcacggggcagacgcaggcatcctcggcctgcggcgcacaaaggttctgccccttgcggacctggtcacccgcctgaacggccggcgcgcacgtggcgtccattcgtaggatacgttggtggctcatttcctggcctgcggaaacggtttgattcccagtacctgagcgattctctgcgggatttccgtgttgtcgtagacgcccccaaatctctccgacttcggcccgatggcatagaccggcacgggcgaggcgctgtgtcccttggtcgaccagtgcaccttgattttgtcccctttgaggctcccttcggggatggtcagaccgccggtctcatggtcggcggtaaccaccaccagggtgcgtccgtcggcaacggcgaagtcaaccgccgcacgaacggcttcatcgaacaacagaacctgtcgtacgcaggcgttgggatcgtttgcatggcaggcccagtcgatctggctgccctcgaccatgagaaagaaaccccggccgtatttccgcgagtcggttgcggtctcgtcgaggatgtcgatggccttcctggtcatctctgccagcatcggttcgggcttcagcgtcgtcagggcatcgacctggaacaaacccagcacgaaaggcccgcgaacccatcgcaactgattggcggtctggatgattgtgtatccggcgtcttcggcctcggccagcagatccctgtcgtcctttcgcccgctgtcggaatgagacttgggcaggaagtacttgcgtcctccgccgaacaggacgttgatccgattcttgatcaactgctcggctatctccggttccatcttgcggctcttgacgtgcgcgccgaacaccgcgggcgtggcgtgtgacatcgtgcaggtgacgaccaggccggtcgccatcccacgggcctgggcggcctccagaatgctcgtgtacggtgtctcatcgggtgccatgccgatcatcccgttgttggtcttgatcccgcaggccagggcggttcctccggccgctgagtctgttaccagccggttggccgagtgagtggaaatcagcccatggaccggcagtcgctgcatgtggatcttgccctcggcgccgattgccttcatgcgcgccagggtgacctggcccaggcccatgccatcgccgatgcaaaggatgacgtttcggacccgggcggctccggccggatacgactccatcctggccggcgcatggtagaagctgatgtcgttcgggtccgtctgaggagttggatagttgaagacctccgctgctgacagggtcgtccaggacaggactacgagggtgatcatcaaagtggtggctgtccacacgtggcgacgattcgtcattggcctgatctccttctaaatccggaatctgtaccgttgctgataccataccgctgttgtctatgcaaatgctaatcgcgccgttccgagcggttgcgagtctgccggtattttcttcttcggccgaattgcccctgcgcgcgtactgtttttcgtcgcaactgctgatctgcacgcaggccccaagcccttccaggaacgtcttgtcctgcgtcgtggtcgagccgtgatgcggaacgactacgatgtccgctctgagttcgggatatcggacctgaagctgctgctgggcgagttcctcgatgtccgaacacaggagaatcttcacgcccgcgaattcgatgagcaggaccagggaacggtcgttgtcgctcagttcgcgcgtggacgacgggtcgtcgggaggccagagcgtgcggatcgtggctggtccggcatcgagaagcgccggcaggggttctatccgacgccccctgtgacgcagggattcgaccagcagatcggccgtcggatcgctccgaggcgggacgccgaacgccctgccggcatacacgtgacggaccgtgcaggcatccacgatttccgggattccgttgacgtggtccacgtcgctgtgactgacgatgatggcttcgagttccacaatgcccgcggcgttcaggaagggcacgacgatgcgcgatccgatgtcgcggtgatacatcgagccggcgtcgaagaggacggtcttggcgccgggcagttgaacgacgatcgcctggccgtgccccacgtccaggcaggtcatttgcaggtgatctcggtgggtgcggctccatttcaccgtgctgatccaggcggccaggacaatggccagcgcgacgcacaggccgtgcttcagatgcggccggcggatgcgtccgaagcgggcgaaaagcaccagcccatagtagattgcgaccagtcccaccgtgacgcgaccgatgacgatcgtgttggtatccaggtggctcatgagtatcacgatctgagcgagcaagtcggtgcacagcgcgagcaacgggcccaggacggcggccaagctcggcaacagaaagaacaggatgatcttcacaaagccaatcgtcaggatcgcagacaccagaggagacaccagcatcgtccagagactggccagcggtgtaatggtccagaagtggtacagcaggattcctgcgccgccgatccaggcgcccagtcccgccgcaagcagtcggatcatgccgccgcccatgcgtttgaccgcgtgcaagggcgggttcaacgacaactcctgccggcggaaccagccgtacgtgaggtcatggaggcagccctcgatggggccggtcagtgcgagaattcccgctacagccgcgaacgacaactgccagcccgcttcgaacaactgggtcgggcggatcagcagcaaaacgatcgcggccagacacaaggcgttcagcgtgctggtgcgacggcgtgctatcgctgcggcgcagaaggcccagacgatgaccgcgccgcgaacggtgggcgcccgcgtcgggacgatcagcaggaaagccgcgacggcaagagcgcacaggacggcgcgtcccggcttcatcaggcctgctgttctgcccagccaccagatcgccccggcgaagatgcccaggtgcatgccggagaggctgaccagatggagcagtcccgtccggcgaaatgcctcgaacgtgcgccggtcgatgcggtcccgcttgcccagcagtagagcctccgccaagccatgagggtcattcaccgacgccgagccgcacagcaacgctgcggaagcggcctggctgaatcgcatgcgcagacgggccagcaggttcgtacgatgggtgtcacgcctctggatggaatctgccgaggggaccgaagcgccgacgtagatgttgcggcgcgccaggtgcgcggccagatcggactgccccgggtttctcggcttggcgaatcgatacagccagcagtaagcctggatggcgttaccgaccctcagattcagtgttggtccgtcgatctgcacgcgtacgacgccgcgcgcatcgatccagccgctgccggtcttgatctggtctactttcacatagaaaaccatctgtggatcggtgaacgtcaactcagcgaagcaccagtcctcccggacgtgcgacggctgtgtgagaatgcgtccacgtatcgtcgccaggacccgctccgcgcccacgcagtgacgaatgtcgttgccgccggccgtctgataggcgctcagatgtacggcgccaagtcccacgaagcagagcagcgcgccccacgccgcgacggggggccgcaggcgccgatacgtgcaggccattccgacgcagagtgccgccgtcaggagcaccggtacaatggtctccggacgcagccgctctaccgagtcacctggttcgagccatgccgtcatcgcgtgctgggcaacaatgcctgtcatgagaccgaccgccggaaagaacagaccggcggtgtcgatcagacgtgcatgcagactctgcccgctgagctgcgcctcgatatgggccaaccttctccgaatctcgtccataatgatatcgatagtctaccgtgtcggggatgatttgaccagagggaaccctcgcatttctgaaccgcccgggccttggcggcctataaagagctgatagaatgggcagtgcgcggaatttctgtcgggcaccggagtcggttcggatgtgggagtcagaacgatggatgtggaaatgagcggctacgaggtgctcgaaatcgccgagaagatcgagcgaaatggggtgaagttctaccgccgggcggcgggattatgcgacgatccgagcatcagtacgctgtttgtccaactggcccagtgggaaagcaagcacatcgaggtgttccggcagatgcgcgagcgcctggcgagtcaccactggcagctcggagacttgcgtccggaccggctcgatgggcccgacgcgcgggccatggcgggactggcggtgttcgggatccagcccgatccgagccaggagctgaccggcaacgagagcagggccgacgtcctgagactggccatcgaaaaggagaaggattcgatcgtctactacaccggactgaaggactttgtcccgcaggagatcgaccgccggacgatagaagaggtcattcaggaggagatgaagcacgttcgtatcctcgtccagtcgctggaacaaatcacgtgacggcaggttcggcgaggcacccaagcagggggggcgggtgtgcacggaacaccaattccactgaaccgttgacaccgttgaaccgtgtatcataataccgctggcaacgctggcctgtgcgcggtcttgggtggatgggtaagaagggcggattgtgatctcgccaggcaatcgagtccgatgaaccgaggatgaccgaatgagggttacgcagcaggccgcgaggaagcaggatgtgtccatcgtcctgtgtgggcaggccggacaaggtgtgcagacggtcgagcatctgttgacgcgcatcctgaaggccgccggctatcacgtttttgccacgaaagagtacatgtctcgtgtgcggggcggcgccaattcgacgacgatccgcgtctgcagcaagcgcgtcgcggcgccgatcagccgcatggacattctcgtgcccctgaacaagggcaccgtcgcccatgtcgccgaaaggctctcgcccgagacggtgctcgtcggtgagcgcgaggtggtcgccgacgaggccgctgaatcacatcgactcctggttgttccattcacgcagattgcttccgatatcggcggcaagatttactcgaacgtggtggcggtcggcgcgatcgcgggcctgctgggactcgatccggaggcggtggtcgcctatgtccggcggttcttcgcgaagaagtccgaagacatcgtcgccaacaacgtcaaggcggtgcaggccggctacgatgccgtcggcaagctcgatctcccggatgggctgaagttgaccttcaagcccagcgccaaggttgcggatgagatgctgctcagcggcgccgaagcggtcgggctcggcgcgatcgcgggcggctgcaacttcgtttcgtcctatccaatgtccccatcgaccaatgtgctgaccttccttgcccagcacggcctcgagcagggggtcctggtcgagcaggcggaggacgagattgcggcgatcaacatggcgatcggcgctgcgtacgccggcgcccgcgccctggtgaccacgtcgggcggcggctttgccctgatgaccgaaggcgtgagcctggcgggtatgctcgaatgtcccgtggtgattcacctggcccagcggccgggaccggcgacaggcctgcccacgcggaccgagcaggcagacctcgaactggccctttacgccggacacggcgagttcccgcgcatcctcttcgcgcccgggacgcttgaacaagccttctatctgacgcagagggcgttcaacctcgccgacaagtaccagattcctgcgtttgtcctgaccgatgagtatctgatcgattcctactacaactgcaagggtttcgacctgtcgaaggcgaaggtggacaggcacatcgttaagaccgcgccggactatcgccgctacaaattgacgaagaatgggatttcgcctcgcggcatcccaggatacggcgaggggctggtcgcggtcgacagcgacgagcacgatgaggaaggccacatcacggaggacctcaacgtgcgcgtggccatggtggacaagcgtctggccaaaggcgaatcgctcaagaaggacatcgtacgtcctgagctgatcgggccgaagaactacaagaaactcgtgatctgctggggctcgacataccacgtcgttcgggaggccctggccgagttggggcggaccgacaccgcgatgctgcattacagccaggtgtacccgctgcactcgagcacggccggccttattcgcaaggcccgcaggaccgtcgtggtcgaaggcaacgcgacgggacagttccgcaagctgatccggctgtacgccggcgcggatgtggacgaggccctggtcacgtacgacggcctcggctttacggtcgaagacgtggtcgaaggactcaccgagatcttttcgtaaggactgtgcccgatggcgacggatgttttcgagatgggtgacatcgacattgcctggtgtccgggatgcggcaaccacccgattctcaagacgctcaaggaggcgctcgcggaactccagatcgacccccgacagctcgtgatggtctccgggatcgggcaggcggccaaaattccccactatctcaagtgccatttcttcaacggcctgcacggtcgggcgctgccgccggccaccgcgatcaaggccgtcaatccgaaactgacggtgatcgccgagagcggcgacggggacatgtacggcgagggcggaaaccatttcatccactgcatccgccgcaatcccgacatcaccaacatcgtccacgacaatatggtctacggcctgacaaagggccaggcgtcgcccacgagccggcgcgggttcaagacgcctgtccaggtcgccggcgtgatcctcgaaccgttcaacccgctggcggtggccatcgcgctggacgcgagctttgtcgcgcgggccagctcgggcgaccgcgagcagaccaaagagattttcaagaaggccatccggcacaagggctacgcgctcgtggacatcttccagccgtgtgtgacgttcaacaagctcaacacgtaccaatggttcaaagaccacgtgtactacctcgacgattcgcacgatcctgcggaccgcatggcggcctttgccaaggcgacggaaaccgatcggctgcctctcggtgtcttctacgtcaatcccaagaacagcttcgaagagaacacgcagatgtatcgcgatgatccgcgtccgctttgcgaacgggacgtggacgccgccaagctcgcggcgctgatcgacacgttccggagggccggctgacggtagcctgggtttggctttgagtcgcaacgcgatagaactgaagaacgtcggggtcacccgaaggggcaacgtcattcttgccgagatcagcctgagtgtcgaagcgggcagttgctgtgcgatcctcgggcctaacggctcgggcaaatcggccctcatggcggtgctggccggctacctctggccctcgacgggcgtcgtcagcgtggacggccgcacctatgggcaagtcaatctggccgacgtccgcagccggatcggactgatcgagccttcgcgggcgccgaagttcgacgagcggatgtgtgttcgcgacgtcgtggccaccggcctgttcgggacgattatgctgcctccccatcgcagcgtgaccgacagccagtggcagcgcgtggacacggagatggcttccgtcggtctggccgagatcggcgagcgggcctacggcgacctgtcttccggcgagcagatgaagacgcttctggcccgggcgatggtctcgaacgcgaagattctgcttctggacgagccgacggtaggcctggacatcggttcgcgtgcggcctgcgtcgccgtcctggatcggctgttggcgcggagccggccgccgacggtcgtgattgtctcgcatcatctggacgagctgccggccgcggttgaccagatcgtgttgatgaagggcggccgggtggtcggccggggcacgcccgacgatctgctgacctcggcccacctgacggttttgttcgactgtcgggtcgaggtgatcaagagcaacgggcggttcctcgccagcgtccgctccgccgatttgggatgatgttttctgggggcgtgcaaaacctgtgactggattgatgcgaaagttcttgcggccgggccagttctacgcatcccggcggcccgtgatgaccgagacccttgtcggctcctgcgtcacggtttgtctgtacaacaccgaaggcggattcggagcgatgaatcacttccttcgcgaccggccccggaacgagtccgatccggaggtgggaacctatgggacgaccgccacccgcaagatcgtcaacgccatgctgaagatcgaccctgagccgcgtcactatgaggccagcatcttcggcggtgcggcggtgctgaagagcccgaacaccgatgggagcatcggggacggcaatgtcgcggcggctctggaggtcctgaaggccgccggcatccgcgtcgtccgccaggaggtcggcgggacgcgtggccgacgcgtgaggttcaacacccacaccggccagatcgaatgccggttcgcgggcgacatcccgcgcaagaagatcccgcagagggccgaatgaccgtcttgctcgtatcgcctccacgagccaaggtcctggcagagatcctcgaacgggtccacacgcggtacaaccatcgccggcttatcggtgccgatccgcttcaattcgcctatcggttcgaccggccgcaggatgcggaggtcgcctccttcctcgcggcggttctagcctacggtcgcgtacaacagattcaacggagtctgaacgatctgttcgcacgcatggattgcggtctatacgatttcgtgatgaacttctcgccgtcgcgccggtcgcgtctggccggcttcaagcaccgcttcacgaccgccgaggacgtgggcgacctgctggagttgctgcgtccggtgcttcgccggcacgggagcatcgaatcgttcttcgttaagggtttcgatccgagggaacggaacgttctgcccgcgttggcgaggttctgcgaccgcctgacaaacggctatgcccagcatcacggcggccgggtcagccgggggctgatgtacctgctggccagccccagccggggcagcgccagcaagaggctgcacctgttcctgcggtggatggtccgcgccgacgacgtcgatccgggactatggaagagcgttgccccggccaagctgatcgtgccgctcgacgtacacatggcccgcctttgccgcatcctcgggcttcacgacagcaacacgatttcccaatcgaccgccgtgcaggtcacggagggtttcgccgcgatcacgccggccgatccggttaagtacgatttctcgctgtcccgcatcggcatcctcgacgaatgcaccggccgccttcgccccgactgcgaattctgcgaactcttcgacgtgtgtctccaccgtgcggatcggtccggccgctgacaaccgtttccctgtcatggcgccagtaggacaggcgacgccggacacttggtacaccaaatcagcccgcctggtagatgacgggccggtatcgcggggctgggatcgtcttgccttcggctttggcggcctccagccaaagggcctttgctttctccacttcctccagggcctcggctggcgttcgtccgaaggccgagcaggcctccaggtcaggtatatcggcgatgtacccgccgtcgtcctgcgagtagaagatatttatgtgatagtcctgcatcatgcatcctcgattatcaggttatggcgttcgaccagccgtaagacctggcgtatctgataaggtttggcctgttcctggacattctgaaggtgactagttcgggtattcccggatggacgaagatatggtggctgccggcggtccgcgccagacgaaagccgaaagcctccacaagaacgaccacgtcttgaaatcgcacgttcttctgactagtgaggatcttctgtagcagctttcgcttgttcatctcgagcatctcaccgaagccactgtccgagtatcgcaagccattttcgggattgaacgcgtgactgtcaaggtatagcccgcggaatcgatacacgcatggagaagggcaccccagggtcccgtgtgtttcttggattgcggttgttgcgatttctggtaaactccggcggcgggtgggacgtatcgctggcggggtggggcggcaacagtggcattgacttgaggaatcgaacggatggatgcgaaggacctggagaagtattcgtcggcgatcacgctttcggacatggaggtgttcgtcttcccggagctgatgtacagccttgtgctggccaacatcatgagcccgctgctgtggaagtggcggcaggtcgattgcttcgccaagctcgagggcaagaccagctaccggcggctgatgcggatgcggcagtacatcatggacgagttcgacttcaacctcgacctggagacctggggcctgaccaaacaggagaccgaagtcaaccgcttccggcacgtgatccgccccgagcagattgccgccagcaacgcgctgttcggctatacaggcgaccagtactatttcgatgttgacatccgcaggcacttcgggctcgacaagtacgacggcgacgtgatcccctactggaagaccgagaccgtcgaggcgatggaggcctttcgcttccggccgggctacgaccgggcggccggcgagtgcgtgtcgctggcgacgctgtatgccgccgcgtcgttcatcgtctgcggcatcccgctggaagacatctacctgatcctcacgccgcttcattcgcagaacttcatcgacatgcaggacggcatccttaccaacaaccgacggctcatcaccaagaccatgtggttcaacggcaccgagatttcgtacaaagcccagcgggccctgcgcaacgagcaggtgaccatcgtcgcgcatccgagcgggtacatccattgcttctacgacgaggcgacgattgacccgaaggtctacgaccacttcgttgcaaggatcggtgagtatctctcggccgagttgaacatcacgacgttcgcgagcttcctgcgatgccaccggcagtaccaggagcatttccagatttgtcgcgactgtcacggccagccgcagttcctcaaggccgagacgctctttcactacgagcacggcagcccgtacaagatcggcgatgccacccacgacaaactcctggccgaggtgtccgacgaggacttcgtgcggcacgagataccgggacgcgtccgttgcgaccggctgagcgatttcctcgcgaagcagaagcccgacctgagagagccggccggacgcgaggccctgcgtcgcttcctcgaaccgcacgtgcccgacgccggacggttcgtcgagctgctggccgacttcgtgcacatccggccgaggttgcccggcaggcagaagagcttcaaggcggtcgagcccatcaagctgtcggtcgatcaaggccgcgaggagatcatcgcaatgctgcaatccaggcgacagagcaacccgacgatcgatctggctttctatgcctatcgggacatggacacgtgcgactggcgcccgtttgtcaaagccgccgtcgaacgcaaccccgtctcgctcgaacgggccggctcccgaccgcttgacgaggtttacgcctggctcgggcagcttgagccggcctcgatctacgacggcaaccgcctcgcccagcccgacgaggtcgccaactacggcaggggggatggtctcgaaaaggcctttctgctggccaatgtcgtgcgccgccgccagcccgaccggtccctgcgtctgatcgccgatcgcgacaaggtcgtcgtgcgcggcaagcaggaattcgcattccaatcggccaagaccctgtccgcccaggtggacatcgctgaggacggcaccatccaagtgaagcgctgacacgtggttcgccggttctattggccgcgccggtggtacagctcgatctgtctggtgactcgctggacgagttcctggttgccggtggactgggcgatgcgtctggcctcctccaagcgggcgacggccttgtctacctgaccgatttgggcgtagctggtcgccagccccaacagcgcatcggtgtggcgcggggccagccgcaggacctggaggaagtgcgggatcgcctgctcgtgctgccggagcccagccagcgtgacggccaactggtagcggaccgcgacgttggccgggtcgaggctcgcggcgtaggacaactgcgtcaggccctcctcggttgcccctcgggcgcatagcgccatccccagatgggcctgcgccatgcaatcgcccggcttgagccgtgccgccaggcggtagtgctcgagggcccggtccggttcgccttgctcgtccagcagcaccgcgaggttgtggtgagccgtgtagttgtggggatcgagctggaccgttcgcagccagcacttcatcgcctcggtcttgttgccccggcgggattccgccacgccgagattgaagtgcgcctcgtgaacgtccggcgccagctgcagcgcccggcgcagatggcggatgccttcgtcgagccgattgtcggcgacgaaggcgcctcccagatcggccaggatccggccgtcgtcgggtttggcctgagccgcctgcgacagatgccggatcgcctcgccgtagcggcggcgggcgaagaaggccagtcccagcgtgtgcagcgcctcgccgttgttcggattcagctccagggcctttctcgcgtgacgttcggcgccgtccaggtcgtccgatttgaagcactcccatgcggcccgcgcgtaggagacatcgtcgatgaacttctcccgaatctgtcgaatcgcggcggcgtccgcgttgacgaactccgggatgttggcggcgcgatccggcgcggtcaggcggtcgagcacgaccggcggcgtgctctggccctgttcgtcgatatgggtcaggtacagccgcgtgtagggggagtcgggcttgcccgagaagacgagccatttgccgttgggcgagaagctgtgccaggagttcatgcacttggtgttggcgcgcagacggcgggcctggcccccctcggcggggatgatgtacagttcgctgtccggctggagcagcatgtagttctgcgcccggcagaacacgatccacttgccgtccggcgagtagcgggggaagtagttgctcttgccgttgaacgaggccccggcgatcggctcggcctgcccgccgcgtccctcgttgaaggggacacgatacaggtcgaactggaacggcttgccctccaccaggaattcgcggcagtccgacgcgctcagcagcaccctgtgctcatcgccggcgcgccgtacgcggtacgcctgcgtggcggcaaagacgatatgcttgccgtccgggctccacgtcgggttgctttgcacccggttcgggtcgtcggcccccggcagcgactggaatgtgcccgtctgccggtcgtagacgcacaggattcccttgaccgggaagaacaactgcgagaagtccaggccgggcttgggcacaaagaccgactcgtccttgacggtgctcacgacgaatcgcccatcgggcgagacctgcgacagcagcccgaacgtcggctcgcgttcatccctcctgtaatcgctccaggtgatgatcgcgttcctgtcgagcgtgatggacctggcgactgccgcgatggcatacgagcctttgtcgttggcgtagtcgacgtccatgcccagtacggctccatcggaggagaatgaatggcagttgccgcacacgggcagcttctccaggacgatgggcggcggcgacgtcgcggagatcggaccgaagcgccagcgaatagtggaggggtccttgacggcgtcgatgaagggcaggttcacctcgcgatagaacagcggcgctgcgacctcgtctgatgaggtccggatcgtgacttgtccggccgacaacgcctgctccggcgtgcggcgatcgagcccgaccaccctcacgagcgccggtctctccagggaccgccgtttgatctgttcccagactcgcggtcgcggctgccattgcggctgcgaggcgaaatggtcgatgtggctgtgaccctcggcaaacacgatcgtgaccagccagagattcgcgcggacgttctcgtccttccatcgcagcgtcggtgcgctgatctccggcggaaacagcgtcccgtccagcgggtactcgatcgcgatccgacccggcgacgtcgcacgggccagggacgccaggatcgcctcggaatcgacccccgtcccacgcagggacagaacccccaatccggcgccgaccagaaccgccgtcgccgggacgccccacacgagatatcgaactgacctttgcacaactctcgtgccttgtgtgctgtcacccgccgtccgatttgctcacatgatcttctcaacgaccaccgactgcccttcggtgaagtgggcggtggcggcgtcctccggactgatgcgcatcgcgtcgccgtccggattggcgggggccccggccttgacgtggacggagcgcaggccgccataccaccagcggacgtcgctggcgtaaagcaggtcgcccggctcggccgccatcgtgtcgagggccgattgcggcacgaccgcggcgttcgtgcccgagaggcccgcgtcgatcctggccgtcagtcgcacccttccgccgggccggcgattgggttcgccgcccttgaattcccgcatggcgtcgatctgagtccccgcgacgaggcccttcaattcactcaacggccgggggctggtaaaccacgtgaccagcacgccgatcgcgccggccgccagcagaccgaacagcgcccgcatgaacgagtagcttcccgagcccatgccgaagtcgaacggaccgacgagcgcatcgggccacacgaaggacaggccgatcaggatgcttccgccggcaatggtcgcaaagccggcgactggcgtgtaccgcttccagagaatccccagaaacaccgccatcaacaccggtggggtgacggcggcggtgaacatgctgtgggcctcatagatggtgcctttcataaagaccgggaccagggccaggcccattcccgccgcacacagactcgtgatccgcgccaccagcaaatggtgcttgtcactggcgttcggtctgacgtagggtctccagatgtcgttgacgaagatcgcgctgaccgcgttgaccagcgagtcggccgtactcatgagcgccgccgtcaaagccgccagcacgaaaccgaagacgccgggggcacaaaggaaatgggccgccttgacgaacgaatcctcggcattggtggccagctctccgttgttgaccagggcccgggcgatccacccgccgcaactggtggcaatggccgccagcggtgtcaggaccagaatccacgcgaccaccatccgccgcgagtccttgacgctccgcagcgaaaggaagcgcatgatgaaaccctggtgcatcagcatgagggcccctgtgttggccaggccgtcctggacgtagatgccgatgaagctgaacttcggcggcgcattgaaatccgagaaggcgtacttgtgttcggccggcaacagcgcccagaactcgccgaagcccccgaagtggtagatcgcaccgacgaacagcccgaggccggcggccagcaggatcagtccctggaccagatccgtcatgatgaccgccgtctgcccacccacgtacacgtacagggcgaccgccaccgccgtcacggtggccccggtcatgacctcccatccgagcagggtgtgcatggtcttgcccagcgtgatgagattgatgccgatgtagccgaccaggtacagcaggatgatgaacgtcgccatcacgcgcgtgcgcttgtcgaaccgcgcctccaggtattcgggaatggagacgatcttcttgtagtaaatgatgggaatccaggcgagcacgaggatcggcatccagaaccagtcgttgaagtaggtctgcgtgctggagatgccgtactggaacccgacttcgctatatttgatgaagctgtagctgccgacgaccgtggcgatgcacgaaaaggcgatcagccaccaggagaaacgctggccgccgaaaaagaagtcctttgtgctcgccgtgtagcgtccgaagtacagaccgaacccgagcacggccaggaaatacgtcagcatgacggcgtagtcgagggttccgccgatggcttgcgcaatcatagggaccctccgttggaccagtgtggcgatagaaacgtgaagacacacgccagcgccagcagaagaacgtatccggccacgagcgtcacgaggagccggcggtcctccgcgatccgcaggttcaggtatccgcctcgaaagcccgcccagatgccgacgagacacagtatcgcgccgacgccgaactggcacacaatcggccacacacgcagcatgttcacaggatggttctcctcaatcagggatcgccgtcgacgagaaatacgtcctgacggttggtgccccacggcatgatggaacgggcacaaccgaccgcaattgtccgcacagaccttggcatggcgccaagctacccgctgtccggcccggcgtcaacccttgggcggacgtccgtccctcattgcacgcatgtgcaatcgacgcgcagaaaaaagcgggcccttgtcgtgtggacagggcccgccgtggtatgcgagagcagatgccatcggtccaatcgctatggcgtggcggcggggcggccgaaccccacgtcgtcgatgtagacgatgccggttccgccggcggccggactggtccgattgccgacaccgatggttatcttctcgatcttgaccaggttgataccgttgaactggctcagcgggatttgccattcctgccagaccgtcttgaggattgcgtccgggtccatactgcggacggtggcgctgcgaccggcgctgtcttccagcgtgacatagagcgtctgcggcgtgttcttggcgtcgccacggaaccacagccgcacgcggtcggcccccccgatcgtccaatcctgcgcccgctcgaaggtccgctcggcctccgagtagaacggcgaaaccgagttattgtatgccaggggcatcgactgttcgccgccgtggacgatggtccgctcagcgaacggcgcattgaggtagccaacggtggagccggtgttgttaacccagccgtcgagccatgtgtcgaagatcgttgtgccggcatcgacgtcgtcgttgtagctttcaaaatcgtcgatgctcgcgtattcctcgacggtgaagctccagagatcgccttcccacaggccgacggcctcagcctcgttgacctcgtccaccctccagtagtagatcgttccgaaggtcaggttgtcgggcgtgcagctggcggtctccggcgtgccgaccggtgtgagggccgcgggatcggtgcccagatagacctcgtgcgtgacggcttcgcgaccgctgacccaggtcagaacggtgtctatggtgacgttggtggcgccgttggcgggctgcggccggcgcgcctgcgcggggatgtacaggaaccgcacctcgctgaggccgtaccgcccgacgagcccgtagccgctgcgaacggtcaggcggacgaaccgggccgcaacgccctggaaatccaccgtcgtgttgtacacgtacgccgcactggccgttgcctgggcgaattcgacgtctcccagtgtgatccagtccatgccatcgacggagtactcgaccgtgacggttctaaggccgaaaccgagcagcggttcgaactctccgttgtagttccagaccagcatctggtggagcttgtagacccgatcgaatctgtactgaatccacacggcctcatcggggcccggactggccagccacatgtcccgtgagttcagggaatgctggtcctgggcgttcacgccggaaccgtcgaccgtcttctccggtccggcgtcgacatccgcgtgcgatgcggtggccacgatattctcgatgggataggcgaaagactccgacacgaaactccagaccctgcctttgaatatggtattggctggagcggcgccgacaccgtccacacgccagtaatacgtctggtcaaacgcaaacaggccctcagggtcgaacgtggctgcggcctgcccgggaccgaccagcacccctcgtggatcgccgatattggcggcgcgcacgtcgtcccagcttgtgcccagatagacgttgtgccggacggcggagacgtctggtgtccacgacaacacggcgtcacgcggcacatcgcgtgccccatccgccgggctgggctcggtcgcctgccccaggtcggtgcccgccatcacagattgaatctcggcttccgtcagggcgcggttgtagatgcgcacgtcatcgaccagaccggggaagtacctgccgctgctgagccgcgcaccgattcgcacctggtcgatcgtcccgatgtctccttcggcgctgtcgatatgccggccgtccagaaaccaacggcccgtgccggcctcataggtgccggcaagatggcgccattccgtatcgaccggtccgatgatccactggtacccgcagatgtgggcgacgtagttgcccttgtcgtccacctccacgtcgaagtaggtgccctcgacgtttccgtcggggacaaagccgaagatgcttgtcttgtcgggtatggcggttatgccggccttcacccaggccatgactgtcctgtcaacagcccccgtgattcccacactcccgacactgacgtagtcgtctttgccgtcaaacagcagcgcgccgtcaacccgtccgattacccacgtcggaccgccccggagtgttccgttgtggccccggccgctggcgtcatttgcgactgttcccgatccttcgtcgaacgtccaccacccgatcagagacggatcggccgcgacgccgagggagatcaggatcagtgtcagcccgagcacggaacaagccagcttggtttgcctcttgaacataccagtcctcctcgaagaaatgcgactaaggccgtacccaaagcacttacccagtctttctccgcaagcctccagatcgcctccggccaaccggacaaaccccggccgcagcgaccccgaacatgcaccatattatcataccataatcgcccctcgcctgcaagatcgaagcctgacggcgtcactacgagccgaatctgattttggcgagatagatgctggtttttccctggtggctggagtagtagctgacgtagagcaggtcgtttcgccagagcaggccgggatagctggtatcgcctccgctgggcaggtcgagcagacgcctcatcgtcttgttctcgacgtcgaggacggttagggcggtgtggacgccgccctggtgcatgcgtccggcggcgatccagagacccgagggcagccggatcaggtcgggcccgccgaaagcgttgaactcagttcccaggtcgtgccatttccattgtgtatagtcggggttgctgatcccgagcatcgtgctgctcggcgcgtcgcccgagttgtcgcggcgaaccagggcatagcacgtgccgtcaggtccgaatcgcagcgtcgtctcgttcggaaagcccttgtcgaacagcctctcgacgagcggctcgtacttgatcccgtccgtgctggttagcagcgacaggtactggtcgctactgccgccggcggtgtacgacacgccgtaggctttgccctcgtgccaggtgacgcgccatagccagcggcccggctggctgacgatcaccggctcggtccaggtcgtgccgtcgtgggagaacgacacgaagctgccagtgggcacgtgttcgccgtcctgttttcgcggtgcagcaccgccgatcagcatcagccggccgtccggcatgatcgacaggtgcgcatcgcggaagtcgtagccctggaacgaaatcagggccgccgacgtccaggtgtccgcatcggccgaacgcaacacgcgaatccgcccgtcggccgagacgtggccgcgtccttcgcgaaaagcgcagtagaactgctcgccgaaccagaccaaatccgtaaacgcgttgtgggcagcgtcgtcccagatcttcttgacctcgacgatttcggcctcgataggtgccaccgctgctgcggcgaagctgttgaacaaagccagaaacagtgcgaacgttcgtgttctcatggcgctgcaatctccccatccgttccgttgtcaatacgcgcccgtgacgcgcatctcgatgctgaacaatgaatccgaggcggtgatgaaaagggtccgccggtcgggcccgccgaaacagacgttggcagtccagcctttgttgacgtcgatctgctcgatcttctcgccgtcgggattgaacacggtgacgccgcgtccggtcaggtagacgttgccctcggtgtcgatcgtcatgccgtcggagcccatcgagcagaagagcttcttgtccgagagcgaaccatcggtgttgatcacgtatcgatacgttttgcggtctccgatgtcggcgacgtacaggagcttgccgtccggggtgccgatgataccgttgggctgcacgagatcattggcgacgcggacgatgctcttgcggtccggcgtgacgtaatagacgtgctggccgtcctgttgcatggcggggttgcgcttccagtagggccgcttgtagagtgggtcggtgaaatagatgccgccgtcgggggcgatccagaggtcgttgggcccgttgagcagcttgtcgtcgaagcggcggacgaagatcgtgacgtgtccctgcggatcgatcatccacagctcgttatccatgtcggcgcaggcccagaggttgccgtctttgtcgaagaacaggccgttggaccggccgcaaggcttcatgaagtccgtcagtttgccgtcgacggaccatttgcagatgcggtcgttgggctggtcggtgaagaagacgttgccctcgcggtcggcggcggggccttcggtgaactgaaagccgtcggccagcaatttgaccttggcaccgggagcggtgacaccacttgtctttgcctggtcggcttttttcatgacagccaccagctcgatgccctcggtccggcccaggttgcgggagtacttcttctcttgtgcgttgttccagtgctcgtgaacacccaggctggccggccgcacgacgttgccggcgtggtcggggtcgtagaacgtgccggaaggcgggttgtcgatcagtgccgcctcgtgcaggtagtcgtcggtacccggcatgcaggaatacttctgcacattggcctcggcctgaaggaagtcgaggcccaccgagtcgatggcgacggggtcctggctggcgaacagactgctggtccagtcgttgttgaacggcgccgactcgaaccgtcgcggctcgtgctcgacgtagtggatgccgccgtagaggccgtcgatgagatagagaaccgtcttgccgccaagctcactgtggctcatcaggtccacgaggttccggtaccggcccgtggtcctctggaagctcgtgtgcatgtcgtagtagcctctttcgtacggcaggcggatcagtgagccgtagtggttcttggcgcacagcgtgacgccggcgctggggtgggccttgagattggccagattgatgaggtagtcggcctcggcgtacgcctgcggcacgtagtcccgtgcgcacccttcggggttgcaactccaatacaagggaaccgaggatggcccggtcttcgtccggccgggtccgccctggcagtcgaggtagatgacatgcgggaactgccggtgcagcatgtcgtagtattcgttggcgaagtaggcgagggtgtcgcccaccgcgatgtcggactgtttgacgccgacggtttccgtcagttgccgcagcagcgaggcgatcatctggggcgacgtgttcatgtagtccacccagctctgcaacgcgtaggtctggggattcacggcgtcggtggtgcggatgaagccgacgaaattgactttcaccatgatcttctggcccggctcgtagccgacatcgcccttgcccctggtcttgttgtggtagcggaagagggcatcccacgccgctttgtcggaggtctcgcccgtcaggttgcgaagagcctgcgacatcatttcgtcgacggccgccggattcgtgtgttcgtcctgccagaggtggccatcgcccggacccttccagtcggtggcttcgggattgtgcacccagacgactcgccctggatggatccctcgagcgacgccgatgggctggttggccggctggggatcggccagcagacgcttctcagtggtgacgctgaacgccacccagatcgccgcgacgctgatgcctacagcggccaatgcacaccgtccgctgcgcagactcgtctgggccttgcgcagggctgccgcccaagccccgatgcccagcagccaggcgacgaagccggacgccagcggcatggctgcccgctgacagggatacatcgctcgcgagggcttgggcaccacgcggatcaggaaccaggccagagccagcaggccggtgatcggcagcagccagagcatccatgggcggggagttcggggctcgatctcgattagcttgcccgtcctgggacagcgtctgtggtcttcacatctatcggtgcgccaatggtgcgggtcataaggtgtcatcggctcaacctcccgaatcgtgcggttcatcatgaaaagtcaactgactgggcattgtaccacggagtctccgtcaagtcgcgtcttttcggtcgcacccggcaagggagggtgcactgcgtgtttataggtaggttcctggggaggccaggaagggggggctatcatctcgaagcacgtggcggatgtcatttcgacgaagggcgaagcccgcacggagaaatctgggcgaggataaggcaatagcccgttcgcagccggattcctccactccactgcgctccggtcggaatgacagagtcgactgcgaccccccgtgccggtctacctacaaacatcaagtgcaccccacacggtaagggagcggggccgatcaggctattgcgtcgtggggcggccgccggtaagatggcgggaaatatccatgaggtatcgtacgaaatggatgggaggttgcatggcataccgaaggggcatcacacgcaggaccttcctacgagctaccgcatcggctgttgcggttccttatgtcatcacgtcgtcggccctcggcgccggcggccgggcgccggccagcgaacggttggtgatgggggctatcggctgcggcggacagggcacacgccacatcggcggcggtatctgggtccagggtggcggcttcctcagcaagcccggtgtgcaggtcgttgcggcctgcgacgtcaatcgcaacaacctcaacaacgccaagagcatcatcgacacctactacggcaaccacgactgcgtcgcgtaccacaacttcgaggacctgttggtccgcgacgacatcgacatcatcctctgcgccgccggcgaccgctggcatacgccgatctccatcgccgccgccaaggcgggcaaggacatctactgcgagaaaccgatttcgctgacggtctacgaggcgcgcgagttggcccgcacgatgaagcggtacggccgtatcttccagagcggcacgcagcagcggagctggtacgagttccgtttcgcctgcgaactggtccgcagcggctacatcggtcacgtcaagcacatcaaagtcaacgtgggcggcccccccgaggaatgtcaccttcccgcgcagggctcgccgccggactggctggattacgaccgatggctgggccaggcgccctggcatccgttccaccccgacatcctgggctggatgcggtggaaggacttctccggcggcgagatgaccaactggggccagcacatgtttgacatcgcccagtgggcgatgggaatggacgaatcgggcccggtcgagatcattccggccgacggcaacgagttcaaggtcctgacctaccgctatgccaacggcacggtgatgacgcgagagggcatcagccagcccacgccgggcgtgcggttcgaggggaccgacggcatgatcgaagtgacgcgcgagcagctcatcactgagccggactcattgcgcaggcagaccctcacggccaacgacgtgcatctttacgagagcaagaaccatccggacaacttcctcgaatgtgtccggacgcggaaccgtccggcctgcgacgccgacgtcggctatcgctcgatcagcgtctgccacctgggcaatatcgcctactggctcggacggcccctgcggtgggacccggcggccgagcggttcgtcaacgaccggcaggccgattcgatgctccagcgggcgatgcgcagtccctggtgcatatgagaacgacaacaccacacggttttggaaaaggagcgcccatgcgaactcgacatattgcccccatcctggtgggactggccatcggtaccctgttggcaggatcggccgctgcggcagcggaggccaaggtaggcgatggcttcaaggtgcacacgctcaacgccgaatcgcgtttcgaggcggcggggattctcgacgtgaaccgcgacgggaagctcgatatctactgcggcgggttctggtatgaggccccgacctggaccaagcacttcgtccgcgagatcaaggaagaaggggagtaccattacgactttgccaacctgccgatggacgtggatggtgatggttggacggacaccgtcggcgccgcctggcacgacaagatggtttactgggtccgcaatccgggccaggccggcgggccgtggacgctgcaccaggtggacacgccgggtaatatggaaaccgcgatagcctatgatatcaacggcgatggccaaattgacatcctgcccaacatcatgagcgctgcggcctggtacgagttctgccgcgacgcctcggccccgcagggtgtgcggtgggacaagcacgtgctgccccaggaagcggcggggcatggactgggcgccggagacatcaacgtcgacggtctgtgcgacattgtgacaccgaagggctggctccagcagaatcctgacggctcgtggacatggcgtgcggagttcgagttgggctacgccggcataccgattctcgtgcacgacgtggacgccgatggggattccgatctgatctggggcctgggccacgattacggcgtgttctggctggaacagaagaaggatgcacaagggactcgcatgtgggaaaagcatctgatcgacaactcgtggtcccaggcgcatttcatgctccttgcggatctggacgacgaccgtcgattggagttggtcaccggcaagcgccatcgcgcccacaacggacacgacccgggcggcaacgatcctgtctgcgtttactattacgacttcgatatcgcctcgggcaagtggacccggcatacgatgcatgagggcggtcgcgtgggcttcggaatcaacaccgcggctgccgatatcgacagcgacggcgacatcgacgtcgtcgcccccggcaagagcggactgtacctcttcgagaacctcatcaagtagtggacaatggacgaaggacgattgtcatgtcgaaaccgaagatcgcgatgatcggggccggaagcctgattttctgcaagacgctggtcatggatatcctggccaccgaggcccttcaagaaagcgaaatctgtctgatgaaccggacgcggcccaagctggccaagatggaggcctttgtcaagaaggtcatcaaggagaacggcctgcctgccaaggtcaccgcgacactgaatcgccgcgaggcgctcgacggagcggattacgtgatcaacatgatccaggtcggcggcgtcgaagccttccgcatggactacgagatcccgctgaagtacggcgtcgatcagtgcatcgccgattccatcggtcccggcggcatctttcgcgcgctgcggacgattcccgttctggcggatatggcggcggacatgaacgagctgtgtcccgacgcgatcctgctgaactacgccaacccgatgggcgccaactgctcggccctcgggtgcgtggccgacgtgcagttcatcgggctttgtcacggcgtgcagaccacgctggacctgatcagccgctacgtcaacgtcccgaaggaccaggtggattacgtctgcgcggggatcaaccacatggcctggttcctgtcgctgagggacaagcgcgacgggcgcgatttgtatccgatcctcaagcggaacatcgagaagcccgagtattacgtcaatgagaaggtgcggtgcgaggtgatgcggcacttcggttatttcatgaccgagagcacagggcacctgtccgaatacgtaccgtggttccgcagcagcaaaagggccctggagctgtactgtgatcagcccgatttcggtggggcgtccggcgcctactatcactactgcaacatgctggcggagaagtacaagaaggtggactatctcgcgacggaatcgcccaagatcacgcgtcgcagcgtcgaatactgttcgtacattctcgaagcggccgagacggaccgaccgttccgtctcaacggcaatgtccgcaacgacggctacatcaccaacctgccacagggctgctgtgtcgaggtcccggtgtacgttgactcgcagggcctgcatccggtgacgatcggcgagctgccggtgcagtgcgcggcgttgaaccagagcaatgtcaccgtgcaggagttggcggtggaggcggcgctgacgggggatccggagcgggcgatgcaggcgatggcgatggacccgctgacctcggcagtctgcacgctcaaggagatccgggacatgaccggcgagatgctcgaagccgagcgcaaatggttgcccgaattcaaaggccggaagctgacgcctcgcccgacgatcgaaattgccaaaggaacggtcgccgtagacgtccccctcgacccggccctggccatcgccaaccgcttcggcgaactggccagatagcatcgcaagctacgggcgccgctcgaagcggtgggggcccgggacgacgttatcgagtacgatgaacttgccgtcgcgtcgaccctgaacggtccggccgtccatcagcacctgcgtgctgtcgctgccgagtttcgggaggtagatgacggcgggcatgttggcgggcgtggttacgttcaggatgaacgattgtcccttgaccgcctcgaaatccacgtggatcgtgccccgaaccgtgggcagatcaaggctgccgcgcgtcagcgagccgacctgtggtctgatccgcaccttggcgaaacccggctcgaccggctcgacacccatcaggcagcgggggatgatgttggcgggcgcagcgccccaggcgtggttccagtcctgattgggcttgtacttgttgtcccatgcttcgagcgtgatggttgtgcccacgtcgtagatcatatgcggccagcttcggtctgtgtcccggtcggtcatcagatgcagggcgaagtcgtccagacccgcttcatagagggcttcgagcaggtactgcgcgccgtagacgctgcacaccatgccgcgattttgaacgaacgcggcgaccgattcgacgtactccggcggcaccaggccgaacgccagtgggaacatgtttgcgtgcagggcgctgtgcgtgctgccttcgccgtcgatgtaaacgcctttgttcttgtcgagcagtttgtcgttgaaggactgcctgaccttcgctgcggccgaggcgaatcgcgtggcgtcccgctcttcgccgagggcttgggcgatgcggctcatgagcacgagggcccgatagtgaaaggcgttgacgacggtgttgatgggtttgaattcgaagtcgtccgtctcgccgtagccgccttgcagcccgaggatgtttccgtgcggccaatccacgatgtcccgcagcgtaccctggaagtggatcgacgcgagcactgtgtcgctgaccaggccggtctgcgtgctgatgagtccatcctcccgggccagcgtcagcagcgtcttggccttcaggtcgtcgtagaagtgttcgatcgagtcggtatcgcctgtgtacaggtagtcgacccaggccatcagcaccgaatgcagaatccactcggtcggccaggtcgggtgcgtcatcaggtactcatgcgtgtagcgggccatcgtgtattcgcggtccacgcaatagtggcagagctggttgatgtaggcgtcggcctcgtaggggatccgttcccggtcgccgtcgacgtaaacgccacagaagctcgtcgccttgatgctgtacttgcacagctcccacacgtcgttgaggaccggatcggacgaatggaagcgggaagcctcctcgtcgaatggatagtggaccgcgatctggcaaatcgtcgaggcgtcgagcgtcgaagggctgttgaccacctcgcagtaccgaaacggcatgacctccccgatggattccggcatcttgattgcctgcggaccggtgtttcgcctatcgggcgggatggtcaacctgtacgtgtgtgcaccttcgtcgagcgtcagctcgagttgccgatatcgtcgggacccgcccggattgcggtcgatgctgtcaggctgagagcagacttcgcccagatggatttcgatatgacgcccggcttcggggctggtcaaggtcagttcgacggttccgaaagcggccttgccgaaatcgacgaagtagtgccggtctgtcttggtggtgatccggacgggtttgattctgctggtcgccagcgggtagcggactgttgtgtacgggccatccagaggccctgtacggaatgtctggacctgtgagtaggggctgacgtgatcctgctggttccacgttcgtattttccagcagtacgttgcgtccggggagaggggcctgccggcatactcgatgccgaccgaccgggaggatcggaccttgccgctatcccataggtcgccgcgaccctgttcgatctcacttgcggacgaggcgaccagaatctggtaggcggtctggacgtcgttccggtccagcaagggtacgatccaggaaaactccggtcggggatcgacgatcgctgtctttgtcggctccgtcatcagctcacacaacagccccgaaggtaccgagaaagccgccgtgacattctggggtgtataggcaacaagggcgaacagtgccagtggtagcgttcttaagcattgcatccaggtttgcggccggtctgactgaggcatggtagcgacctccggattgtcttcatcaggcgtcttaaacgctggagcacgaaaccgccagatgacgataataccgggaagcctgaatgatgacaacgacatcgaacgccgaaggcttttcacttgatggggcggccggtccttctaatgtgaatccggatggaacacttgacaattgctgtcaagaacgccgatccggcagacctgcgggcagtctgcgccgcagacgacgggtgagaatttgggaagatcggttgcctggcaggggaagttgccttatcatcacgtgcttcgtgcggcacgggctgcacgtggagtggtacgggccggccgtgcatccgcccgcaacatggcgaggacggatgcctgtcggcgtgactcggagcataaccactgcgtaaagcagtgtgcagtgtgaggttgtagatggacaagtacgtctgcatacacggccatttctatcagcccccgcgcgagaacgcatggctggaggatgtggagttacaggattcggcctatccctaccatgactggaatgcgcggatcaccgaggagtgctaccgtcagaacgccgcctcgcgcatcctggggcccgaccgcaagatcgtcgatatcgtcagcaactacgaacgcatgagcttcaatttcgggcccacgctcctgtcctggcttgaaacccacgccccggacgtctacgagagtattctgcaggccgaccggaacagccgggagcggttctccggccacggcagtgctctggcacaggtgtacaaccacatgatcctgcccctgtcgaacacccgggacaagcacacgcaggtgatctggggcattcaggatttcaagcaacggttccagcgggcgccggagggcatgtggctggccgagacggcggcggatctgccgtcactggaagtcctggcggagcacgggatcaagttcaccattctggcgccccggcaggccaagcgggtccgcaaggtgggtgcgcgccgatggaaagacgtcaacgagaccgatctggacaccagcgttccctatatctgcgtccttccttccggcaagcagatcgtgctgttcttctacaacggtccggcttcgcatgacatcgcctacgggggccttcttcacagcggcaccaacttcgcctcccggctgatcaatgcgtttcccacggacggggacggcccgcgcctggtccacgtggcgacggacggggaatcgttcgggcatcaccaccgccacggcgatatggccctggcgtactgcattcaccatatcgagagcaacaatctggcgaaggtcaccatctacggcgaatacctggaaaaattcccgccggaccaggaagtcgagatctgggagaacagctcctggagctgcgcgcatggggtcgagcggtggaagagcaattgcggctgcgcggccgaccaggccaattcgggaaaacagcagtggcgcgccccgttgcgacaggccatggattgggtccgcgacaaggaggccgaggtgtatcaggaccgcatgtcgagataccaccccgacccgtggaagctgcgcaacgaatatatcgccgcgatcaacaatcgctcacaggagaacgttgaggatttcatcacccaaacgaccggtcggacgctgccgctcgaggacaaggtgacgttcctcaaactcctggagatgcagcggcacgcgatgctgatgtacacgagctgcgggtggttcttcgacaacatcaccgggattgaggccgtgcaggtgatgcaatatgcggcccggtcgatgcaactgtgccaggaagtgcagaactgggacctggtgccgcagttcaaggagatgctgcaacacgctccggccaacgttcgaccgtttaccaacgggcgtgaagtctacgaggccttcgtcgaaccggctcggatcgatctgaaccgggtggcggcgcacttcgcgctcagttcggtgtttgaggaggcgcgcgaacggacgacggagatctattgctatacggccacggtggacaacctggatcgcaaagaggccggggtgcaggttcttaccacgggccgggtcacgattcggtcgaacatcaccttcgagcggcatgcggccgatctggtcgtcttctatctgggcgatcacaatctgttcgccaccgtaagggcacgcatggacgaccacgagttcaacgccgttcgggaggaactgaacaaagcgtttcgccgaagcgacagcaacgaggtgatgcgcctgatgaacgtcgccttcgggggtaagaactattcgctgacacacctgttcaaagacccgcagcggcagatcctccacgagcttctggaaagcacctgggaagagatcgagagttcgttccgccacatctacgagcacaattacgcgatcatgcagatgatccgcaatatgaacatgccactgccgaaggcgttgtcggcaccggcggagttcatcctcaacgaggatctctgcgcggagattcaggccgatgccatcgacgtgaatcgtctgcgcaatctcgccgatgaggcggagcgcctgtcgctgagtctggacaaggaacgtctgagtttcgaaggcagtcaccggatcaacgacctgatggatcaactggccgaacgcagcgacgatgtgaagctgctctgttcgatcgaagagagtctggagattcttcgcacgctgacctccacgctggatctgcaaaacgcacagaacgtgttcttcaacattgccaagcgcaagtggccggtgatgaagcgccgcgccgcggccaatgacgaggaagcggccaagtgggtcgagcatttcgggaatctggcgcatcatcttggtctggcgattccgtagaaccggtcaatctccggctccgggtggacaggagaggtttacagcatgctcaagcaacgatcgagtggcatcctgatgcacatgacgtcggtgccttcggaattcggtatcggcgacttcggtccggcgacgtaccggtttgtcgatttcctccggcgggccgggcagaactgctggcagattctgcccttgaatcacaccacgtcccggacgggacactcgccatacaactgtttctcggccttcgcgggaaaccctctgctgatcagtccggtcctgctataccgggcgggatggctccggcgcggcgagatcgccgcccctccggcgtttccggccgaccgagtggacttcccgaaggtggaacgatacaagcgagagctgctcgatcgagcctttcgacggttccgggaacgaccacggccggccgattacgaaccgttctgcatccagcaccaggcgtggctggagccgtttgcctcgttcgtcgccatcaagaggcatttccacgggcggccgtggtgcgactggccggccgctctgagggacagaaaggccaaggcgctgaaggcgatccaggccacgctggccgatgcggtcgagcgagagcgttttcttcagtacgtgttctatcggcaatacctcgacttgcagcgctacgcgcacgagcagggtatccaggtgatcggcgatctgcccatctatgtcgcctatgacagcgccgacgtctggtcaaacccggaggtgttcaagctcagagccgacaagaagccgaagttcatcggcggggtgcccccggattatttcagcaagaccggccagctatggggcaacccggtgtacgactgggactatgcggagcggaccggattcgcttggtggatgcagcgaatccggcacaatcttctgctgttcgatctggttcggatcgaccatttccgcggactggtggcgtactgggaggtgccggcaggccacaagaccgccgcgcggggcaagtgggtcaaagcgccgagcgagagtttcttcggcacgttgttccaccagatcccttttgccgcgatcttcgccgaggatctcggccacatcacgcccgacgtgcgggagaccgtcgccaaatacgagttcccgtgcatgcgggtgctgcaatttgccttcagcggtgatccgaagcgcaacgtccatatgccgcacaatcacattcccaatgcgatcgtctatacgggcacacatgacaacaacaccacccgtggctggttcgacaacgaaatggaccaggcccgtcgcaaacgtctcttcgagtatctcggtcacaagccggcggcccgggaggtctcctgggagctaatccgcctggccatggcgtccgtcgcccggctggctattatcccgatgcaggatgtcctgtcgctgggcgcctcggcccgcatgaattaccctgccaaatcgacgggcaactggctgtggcggatgcgcgacggccggctcacaccgcgtctggcggcgcgactgcgtgagctgacggaaacctgcggccgcctgtgaacgcgacgaggtcgccggcgggcggctgcgctacggatttggagagctcttgctctcgggcttgccgtccggcacctttcggaagaccacgacgcccaacggcggcagggtcaccgacaacgtgtagtcgaagtttccatagaaggacgccgccgaggcctcgacaccgcccatgttgcccacaccgctgccgccgtactcaaccgcatcgctgttgaggatctcctcccagaagccgccgtcggccacgccgacccggtagttgtaccggggaacgggggtgtagttgcagatcaccgccagaatggagcggccggccttgtctttgcgcaggtagctgatgacgctgttgtccgcatcgtggaaatcgatccaggcgaaaccgtcccggtggaaatccgtctcgaacagcgccggctcgctgcggtaaaggtggttcagatcgcgtacccatttctgaaggccccggtgggatgcgtcctcgagcaggtgccaatcgaggctgtgcaggtgactccactcccgatgctggccgaactcgtttcccatgaacagcagcttcttgccgggatgggtgtacatgtacccgaagagcaggcgaagattggcgcgcttctgccaggggtcgccgggcatcttgccgtagagcgagcccttgccgtgcacgacctcgtcgtgcgacagcggcagcgcgaagttctccgaaaaggcgtaccagatcgagaaggtcagcttgtcctgatggtatttgcggtagatggcgtcctggctgaagtactcgagcgtgtcgtgcatccagcccatattccatttcatgccgaagccaagccccccggtgaaggtggggcgcgtcaccatcggccaagccgtggactcttccgcgatcgtctggacatgggggaagtcgcggtagaccatttcgttgaaccgccgcagaaaggcgatggcctcgaggttctcgcgtccacctttctcgttggggatccattcgccttccttgcgggagtagtccaggtagagcatcgacgcgaccgcatcgacgcgcagtgcatcggcgtggtaccggtcgagccagaacatggcgctgctgatcagataggcccggacctcatggcgcccgtaattgaagatgccgcttttccaatccgggtggaagccgagccgcgggtcggcatgttcgtacaggtgcgttccatcgaagtaggacaagccgtactcatcggttggaaagtgcgaagggacccagtccaggattaccccgatgtcgttctgatgaaggtggtcgatgaggtacatcaggtcctgacagcagccgtaccgccggctcggcgcaaagtacccgcctgtctggtatccccacgagggatagaaggggtgctccatcaccggaagaaactcgacgtgcgtgaaccccatctccttgacgtattgggccagcatgggggcgatctcgcgatagctcagcaggcggtcgggttcgctcggatcgcggcgccacgaacccagatgcacctcatagatgctgtagggggcgtcgagggcgttccgctcctgctgtctcgccatccagtcgctgtcgccccagtcgtactgaaggtcccagacgaccgaggccgtgttgggcggcagttcccagaagaaggcgtagggatcgcccttgtccacccagtagtgattgtatctcgatacgatgtggtacttgtagatggttcctttcccgatccccgggatgaagccttcccagatacccgaatcgtcccgccgggcggtcagtcgatgggccgcccaatcccagccgttgaaatccccgatcaccgaaacgctcgcggcgttcggcgcccataccgcaaagaagacgcctttgacaccctcgtgttcgacgaggtgggcgcccagcttgttgtaaagccgaaagtggttgccctccttgaacaggtagatgtcgtgatcggtcaacagggtgaagcccgtcgcaacctgggttttctcgtccataagacctctctggattcgctatgcatggacagcacctcccacggcgtcccgcacagcggatcacgaatcagaagtagtacatcccttgagtatctgtacaatgccacgtgccggtatcatcagccattccgggcgtttattcaactcgtaacccagttcgtagaccgctttttccagaaggaacgtgtcgagcagaagggcgaagtccgcccggtcggctggcacgaagtccgcgtcggccacttcctgcgtgtaggcatggaggaaggccccggcggtgtatgtgtaccataagtcggcccagtactcgaggtagtcgatgtcggcgccctgtctggcggcgcgccgcaggatagcgccgtgtgcggcgtagtgaaaggatcgtatcatcccggccacgtcccgcagggccgattgtctgaggcggcgttccgtaatcggccgggccggctcaccttcgaagtcgacgatggtgaagtcctttccggtgtacaggacctggcccaggtgatagttgccatggatccggattttcttggcgcggatcttccgctcgccgatgcggcgcagtcgggccagaatggtcttccgctccgccaggacgcctcgaatgacggcggcgctttccgcatccagctttgccagactgcggtccagttccgcgaagattttcaacgtcatgccgcgaatcgactgatgaagagacttctggtagagcagtgagaatggttcactggttacctcgggggtatgcgtcagggacgccagagcgcggtgcaactgggcagtccgccgccccagcaacaccaccatctcgatatacacggatccgacgaagttgcggatatgcatcggtattgcatcggggttgatgtcaaagaacgacggtggcaccacgggaaactcggccagcctgtccttgagggtctgggcgtgcccgaaggaccgttcgacgttgtcgagcgtgtaggaccaggcgtcggtctcacaggggacgaactccagcagtgacgcgatggtcaccgagggcgcctggctcggctgccattcaatggcaccggcatacgccggcaggttcgcgaagtcagtatgctccgtcaggttctccaacaactccgcctccggattgacgggcggttccagccggcggtacagcttgaggaagaacgtgcggtcatagacgatcgacgtgttgctctgcgtggttttcaggacgccggaggtttggggaagggctccacctggcagcatcgcggtacacctgccgccgcgccgcccgacgagccggggcatgatgggaaagtggaacgccatatggcattcgtcgccgttgccgaagtaggcggcggcgtcttccggccactggttcgcttcggccagcagcaggcggtcgctgaacttgcggtcgagatgggcccgcagctctttcagtaccgcatgggtctcgggcaggttctcgcagttggtgtcttcgcgttcgaccaggtaaggcaccgcgtcgaggcgcatcccgtcgacgcccatctggaaccagaagtccagcacgcggaggatctcccggcggacgcggggattgtcgtagttcagatccggctggtgtttgtagaaccgatgccagtagtacgcctgtgcgaccgggtcccacgtccagttcgaactctcgaagtcggtgaaggtgatccgggcgtccttgtaccgctccgtcgtatcgctccagacatagaaatcgcgccagggcgagcccggttcggcccgccgggaccgctggaaccactggtgctggtcggaggtgtggttgatcaccaattccgtgatgatgcgaagctcgcgccggtgggcctcgcccagaagccgcttgaagtcgctcaacgtgccgtagtcggggtggatgccgaagtagtcggcgatgtcataaccatcgtcaagcaggggggatggataaaacggcagcagccacagggcggtgacgcccagatcctgaaggtaatcgagcttctcgatcacgcctcggatgtccccgacgccgtcgtcgttgctgtcgtggaacgacttgatgtgcagctcgtagacgacggcgtccttgtaccagagcgaatcggatgtcttctctcttgcctcgcgcacgggcggcggctcctgtcagacagtggactcgacgtcgatctcccggcgcaatgcgcgtcgcaggcgcaggatgcaggcgggcatctcgtcagggtcgagttcgatgtagttgctcggtccctgccagacatacgtcttgcctgtcaaggcatcgtccatcaagtaggactggtgtgggtcgaggcccagagtctccagcggcagttgcacccggcccgcctgcgtgtggtgcggatcgaggttcacgatgaccaccgtgacatcgcccgcctcgtcgccggtcttgccgtaacacagcaggttctcgttctggacctcgtacaaacggacgttgcgaaaccgctggaggcaggggcattcccggcgaatctggttcagacgctcgattacctcgcggatgttgccttcgcgattccagtcccacctcttgatctcatacttctccgaattgaggtactcctctgcgccctcgacggcttcggtgacgcacagttcgaaggccggcccgtagatgccgtagctggacgacagcgtcgcggccaggaccaggcggatgataaacgccgcgcgaccgccgtattggaggtactgcggcaggatgtcgggcgtgttgggccagaagttcggacgcatgtactcggcgacctcggtctgcgtcaactctcggatgtagtgctccagctcccatttggtgttgcgccaggcgaagtacgtataggactggttgaagccgatcttcgccagacgctgcatgaccttgggccgcgtgaatgcctctgccaggaagaggacatcggggtggcgccggcggacctcgccgatcagccactgccagaaaccgaacggtttcgtgtgcgggttgtccacgcggaagattcgcacgccctggtcgatccagaagagcacgacgtcacgcaattcttcccagagtgccctccagtgcggcgtctcgaagtccagcggcaggatgtcttcgtatttcttcggtgggttctcggcgaattgcaccgtgccatctggtcgccagcgaaaccattccgggtgggatttcacgtaggggtggtcgggtgaacattgaaaggccaggtccatggcaatttccagaccgtgctcgccagccttcttcagcagctggcggaagtcgctccgcgtacccaattcgcgggcgatggccgtatggccgccttcgtcgctgccgatggcccaagggcagcccgggtcgcccggtgcgcagacggtggtgttgttgcggcccttgcgatgcgttcgcccgatcggatggatcggaggcaggtacagcacgtcgaaccccatccgcgcgatctccggcagaagccgctcgcagtcgcgaaaggtcccgtgccggccgcctctgccgaacgaacggggaaacagctcgtaccacgcgctgaacaccgccttcggccggtccacgatgaccgccaactccttgtcgtacaggctggcgagtgaccggtcggggtacttggccaccagcgaggtcaggtcctcgctcagtgccgcctcgatggcggcgcgcgtcggcttggcggcgcgcagacgcctcgcctgtctcttgagggcttcggcgtcggatcccccggcacgtttggcgacggtcgtgagcatcgcggcgccgatccggaactcgagggcgatatcctggcctttttcgactctccgggccagatccgcctgccacgtcgcgaattggtccacccaggcgcgaaccgtgtagagatactcgcccaaggcgcagaccgtgaaactcgcaacccactcgtcgttgacgcgggcggtcatcggctggaccgtccacgaatcctggtgcgggccgcggtacagcagctcgacgtggatacggtcatggccgtctgtgaagacgtcggcccgcacggtcacggtttcgccgagcgagcgcttgatcgcgaagcgccccgcgtcgatttgcgggcgcacgctgtcgatcaccacgcgttttctgccgtcgtcagctatgaccattctctcagtgtaccttcgatgctctcatttgcgtgaagcccaggcacggacgagagcccgcaccggtccctaagggcggccggacacagataacacgcacgacgaggtctttcagttcggtccacgtcggtctgcgccggagatctctggtccgtcgtcataggcgccgtcctaatatagaaggaggttccggcgaaggcaacccttcgccgcgcgcggacttgtcgatgtcacctcgttatgccacctccgtacccgggccggttccgtatcgacggagatgtgccaatgggcaaactggggattctgccgtagccggttgcacaaagccgatggccggggtagaaaggacttgaacggtccttcgtcggagatagaggcgactgccgaacgcggtcgtaacgcgtcattcgacgacagccatgccgttacttggctgaaccacctggtatgggatacgggagcagacaaatgggaactcggatatcgacaaatcgaaccgccgtcaggtctgtgggtcttgtcctgctgatgcttgcgatgaccgctccgggccactcgacggccgctgaagtgcgtttcgagccgcgcgagaagccgcgggtcatcgtgctgacggacatcaccaacgagccggacgacgagcagtcgatggtccgtttccttgtgtactcgaacgagtatgacgtggagggtatgattgcgacgacctcggtctggttgcgtgacaacgtgcggcccgacaagattcggcagcgcgtcgaggccttcggccaggtgcgtgaaaacctgcttcgccatgcctcgggctatcccaccgccgcgcatctcctgggtgtcatcaaatcgggccggcccgttttcggcatggagggggtagggccgggacgcagctccgagggctcgcgtcacatcatcgaggtggtggaccggcccgacccgcgaccggtctggatcagcgtgtggggaggggccaactgcctggcgcaggccttgtgggacgtgaagaacgcgcgaaccgaggcggagctgaatgccttcgtatcgaagcttcgcgtgtacgcgatctccgatcaggacgactccggccgctggctgcgcgcgacgtttccgacgttgttctacatcgtcacgccgagcacggtcgactatcgcgagtactacaaggcgacatggaccggcatttccggggaccgccgctacaggaatggaccgatgcacgagttctatctggtggacaacccctggctggaggcgaacatcatccgggaccatggtcctctcggcgctctctatccgcgtctgacctatatcatggaaggggacacgccgtccttcttcaacctaatcggcaacggactgggcggcgaggtcagccccgcatacggtggatggggtgggcgctatgtactgtacgcctgttacggcgagacgcgccccatctggaccaacgcagaaggctgccaggatacggtggttgccgacaacggggtctcctacacaacggcccaggcgacgatctggcggtggcgccgggcctaccagcacgacttcgcggcccggatggactggtgtgtggcggatcgcttcgagaaggccaatcacaatccggtggtcgtggttgccggtaacgaaagcaaggcggtcgcacacatggtcgtccggccggggcagagcattctgctcgatgcgtcgggaacgcatgatcccgatggtgacgccctggcgtaccgctggttcgtgtacgaagaagccggcacgtaccgaggtccaatggagatcgagaaatgcgcaacgccccgagcttgtctgactgttccgaagacagatgcgtgccaaacgattcacatcatcttggaggttgtagacaacggacagccgagcctgtacagttatcggcgaatagtcttggaagtccaaccatagggggcaagccgcgattgatcgagcggctcaacacgcggggcaccggaccggatgcgcgtgtcgaatgagtccgataacaccaccacggcgatgcagtcgcttgccgcaggcaccgatagagtttctgacttcggatcaggggcggcgcatgatagctcaagaacggcgcaggcaatgagaaatggactttccctcgtcgagttggtgatcatcgcatgcatcatcggcattctggctgctctcgtcgtgccgtttgtacagaatgaggcgacggatgcgaggaccgccgcggcgagagacagtctgcggatcctgcgcagcacgatcgaactctatgccgccaatcatgccggcgtcgcgcccgggtacgacggcaacaaccccaatggggccctggacgagagcttctttcgcgaccagacagttgtacagggaaagtacatgcggcggattccggagaacccgttcaacggccggcacacgatcctcatgatcggcaacgacgtatcgtttccgagggaggccaccggggattatgggtgggtttaccagccctccacactgaccatccgcctcgactggcccggcacagaccgaaacggtgtccggtatttcgatttctgagtccgggtcaaggtcggaccccgcgagggtgtccttatgaggctgccttgtcagcgtctgccgtctctgctatactcgcatcttaccccgatggatgagaaacagaggcatgggtaaactcagagatgtgctgcgggttttcgttccgagcgcgaccgtctttcttacgagcggttgcgtcatggctctgggcttggtcgcggtgcgactggtggccggcagcgtggggacatcgctgtatacgtggacttcggtcttcggtgtgaccctggcgggtctggcccttggcggctgtctcggcggccgcatcgcagaccgcttccatgcaaggagggctctggcggtcctgttcggtttgtcttccgccgcgtgcgtcgccgtcatcgtcctcaacaatctggtgggctgctggctgtggttgtggagactgagctggccctttcatgtcttcctgcacgtttgtctggtgtttctcctgccgtcgctgcttccgggtgctgccgtcccggtcatcgcgaagatggtgctgaaccgggggccgacccttggccgcgccgccggggtcttctgtacgtggggtgccgccggcggcattgcaggaatgctgctgaccggattctacctcatccccagctacggctgcagcgcggtgatctggcttatcggcaccgccatgctgggcattgcgctgttgttttgggccagttgctgggcgttgtgcctgtgggccatggtgttcgcgacgctggcggtgatgggtatggcaccggccgaatgggcgcgcgaggcgggcgtaagcgcttctcttcgcgaggcgcgcgatccgaatctgctctatgccgatgaaacatcgtatggttgtgtggccgtacgaaagatgtcgaatcggcccgacagaaggtctttccggctggatggaatcccgcggggcgaagttgtgatcggtgacgtcacgcggctgtgcgagttccacacggaagtatgtgccgctctgacgcacggtctggccgagggcagaaacgcgctgttgatgatggttctgggcagcggaggttatgcccttccgaactacctcaaagcggcgtggcccgagagtcaggtgcacgtgatcgaggccgaccgtggtataacggatgcagcgagacaggcccttggcgttgcgcaagggacggggattgagaccgtcaacatggacgtgcgttacgccgtggagcgattgatctgcgaacggaaagcggacccctcgggaagattgtatgatttcatctacatggacatgatcggcagccgtttcagcgcatttgccttgctgacgcgggagttcaacgacaagatagccggcctcctgaccgaggacggcgcgtacatgctggccctggtcgacacgtgcgaagggggaccgtttctcggtgtcgtggtcgggacgctgagacaaacgttttcccacgtcgatgttatcggagaacggccgggacagacatcgccactgcgctcttacgtcgttgtcgcgaaacggcgtgcatgcgatacgagacaattcctggagagcttcaacaggcacctggagttccggctgatcgacgagccggaactaacgcgtcttcatgccgaaagctcctgtctcgtgttgacagatgactatgcgccggtggaggatcttgcggcacctgccgtgcggcaggagggccggcagcgactggcctttcagtgccttcgcgaggcggaacggctctgggcacagcggcggtacgacgagagcgcccggcgataccgacaggccgcggaactcgatacgtctgtggcaatcgaggcctggagccgggttggtactgcgcggctggctcaggacgatctggcaggggcggccgaggccttccgtaacgccgtcaccggcgaagaagatgcggggccacaaaaggcggcggtcgcctccgcccaccgcaatctggccatcgtgctgcagaagatgggcgaaagggcagaggcccggacgcatctggccgaggcggcgaagcggtttcgcgccgacctggatcggaacccggactccgtcgtctcatgggatcgcctcggcgatacgctggcccgggccggcgacctcaacggagcctgcgaggccttcgaccgagcgatgaccctggagccaaagaatcccgcccattacgagaggctggccaaattgctcgagaaccagcaacgctatgaggaggcgatctctgtcgtccgcaagcacatcgcacttctcaaggaactcggtcggcgcgacgtggctctccagatggggcaatacgttgactttctcgagtaccagaaggtcaagcagcggccccggtgagattcacggtcgcgacagcctctcgaacgtcagcgaattcgtctctccgtaggtctcgtcggtggacagttccgatgtggacccatcgggcatctggagctgataggtgctgaaattcgtccagtgtacccgccagacgttgtcggccggcgacatgggaccggagaacgtatcggtgctggtgccctcgagaatcgcctcggccatcccgacgcgcacgtgacgcatgacgatcttgacgatcacctcgttggttctcggattgcagtagacggtccacggtccgggttcgaagagcccctcgccgcctccctgagtgggaagcgtctggctcttgcccggcgtgatgcggacttggccgagactgatgaccgccgaggagatgcgcccgtcctgttcgatgacaaactcccatccgtcgcggtccgccttccacgtgcccgccatcgccgcggggaatctgcccccgccttccacgatgacgctctggccaccgggtggttgttcggaaggggtgcggcagcccatcggcagtaccgctacgatcagacaaatgatggcatccgcagtacgtctcatgtggtcaatcctcctgaagggcaccgacgcacaactctttcgactatacgctgaaggctttcagcgggcaagcgcaaaagaagagggcaagctcctggaagggacttgccctcgttggatgttctctcgtatcgaaccgacgctggctgtattccgtcgcgtcgacgcgctccgagcaccgccgatcgcactacggcacgaggcttccgccgcagtcgccccggacgccggcgcctttcggcgcctccttgatcagccagttcgctacgaggcggttgaggtccgtcgtgccgacgcgatagaaaccggtcgcctcgctaccctccttgtcacgggcgaaatcggcgcagatgccgttctcgatcgatgcgatccccgggccgaaggggggctccttgacctgccatgcggcgaccaggacgttcaggtcctgcgggccgacataggagtagccggtgctcgcactgccttcggccacgccgtcggcgtcgccgtgacactgtctggggtatgcccagcaggccggcttgcccacggcgacccattcggcgtaatcgggatggctcggggccagcagttcggtttcgggaacgacggtcatggcggaggcctggaccatgtcgactgtggcggccacatccgggtccgtcagaacgacgccgccgcggacctcgttcagactcaccgtcacgttggcggtggtgctgagggtcagcttgcacagcgtgccgctggtgcccggggcgttgggggagttgtcttcggccggatagtacagggcgcccatctcgatcgtgataccatcggtgcccagtccgcccagcgctccaggatcgcacgggtcggcaaccggggtgtaatcatccacatcccaagtggccacttcccctgtgtcggcgttgaccgtgatgtagcggccgaaatttgctgggaagatgccgtagccgggattctcggcggtgctttcgccccggatgaaatcggaaatcccgatgatcgtcccggcgtccaccatgatatccagggcaaaggcccggacgatctccccgtccgtctcgtacttgatcgccgccgtgttcccgtcgggctcgacgatgatccttacggccgccagggccgggttggcaagcaccagcgcagccagcaacagactcagcctcttcatgaccaaaccttcctttctcttctcttcttcttccggcccaacaccaccggctccaccttggctttgtttcgtccgctcttgttcttcttcttcgcgtttccgccggggcggacgcctctgagacggaccgacagcccccgcggccaaggatatggccaccgcgcgggaaagaccgataacagcggtgctctacgtccctctgctcctcctttcccgccgcttgacgggacggtctgcccccacaggggctggtccaacggacctggaaaacctaccgtagcgtaccaaaaagggctgtctgaatcaagatcaaaaccaaaataccacacgtccctgccttggcgagccggggtctaccgacgcgccggacggttgcggatgcctgcggaacaatcaagagaacggacgctgagatacgaagaacgcaaggcaacggtccggaggatgaatccgagcccggtcgctgcctcgccgaaagcggggtttcagcggcttgaggcaggctgattcgaaggccgtcatcaagcgtatcgagagcgatttcgcctgctgtggctgtacgcagagaagaccctgtggtatgctgaggacatgcgtaatttcttgaaggggcggctcttacccgtccggatctgcctgatagtctgtatgctcagcctgatcgggatcgggattgccactatctacgtgatcggtcaccccgacgaaccaagcccggccagtgatgccgccaagctggccggctattggaagaaacaactggtcttcgccgtggtcggcgcgggaggctttgttgccgccaatctcgtcaactatcgtcgcctcggggccgccagccactggatctacctgatgaccgtcgtgctgctggcggtgatcctgctgggtaagtacgtctcgctgtcgtttgtgccccagcgcgggggggcataccgctggatcgtgttcacgatcggctcacactccctgcctgcgattcagccgtcggagttctgcaagctcgcctatatcctggcgttggcgtggtatctgcgcttccgcagcaactacagtcggtttcgcgccctggtcggtccgtttgccgtgacgctggtgccgatggtactgatcctgctcgaacccgacctgggcacggtcatgctgatgatgccggtgctgttcacgatgctgtttgtcgcgggggcgcggatcaagcatctggcgatgatcgtgctgctggcggtcgctgtcagtccggccatgtggttcatgctcaagccctaccagcgggagcgaatcagcagtgtgctgcttcagagccgctgggttcgtgagaaagcggagaagaacccggccctcggccgacttctggtcgggggaaagttcaccgaacgcagttggcggaatgaatggggctatcacctgatccggtccaagttcgccgtcgcgtccggcggctggagcggcgccggctacggccgggggcctttcgtcaagtacgattttctcccggaacgacacaatgatttcatcttctcggtgattgcgcatcaactgggtttcatcggctgcgtcggattcctgttgttgtacgttctgcttgtgacgtgcgggctggagattgcggtccacaacaccgaccccttcgggcggctcatggccatggggatcgtctccatgttcgtcgtcgaagtggcgatcaacgtcggcatgacgctcggcctgatgccgatcacgggactgactctgccgtttgtcagctatggcggctccagcctgctggtcaacatgacggcggtcggcttgttgaacaacgtcggtcggtgccgaccgttcagtgtcgccccgcgacggggcatcgaggcatagtctgcgagtagcaaggctcgccgttcaaggagggactgttttgatcaaggggtttcgacagatcatgctgctgacgatcatcagccggattctcggcatgattcgtgatatggtgtttgctttcttcctcggtgccggcggtgtcatggacggctgggtcatcgccttcacaatccccaacctctcgcggcgtctcttcggtgagggcgccgcctcctcgtccctgattccggtctacagtcacgagctggagagggaccgccagcgggccgatcgtctggcaatgacggcgaccaccgtcgtgttcgtcctgctgacagggattgtgattatgggtgagacgctggtctggattctttacgcgctgtcggaccacgaagcgacgcgtctgaaactgtttctcaccggtgcgatgctgccctatatgatcctggtctgtacggtggcaatcctgggcggcattctgaacacgcatcggcatttcgcggcgccagcggcttcttcgatcgttctgaacctgctgctgatcctggcgctgtgtttcggcggatgggctctgaaggttccggcgcggacccaggcctttctggcggccggagccgttctgctgaccgggttcgttcaactcgcgatgcacattcccccgctgcactcctgcggagttcgtctgcgtccggcgtgggacattcgctcggatgctttccgccgcgtgttgctcctgatgggtcccatggtgctgggcttggccgccacgcagatcaacacactggcggacagcttcattgccctgtggctgtccggctcggccgagaaagggagtttctttacgctgttcggatggcgaatcgactatccgttgtgggaaggagcggtctcgcaattgttctatgcacagcggctctatcagttcccgctcggggtcttcgggatctctctggcgacggcgatcttcccggtactgagcgccgacgcggcacggaacgatctggcgtctctgtgccgaacggtgtcccgaggtttgcgctgctcggtgttcatctcgcttccggctaccgtcggtctggtgctcatcaacgagctggcggtcagtgtcctctttgaacgcggtcagttccgctcgacggacgccgcgggcaccgcctttgctctggcattctacatgctcgggctcagcgggtattttgcccagcaggtgctgacgcgagtcttctatgcgctgcagcagtcgaatgtgccggccaggagcgccgcgattgcggtggtggtgaacgtctctttgaacctgacgctggtctggttcctcgggtgtggcggactggccgctgcgaccgccatctgctcgtaccttcaagtggggatcctcgtgactgtgctgagacgacagttgggtccggatatcctccaaggagtcggccgggcgatcttccagacgatcggtgtgaccgtctgcatggaagttgttctgctggttacgctgtacgcgctgcgttaccgcggcgtcatgcttcaattgtgcgtggcagttcccctggcgggcggcgtctatctgctggcttcgaagctcttccatgtcgagatgctctcgctgctgctgggaggcaggcgggcaaaggaggccgcgaccaggccctgattgtttcgaggcgacctccacgcggggcgatcgaatcgccgcgagtcgccgccgcgagtttatgggacctgcacgcgcccggaggatgggaaatccgcggtttctgtggcgatggtatctaaagcgggcaaggccgtcgcccgaaataccctgttgacacaaggcctgtgctatgccttcaaggagaaatggatgttcagggacaggtcggtcgtggccctccttactgtggttctggtggcctgcgacctctgcgcgcaaacgtcatcttcgtggccgaccgccggctcacctccggtggcgccgcgcgccgacatggcggacgggctgcgatcctcgtctgccgcggaccggttcgtacagattgcccgggagttgacgcatgggctcgacggggacgggcccgtgatcgaccaggcggtagtcttcctgattgccgccaagcgtctggacccccaggcatcgggcatcgaaccgcttctgttgcggttggcgacccggtccaccaccaaggactactcggcacaggttctgactgctctgcagagctatgtgagtgagcaggcggaccgtgcggttgtcaccgaggccattcgctacctcctggcgcgacaggtaacccaggacggtcgccggaggctgctggaagacctggtccggcggatcggtaacaagaatgcggcagtcgattcggaattggccacggcgctgggcttgctcatgcagcagcaggccgatgcgcaacgcgcccggttctacttcctccaggcctataacagcaacaagtacaatacgctggccttcgcgaagctggcggaaatagcgccgaacgagatcggccctgctgccttcctcgagcatctgagactggcgttccgcgagaagccgctcgacgccgaggcggtccggaactttgcgctctatgcccagcggctcggccttcacgaggttgcggccgaggccttccgctacagcgccgaactgttccgctaccagcacccgaccgagccgctgccgcccggcatctatctgccctgggcgaccgcctgctcccgcgccgaaggcggtcaggcgatctgcctgcagatcgccgacagcgttcgcaggcaggggcagctcgatcttctcctggaggcgaccgccgcaagagcagccgtaaggatgggaaaccggcaggaagccagacgtctgctcgatcaagccggacagcacgccgagcggatgctctcagtgggacagggccagtccaacggaatcacgctgacgcgaccgttgacttccagggaccttgcctggttcttctgcttcgccgatccgaacccggtcaaggcgctggattgggccaacaagagctactcggtcgagccgaactcaccggaggccggggcgctgctcgcgtatgccttaggcatgaacgcccagatcgaatgggccaagcctgtactccagtcgttcgagcacaaccaggtcgccgatatcgtacaggctcagattcagctgctcgagcaggacaaggccggtgccatctccacgcttcgtaccgcgataggcaaggaccctggatcactggcggccgagcaggccgaagagattctcaggacgatcggcagcgagtacatcccgcctgtcgatccggtggcgatgaccacatacttgcatcagagtatcgggcagacaatcgtccccccgtttctgccgcccgccaagaggctcgaagtgcagttcgctgctcgcggcagtgaattcatctatggcaccgatattgacgctaccgtcgcgatcgtgaatcggggggcggagcccctggtggtcacggagaatggcctgttcaccggccggattcggatagacgcccatgtcggcggagacatccaacgggaaatccccaacctcctgacgcagacggttcgcaccgccctgacggtgcagacgggccggagcctgagcatgtcattgagattgtcgaccggcccgcttcgacagatcctgttggactatccccaagcgaacatcgagattcaattcacgctgtatctcgaccctgtgacgatgccggatgggctcatccgcaacgggattgccgatatcgagccggtgacgattgctgtcaagcgtccaaaattggacgtgaccgccgcgtatgtccgcagtcgagttgaatccctctcgtcggagcaggaagctcagaaggtgcggacctcgcagttgttcaccggcctgctccgcgagcagcaggccatggcccggcacggcacgctctacccctatcggtatgccgcgtggttgcctgagctgcttcgctcggcactgttgaaggagtcggggctgctgctgagccaggacgagcgggactgggtcgtcaagatcaacgcgatggcggacctgctttcgatgtcgctcgaccaggaactgaccgcggcggcgggccggaacctccatcacccccaatggcccgtccgtctcatggccgcctatctcctcggtatcacgcagggcggcgaattcgacagggtgctggactggatggccgggtcggatgccagcgatctggtccgtgccatggcggcggccctgggggaggggcgcaggccgaagatttcgcttggatcgggttggtcgccgggtatcctcccgccagcccgctgatgtccccaagcattcgcatgcagccgtggcttctgcttccggtctgttcgatctgccgggaacctccccccggatttgtcgtacaacggtacgttggacctggtccgcaggacgaggctcaggatacccgtagaaagggggcatcagggccgaccgaactataccctgtttttacgcggatttttggtttgtatttgtgcgaggattaggtatcattctgtgctttctgatgagagtcatggtccttaatttgaaagggtagctggatgccggcagaagtggacaaggcaaaatgcaccggatgtgagacctgcgttgatgagtgtcccagcaatgcgatcagcatggcgggcggtaaagccgttgttgacgcggattcctgcatcgattgcggggcctgtgtggatgcctgccccgttggagcaataagtctgtagtacggtcggccccatcgtctaggcaggcctaggacaccgggttttcaacccggcgacaggggttcgaatccccttggggctaataggtgattctcacgggttatcgccatatatcgcgagaagtcgcctgtcatcgtttttaggggcgccagtgcggtttccgtgcggcatgtggcgacgtgcggcggcagttggcgacgtcggaatttgcgtcgcgtgcatcctgtgcgttggattttgcgccgcttctggggtggtcaattccggcttccgagtgtcttgaatggcccgctcaaagtgttcgtttgtcacttgcaggtagtgcttcgccgcgatcaaagccgaattggcggtccacgtgctgacgacgtgaagcgggaatgcctcggtcagttcggtttccctggacgatctacggttctcgaaggtccggggccagaggttaagacccgcgcgccggatcatcgatgagcctgcgtcggcaggtagtcactccgtgcacgttatcgcgtgacaacgtatttcgttttctccccggcttcatggaaggcttccaggagggttcgtttcgacgcggagcaagatcggaacggcgctggttccgcgggaattggacaactcctgcagccggcccggcgaacagaccgccagccggagattgacaccatcaactcctgtgtggcatttgtcaaatcttggctttgacagtcaccgtcgcgagggtgaaattgacccggaggcaccattttcgtacaatacgtgaagtgaacctcctgctgattgcggggtgtccggactgatggacggcgggtgactaccctcagttgaggacggtaagtcatgctcttgcgcatacgatttgtgtgtctggtaatccttacggcgttcctgggggcggtctgtggcggggcccaatccgatgtgtgcatcaatgagatcatggccgccaacgatctggccgtcagagaccctcagggcggctacgatgactggatcgagctgttcaaccccgccgatgtgccggccggcatcggaggcctgtacctgacggacgacctggacgacccgacgaaatggcggttgccggccggcaccgtcatccctgcaaaggggtacttggtggtctgggccgacggcgacgtcggcgatgcgggtttgcacgccgatctggcccttaacgcaagtggagaccggattgccctgtttgaccgcgatggagggactctgattgacagtgtccgcttcggccggcagcgggccgacgtctcgttcggccgcgaccccgacggctcgaacgactgggttactctgacgcccacgcccggcgcgtcgaacgacggaaagggcctgcccgtggttgaggatttggtgttcaaccacgatcgcggcttctacgatcatccgatcgaggtcgtcatcacgacggccacgccacaggctacgattcgtttcacgctcgatggcagcacgcccacgccgacctatgggagcgtctacaacgggcccatcctgattcagtccacaacgtgtttaagggccatggcatttcggcccggctggaaggctactgacgttgagacgcacacctacgtctttctggaaagcgtcataggtcaggcaacgcatccttccacaggggcccaggtaacacctgaagggtatcctacctcgtggggttcggtgacaggcgactaccagatggacccggacgtggtgggccagggcggcaaggacatcttcggcggtctctacgccgattccatccgggacgacctcaaggcggtcccgaccatttccctggtcatgaacaaggacgactggttcggcaacaagggaatctacatcaaccagtcgcaggacggcaccgaacgcgttgcgtcgatggagttcatcgatccgaacggcgcccaaggcttccagatcaactgcgcgatcgccatgcagggcggcgtcagtggcggcgggaccagcctcagccggtggaagacgttcaagctctccatgcgcccgcgattcaaggcgcggaccgacgacggcatacccaccggcggccccggcaagctcgacttccggctgtttcccgactcgcctctcgaatgctacaacaccgtggttctcgacagcgtgctgaatcattcctggctgcatccggacagcggccagcgcgacaccgccatctacattcaggatcagtacatcgccgatctgcacaacgccatgggtgggcattcgccccacggcgcatacgcccacctgtacatcaacggcctctactggggcttgtactatatccacgagcgtcccgaccacgcctgggcggcccaggtgttcggcggcgacgaggacgagtacgacgcgatcaagcatagcggcagcagcgtcatcaacagcggcgcggacggtagcgcttcggccaactacaacgccatgctggcggcggcaaacgcgttggccgccgatccagacaacctgggggcatacgatgctctgtgcggacaactcgacatagacgatttcatcacctatctgctggcgaactggtatacgggcaaccatgactggccgcacaagaactggtatgccacgcaccgcaacgctcccggcggcaagtggcgcttccactcctgggacgccgagcacgtgcttgaaggtggaaacgacgtcggggaaagcccgtcggatattcaccgcaagcttgcgcagaatgcggaataccgccttcgcttcgccgatcagatctaccgtcacttctttcacgatggtccgctgagctaccccgcatcggccgaccggtttctcgccagaatgaagcaggtcgagcgtgctatcgtgggcgagtcggcccgctggggcgacaaccggcagtcccgtccttacacgcaacaggactggctcaagacgcaggagagcaagctgagcggttactttccgaatcgtgcgaaccaggtcttgagttggcttcggagcgcaggtctctacccaaacattgaaccgcccgagtttcatgtcggcggcgtgcctcagcacggggggcctgtcgcctccggccagtccgtgtcgctggtgggcgacttcggcacgatctggtacaccatggatgggactgatccccgaacgcccggttccggcgggcagacgggtgacgagttcgccttcgtgacagaagatgcgccgaaggcggttctggtccctgtggcttcgaccggcgacgcctggcgcagcgtggatttcgacgattcgacctggacccacggcaccggaggtgtcggctatgagcgcagctcgggctatgagcagttgtttgacatcgatgtgcaggaagccatgtacgggcataacgcgagctgttacatccgcattccgtttgaggtgacgccggaggtcctgatcgaggcccacggtctgcgattgcgcgtgcgctacgatgacgggttcgtcgcgtacctcaacggtgtcgaagtacagcgggctatgtttgacggcacgccgtcgtggaactcgggcgctgccggaagccactccgacctcgatgccatcgaattcgagacgttcgacatctcctcggcgattgccgagcttcgtctgggccggaacgtgctggcgatccacgggctcaatcagggcattaccagttccgatttcctgatctctgtggaattgacctcgaccatcggcggcggcggggcggttccgagcgggatctcgccggcggcggtccgctacacggagccgctgacgccgagtcggagcgtgcacgtcatggcgcgctcgttgcagggtggtgtgtggagtgcgttgaatgaggcgacgttcagtgtcgggctggtggccgagagtctgcggatcagcgaggtcatgtaccatccgctcgatccgaacgccgagtacatcgagctggtcaacgtcggccgcgaggcgatcaacctgaatctcgtcgcgttcaccgacggggtggacttcaccttcccggacatcgagctggcacccggagcctacagcctggtcgttcgcgaccggtcggccttcgaagcggcgtacggcgacggagggagtatcgccggacagtatgccggcagtctggacaacgcgggcgagcgaatcgagttgcgcgatgcggccggacaggtcatccagcacttccgttaccaggacgactggtacgatctgaccgatggggcgggcttctcactgacagtgcgggaccctcggacggccggaagggagacgctggacgagaaaagtttctggcgtcccagcgccgaagccggcggctcgcccggctatgacgatgcggggcttgttccggagttgggggcggtggtgatcaacgagatcctggccaatcccgccggcggggcctgtgactggatcgagctgcacaacacgacgagcgaggcgatcgacgtgggcggctggtttctcagcgacgatgccgacgaccggaggcggtacgagatcgcctcgggtacggtgctcggcgccggcggctatctggtgttcgaggccgatgcgacgtttgacaacggcgaggatccgggctgtcgggttccgttcggactgagccggaacggtgagacgctgtacctgcactcgggcgtcgacggggtgctgacgggctacagcgtgcaggagcagttcgacgcctcggagcggggcgtcccgctgggccggcatcgccagagcacgggagggtaccacttcgtatcgctgagcgtcccgacgccgggagcggcgaacgccgagccgcgggtcggtccggtggtgatcagcgagatcatgtaccatccggccgagacgccggtggccgagtacgttgagctgctgaacatcagcgagggccccgtgacgctgtacgatgcagcgctgggtattccgtggcggttcaccgacgacccggatgatccgaggatcgatctgcgtttcccgtccgatccgccgatcacgttggcgtccggcgggcatctgctgctggtgaaggaccggctgaactttgccatcgcctacggcgaggtgtcgggggttccgctgttgccctgggggccgggcaggctgcctgacgatggcggtaggatggagctgagcaagcccggcgcggtggccgacgacggcacggtgatctggattcgggtggatcgggtggtgtacggcgacggttcgcatccgggggccttgggcgagggggttgattcgtggccggctgaggcggacgggcgaggcctgtcgctgcaccggacccctgtggcctcgtacggcaacgacccggcccattggcaggccgcaaccccctcccccggagcgctgaactgacgcgtgtcgtcgcgacgactacaggcgacgccgtcctataaccacctcttgcggcgacgcgtcttacgcatccgcgcagaaaaaaatcgaagaaacgaccgcatgggctcccataatcacggtggtctcagtttcggaaggtgcctgcgagcgaaaagcctgctctgtgccgatcccgccgttgacattaacgaagaaacacgatacactacatgctgaataagcaacggtgtggggaatgacactggggggtgttcattgatcctgctttgcaattctgtgctgccggtttctccggatgtgcaaagccgatccgatcagccctcctgtcactacaatgaccctgtgacaccgggtatcgaaaaacacatagtacttggggggtgatgaaatggtgaagaaactggcattggcatcggttgtttgtctgctcgtcactggttcggctttggcgggcccgtcggttcacttgacgcgtgtttcgggctactacagcggcagcgggggcgagttcctgttgtatcccaatgcggacctccagagcatcacggcggaagtcgccccgtactcctcgttctgtctggaaaagagcgagcatgtgtctatcggaacggcgtatgatgtggtggtagccacggaggcgctgtacggcgggacgaactatggggcgaccggcccacagggaggagacctgctggacccgatgaccgcctatctgtacacgcagttccgtgccggtacgctggtcgggtacgactataatcctctgggtggtcgcgccgcctcggccggggcgcttcaggacgtgatctggtatatcgaagacgaggccgccaagacgtggaccgacggcgacggctcgttgcaggatcagttctacgcggcggcagtggaagccggctggaccgacatcggcaacgtgcgggtactgaacatgtatgttcccggccacgtcggcgaggccgattacttcagacaggatcagttgacgatggttgttccggctcccggcgccgcactgcttggaagcctggggctgggtatggtcggctggttccgtcgacgcaaggcgctgtaagagactcgattctcgttggtcattcacagggctgccggtcccatatccgggggactggcagccctcttttgttcgttctactggcgcgtgttctgatcgggcacgttcgacctgcgtcggacctgcttggcggtttcggcctttcgggcccgtgagctgattctcgcgtgaacgcgagcgaggaaaatatccaggttcgggatggtggcgtcgtcggcaaaggcgatgctgttgacgatccgcatcatctcggccccgtgccagaagctcggggtcgtcagcacttcccgaccttcgaaccgcgagagcgatttcaggaacgtcggcaggctgccttcccgcagcgcctcgccgtaatcgatcaccagatcgtgtgcttcgcgatatctctcaagcatcggatcacccccgtacatagttgcctgtgctgctttgcagcgggagaatgccttctcggctctccatttccaagaggccgctggacgctcggcggtaacgcagatggggtggtgaaacggcttgtttttttgcaggtccgaaaaagctcatcggcgggcgtgatgcacgtctccggcaagacgttgagtgcgtccttgtggttggctgtgaagagccaggcaaggcagtagacccgaccacggcagcgatggtagagccgctcgaaggcgtccgcatcgcctgcgttgatggcatcgatccgttcgcaatccacctccacgggggaccgggcacatcgatctggcgatggcccttgcatcgcccattgccgtcatgtggattggcgcgtcgcgtgcaaagaatccaaccggctcgggcatgccgatgggcataccgatgcgtcctatggctgcgggggattcgccggcgggatcggcggggggccggccggcggaaacacaggccccggatggtgttgaggaaggtcgaccgcatatttggcccgcacgcgttcgagcatctgggccttgccctggatgttccaggtcagcagagtcagcggcaggcgagatttctccttgaacgtgatgacgatgcgtccgaagccaaagagccgttcgacgaagtcgccggtgtcgattcgcgtgttgtagtcttcccggctgatctgctcgcccgtttcggtcggtccctcctggaggttcatgtagttgggcgtgatggcgacatagtagaacaggcctcgtacccaggagatgaagatcgtcagcagtccgatgagggcgaccaggagatagccggtcccgctgatcgagaagcccaggtggcggaagatccgcaggaatccgcccacccagccgaccagatggagccagaggaacagaaagcccagcccgatgacgccgatgatcagcagtttgatgctgacgtcatactcttcgatgatcagattgatgatgaagatcgcgaaccagacgccgccgatgacccgcggattgatcgaggccagcacgctccattcggtctccttcaggaacatcaggaccgaggccagcagggaagcggccatggtggggacgtagaggaccttaggcgtccagccgaagacgatgagccagtcgttcatgtcgggatcggcctcgaggagcttcttcatacgcagccggctgcgcagcgtgtgacgcaacagcaaccacgcgcccaccccgacgccgagcagggcgaggaggatgtacaacgcgatcattttgttcgatgtccacatggccgttcctttccgcgcggggccggttcccagtcgatgcgtgggtctgggaaagtcctatccttacagacgcacaagtgccggctttctatcaccggccgctcgatttcattcatacgatggccttggtcgcgccggtggtgaagcccccgtcgacgaggatgatctggccggtgacgtaggccgaggcgtccgaggccaggaagatgacggttccgtcgaggtccttgggctgcccgggccgaccgagggggatgcggtcggtgatgtactcgacccagggcttgttgtcgtagaggaccttgttctgggcggtcttgaaccagccgggtgccagcacattaacggtgatcccatgccggccccactcggcagccaagctgcggctgacctgcagaatcccgccgcgactggcacagtagggcccgatgccctccatgccgaagacgcacgtgcaggaaccgatgttgatgatccgtccgtatcggcgtttgatcatctccctgccgaccgcctgggcgacgaagaacgcccccttgaggtttgtgtccaggacggtgtcccagtccttccaggtgaactcggcggcaggcctgcggatgttcagcccggcgttgttgaccaggatgtcgatcttgccgtactcggcgatggccgcacgcaccatgccctggatatcgctctcattgagtacgtcgagcttgacgggcagggctctgcggcccagcctctcgatttccgcttggaattccgaaagtcgcgacgtgtcgcggctggtgatgaccaggtccgcgccggcctgcgccagcgcccggccgaagtactggcccagaccccggctggctcccgtgacgaccgcgacttttccggaaagatcgaaaaggttttccattcgctcatgctccgtggctaaggttccaggacgattttcagcaggttttctctgccttcgagcaagcgtttgaaggccgaaggcccgtctttcagcggcaggacctcactgatgagggggccgacgtcgatccggcccgaagcgatcagattaatgcacgtacggaactcaccgctactggcgtacgacccggtgaaggtcagttcccggctgacgagttcctggaggttgaacggcgtctctttggccagattgccgacggctacgatgctgcctccggttctggtgatcgcaatggcctcgccaaacgtctcggcaagcccgacggcctcaaatacgatgtcggcgccgcggccgtctgtcagctcggcgatggcctgcctcaggggcctgctttgggaattgatgcactcatcggcgccgacctgccgggccaggtccagccggaactcgctgatgtcacaggcgatggcgcgcttggcgccgcggagcttggccgcctggaggatgaacaggccgatggtgccggcgccgatgaccacagcggtgtcgctgtcgccgatcggccttcgaccggcggcgtgcaagccgatcgaggcgggttccaggagggccgcctgaacgaaggacatgtcatccggcagcttcgcgacgatccagtgcggcacggctacgaactcggcaaaagccccgtttcgcttgaactcagggaccgagacgcccagcacctgccgatggacgcagcggttgaacaggccttgccggcacgcagggcacttgttgcagtagaccgtcgaatcgaaacagacccggtcgccgggggcgaagtccgtgacgttcctgccggtttgctccacgacgcctgcggcctcatggcccatgatcagcgggggcagtcgccggcccgtcttgccggtgtggccggccacgtcggacccacagatgccgcacgccttgacccggaccaggacgtcgtcgtcgcccaccacggggtccgggacatccgtataggagaacgtgtacggctcggtatagagcaatgccttcaatctgtcacctcatgtcaacggcaggcacatggcaaacaaggtcacgaagaacaggccgatcacggcggtactgctgaccgtgaccgtccaggtcttgagcgtctcgatctctgtcagaccgcccatcttggcgaagacccagaagcccgaatcattcatccagttgccgcactgggcgccgaagccgatggcggcggccagatagaccggatgatatcccaacacgttggccgatggaatcagcgccgccatcatggccgaggtcgtcatcatcgagacggtgctgcttccctgggcgaatttgatgaggaaggcgacaaagaagcccatgaagatcagcttcaggccgctcagttgcgcaccgccgtggagggacaggttctggatagccggaccgatctgtgcctccttgagcatggcgccgaaggcgccgccggccgaggtgatcaggatgatgacgccggcactcatcagcgaagtctcgatcatccgggcgagaccttcgcggccgggtttgcgctgacgccagagaatgtacagagcgaccgccgctgagaacatcatggccagattcgggttgccgagtacggcggtgtagctctcgatctccatgaggaccgagtccggcggtgctttttttgccagcgacgaaacgaccgtgtgcagggtgatcagcaggaccggcagaacgatgggcagcacggacagaagcaggccgggcaatgtgtcgtccggcaatggatcagactcggtccgcgacccgtcgagggcacgcatgggaatctcgatccgtctcgccaggaagcggacgagcagcaggaccacgaccgcggtcggaatggagacaagcaggcctatgccgatcatcgtgcccaggtcgatacccagtgtctcggcgatgatcagcgggccgggcgtcggcgggaccatggagtgcgtgatcgaggcgcccgcgcccatcgccaggatcaggagcaggtagctcttccgggtctgccgatgcatggagcgggccagcggcagcaacaggtagaacacggtgtcgaagaagaccgggaccgacagcacaaagccgctggccatgagtgacacctcgcatcgctcctggccgaacaggcggacaaacatgcgcacgatgcggtcggcggctcccgaggcgatcaggcagtccccaatgatcgccgccagtgcgatgaccacgccgacctttcctgccatggcgccgaactcgccggcgacgcggctgatcttggtgctgaattcgcccggcgccaacaggctgacgaccgtggccgccgcgatcagcgccaggaaggcgttgacgcgaagcaccacgatcatgccgatgacgatcgcgatgccgacgaacagaatgagcagggggccagctgcgccggtaccgccggaggcctgcgccgccaaaacggtcgagagatccagtccgttcaaaattctgccctccatgggtcaacgggggttcgcgaacgagctggtgcccgtcgccaacgtcatagcttagccggccaggccaagaatttccagcaggacttgcgggacctgggtcacacagagatagccgtaaaacacgagcgtgccgagcagtccgaccgcaaagatccagccgggcttgagtatacgacacgcctcgttcgagagcatcttgggcatgacgacgaacagtccgaatgcgaccgctgccgcctgaagggcaatcagcaggaccccttccagaatcgacgcgattttcaacagggagatcggctgttcacctaacacgcagacaatcagcgtgctcgtacagaagaacaagaccaggaagatatggaactgtcgcttccaggcgaaccttctgttgaaacccggaatgcagagacggcaggaatcggccagcagacgaggccagcccgccaactggcccatcagggtcgagaccatggcgacggcgccgcagagtttgaacagaaagccgccggtcttgtcccatcgccgggcgaagatttcggagagcacctcggccatgttgtcgttccgagggaccatgtgttcggcgcccaggatgcccgcgccggcgacgaggaacgcgccggtgaccaggatgccgaggaccatggcgagactcgagtccacataaagggtctggcaccagcccttgatgcgctgcgccgtctgacgggacatcgcgcggaggccggcgaggtcggcgggtttgccatagcctcgcccggcggtggccccatattcagccccgatcacccagtaggtgtaccagacctgggaggcgaacccgccggcgccccaacccaggacgggcaggatttcctgccaggcgctgttctcaacgctctccgtggcacgagcccattcgggtacggcgggaagccggccggtcagcccggcggccagttcggcaaagctcgggaacacgtggcaggcgatgtacatcgccccgatgacgatgatgagcacgaacaagctcatgaagatcttgagcacgtcgaagacgccggaccaggctaccgccacggcgaacagggcggcgaacagcccgcaaagccgcatgtcaatacgcggcaggaggctgtgcatgaacgtgccggacgacgtcgccaacgctcctgttgacatgaccgcgcagaagagttgaaccaccaggacgatccagacgacccagtgacgcgggcccggcatgcggtcgaacatatcgaccatcccttcgcccgtgcagacggtatagcgtgcgccggccacgccgatccagaacttcaggaacactccgaggattaccgcccaaaggaccgccgtgccgaggatggcgcccgtgcgggtggcgatgatcacctcgcctgagccgatgtactcggccgcccagaccatactcgggcccaccacgagcaggatgcccagtcccttcggagcggtcggaatgttcaagtcactcgcctgcctgtcgtcctgtgccataggctgcgtccggttctgaagcggtctgtccgggcctcggatcgtggacgacagcgtagtgacctgcggctgggctgtccatagatttccggaacggtatttggcggaggaacgacacgggcattatactgcccagggtccgttccatacgctgcggcgcactggcgcgggtatgggacgcgtatcggtccggcacagggcatctcaattgagaaggaggtcacgaagatgagcaagcacctttctgtggcactcgtcgcggtcctgttggcttcgcagtcgccttcgccggctgcggtggggcacggcagcgatctgttcgggctcgcccgcgtgcagagcggcatgcggacccggcgggtcagcagctatgaccgctcgggaggcaacaacgaccgcttcgagcacatcgcggacgggcagaaacgcgaactgttcaatgtccagggggccgggatcatcaatcacatctggattacaatcgcgccgccgccggagcaactgaaccgtaacgacatcatccttcgcatgtactgggacggaaacgagttcccgtcggtggagtccccgattgggccgttcttcgggcaggggtggaacgagagctatccgttcgtgagcctgccgctggcggtcggtccggtggaaggccgggcgatggtgtcgtacttcgccatgccgtttgacaaaggcgcccggatcgagatcgagaaccagacgggacgagagatcagtgcattctactacttcgtggactacgtcgaggtcgatgcgctgcccgacgacatgggccggttctgcgcctggtacaatcatgagctgaccgaggcgccgcccgaaggggaaaccgagtggggcgtgaccggcccgcaggggaacaaccccgacggcaaggacaattacctgattgtcgatgtcaagggcaagggacacttcgtcggagtcaactactacgtgcattgcccgacgccgatgtggtacggcgaaggcgacgacatggtcttcatcgacggagacaccaggcccacgctccacgggaccgggacagaggattacttcaacggctcctggtgtccgaagacgatctacacgcatccgtatttcggatacgcccgcgtcaacgatgacatcgggtggctgggccggacccatgcgtaccgcttccacatcagcgatccgatctatttcaatacgtcactgaggttcacgatcgagcacgggcacgacaacaacctgacgctcgacatggccagcgtggcgtactggtaccaggcgccgcctcttcagagactcgcgccgatacccggcaaggaatcacggcagcccaagtcgttcatcggcgtcagcgatatccatcgctggcgcgacgagtggcgcaagaaccacggcaacggcgcccagttgtggggcaacgagaaatagaccgcaacgggcacggtcggccgagacccggtcgaccgtgctttctctgacgcttggatttgtcagttgcccttgagcttgtccgcgtagggcagcgtgtccggcacgacgcgcacctcggtcgtgaaacggtagggaatcggcgtgccggagtcgaacagcatctcgacgaagtacgcagtccagcctttgtccggtgcagggacgcggacgtcatacgtgccggagccggtcgcggtcagcggactgctggtccacgccttgccgatcttctccagccggaaatcgcgagcttcggcgttggttgctgtccagagccgaacctgttggggccgggtccgtgtggtgacgacaaggcgtccttcttcgggcttgtcccaggagaactgcggccgctcgcggccggtgaggatcgactgataccacaccagcagggccttgtcggcctccgagccgtccaggccgtggtcggtgttggcgcaatagagcaggtacttgtcttcgggcaggtcgccgaaatagaactgggccgaatcgggcaggaagaactggtcgcccgaggagttgatgagaaacttgggcatcgtataccggtcgcggtactcgtagggatcgacgaagttgcggatttccgtgccgccctgcgagtcgagccggtcgaagatcttcatctgttcgtagtcaccgatggcgggcgaataaaagccgtacgccgcgaagtggtggcgcatctgctcgttcatattgagcacgtcgatcacgaccggcgcaatggcccggacgcgtttgtccacggcagccgtcagccaggtggtccagcctcgtttggacgcgccggagacaacgaagctcttgatggtcagcttgccgccggtggctttcgccagatgatcctgaatcgtgtccatcgcccggacggcgctcttgaccatcggcagcagcagcggccaggtcgggtcctcggtgcggagaaaccggtcgaatgtgtacgcgatgatctcgtcttcgtaacgcgggttgcccgggtcgtccggaaacacgagcggctggttgggcaccatgcgcagttccgcgacgaccgatttgctgcgcagagcgatattggcgagcatgtcgtcgggcatggtcggcgccggacggtcgttgctgccccccgtgatccacagcagggcggtgtcgaacgcgacgtcgttgggtacgacgatcgtcagccagtgttgccagacggtccggttgacctcgttcttgctgcgccaggtctgtgacttcagatcgaggatatggatcttgccctgcgggtgatcgatcgtgcgcacgagactgtagctgtagctgggatcgggtttggcgacgtagtcgtccagcggcgtcgcgacagccagagagacgacgaacagagtcagcgggatggtgccgttgcatgctttcatagtccgatttgcctttctccccttcggggttcgcggtggtcttctcaggccttgggcggaaagattgttcgaaggtactccgcatcgtaccggcagctctcttcgacgccgagcggcatcttcgtgccttccatgacgagccagccacggtagccgatgtcgtccatcgcttcccggacgcggacgaagtcgatcgagccccggccgtagaggttgtcgtagtccttcgcgtggaattggacgatgtgcttgcccagcgcacggatttcctggtagatgtcatagcccttcagattggagttgccgacgtcatagtagaccttgatcgccggcgagccgacgcgctcgatgatctccagatgacgcggggcgctgagccacgactcgatggcaagagccacgccggccttttccgccttgggcgcgaccttcttgagacgttcgacggtggcatcgactccgatcgggtcgtcgaggaggtctccattgccgaagaaggccagcaggatgatgtccgtcttcatcgcctggcagacgtcgatggcccgctcgacccaccgttcggcgcgcaggtcgctcttgtacgggatgtcgttgagcctgcccagggccagcgaggccacttcgagctggttctgcgccgcacggtcgagaatgctctgttgcagtgtggggttgaacaggggcagctcttccgcggcccggccgaaatcgacctgtactccgtcgagcccgattcgcttggcgacgtcgaaagcctccggctgggtggttcgcccgatcgtccagtcgcagacccccagtttgaagccggcggatttcttgcgggcgccgatctttgcgcccgacgaggcgcatgaggtcgtcagtgacaatcccgccagagtcagggcggtgccggtcaacatctcgcggcggttcagcgttcgtccgttcacgcgtcgatctccatgaatggtcgtgcgcatgccccggcgattccgccagaccacacgcacgaggtgtccagaactctatgccttcacgcccttgagattggcgtcgagcttctcctggctgctcatcagctcgttccaggtgaccatgcgtttctcataggcggcgatgcggccgagtatcgtgatcaggttgctgcgcacgctgcattcgacggtcgggttttcgaaatggccgccggtaacgctgtcgtagaaggttttgatattggcgaccgcgccgtcctggtagattccgggcgagctgccgccgcgatagaagtggtcgccgcggatgaggacttgcccgccgtactcggtctccagaatgccctcggtgccgaacatgcggttgcggatgccttccggctgtgtgccgtatccgttcgactgacgggaactgaacgtgatggcgacgtcgttgggatactggaacagtacgctgaaggtgtcgtagcaggtgcccacgggacggaacttgcgtccgccgctgccgaccgcccacagcggcggttcctccatgatccagttcatcacgtccagcgtgtggatgttctgctcggtgataatgtcgccggacaggaccttgtccaggccccaggcccgcagacgattctcagggttgtccgggtcggacttccaggtttcatagtagcctgtgaaggggtcgcccgcgtggtaggtgcattccccgaaggcaagacggcccagggctttctcctcgtgcacacgccgcagcgcctccctgtaaaacgggtccgcccgcgtctggaaatcgaccaggaagcagcatttcttttgtcgggcggtcttgccgctgttctcgatgctcaggcatccggggacgtcgaccgcgatgggtttggcgaggtagacatgcttgcccgcgtcgacagcggcggcggcctgctcggggtggaaatagggcgggctgatgatcgccacggcgtccaccttgtccaggagcttgagatagcccttgagtccggtgtagcgattggccgcaggcacaccgacttcgttgccaagatggtcggtgcgatcctggaagtaatccgcggccgcgacgacgttgtatccgccgtgctctttgaagagcttgccgatccacgtgccgcgcccgccgcagccgatgacgcccagattgatcttggagttggccgcaaacgtgcgaacggcgccaggggccactgcagccagggacgccgcggccgcgccggtcatgaaccggcgtcggctcatcctttgggaaacagggtccagtggagtggggttctgcatctgtggcattgtgcggtcctcctttcaatttgcctggacgacaccacggtgttcgatgggacctggacccagatggggtggagaacccatcgccggattctatggctgcgattataccgtccgatgcacgccgtgcaacgcgtttcccgcctgtcacacggttgcggtgtcctggccgcgagaacgaatgggcgcgcggacgtatccgacgacgggagtgtgtttggcctcgaggtgttccaggtccatgtagttctcgcgtcggatttttcccgtcgaggtcttggcgaattcgcctgtatggatctcaagctggtgtgcggcgattcgttcgaatccggaaaggtgtttgttgttttgctggcagtctcggatgctctcccagacgaggctcttgaccgtgtgaagctcagacagcagttcctgcctcggacgatgggtatagtcctccagagtctcccacgccggctgcacgagggcacgcatggtctcctccatgacaccgttcggatcggtccgccgggtgggaacgaccaggacctctttgacaaagcgcgcctgtgacagggcggtttccactcgttcgggattaacgttcttgccgccgggcaggatgatgaggtacttcttgcggccggtgatgtagaggtagccgtcctcgtcgagatagccgagatcgccggtgtggagccagcggacgccttgggagtcggtgtggatcacggcctgcgtggcttggtcattccggtagtagcccttcatgatacagggaccgccaaggcagatctctcccttctgaaaaggggcctgtgtgcggttcttctcgtccacgatcttgaccgacagggtgtcgatcggctttccgaccgagccgagtttgtcgagacgctcgttgaagccatagacgggggagttctctgtggtgccgtatccctcatacatgtggaagcctcgcttccacagggtgtcgaggacccagcgaggcatcggtgcggccccggacagaaagaaccgaaggcgggtccagccttgtctcttgcggatctgcctgccgacgtaccgcggcgcgaaccggtcgaggagccgcaggatccggctcttctgtttctggcggtcgagattgtcttcgagcttgcgggccagggtcgtgaagagcgccggaatggcaatgaagattgtgatcttcctgtcgcggatcaggtcggcgacttcgcggtaacggttggtgtagatgctggttgccgccgccaacaggggcaggagtttgcccacggtcaggccgaacgaatggtggggcggcagaatatgccccaggatgtcctgcggaccgaggtccacccggcggatcgagccttcgaggttggcgatgaggttggtgtgagtcaattccacctcgcggggatcgcccgtggtccccgaggtgcacagcaccacggccgtgtcgttggggcggatcgttctgtgaatcgcgtcgaggtctcccggctgcacgtaatcgccttctcccagaggctggtcggtcatgagaatcacgcgcaatcccctggccttggcgtgggtcgtcagttcgtcccgatctgcggggttcgcataatcgtcggccacgatcagggcacgtgcatcggtggcttcgaggtgcgcgatcacgccctgaggtccgcggtccgggtcgatcagcacggggactgcaccggcccgcagaatgccccacagagcgacatcccagtccgttcggttcttcgacaccagagccacccggtcctgcggaccgatgtactcacagccggccagcctccgggcaaaggcttcggatcggctctgaagttgcccgaaagtcaacgtttcacgacggtcggcgttgataatctcggcacaggtcttgtcggggcaggtgactgccgccatggatttttggaagaggtcgatcagagtccggtgtttcaacatggtttccatgccgccagctccatttgggccatgcccccggcgtcgaatgtctccggcagcctgtgctgccgcaccgccggaccgaatatcatacccgtacggaggcaaaaggtaagaaaaaaaagaacgacagaacggcaaagaaggggcaacaggccgccaacagcctgcggcggttgctgccgcggctgtggacccggcatgaagaaaaagggcctgcaccaaacggtgcaggcccctgaggtcttcctgtgcccttggcttaggacacagcttcatggttcgaacggttgccggtcagtcggccagcgactgcacgagccactcatccgcggtgacggcggcgtcgacaaaatcgaccatgcagtcaccgttccgatcgccgatcacgtgcacatcgcacggagcggcgggttcggcgatcacgtcagggccggccagatagttggccgcgatctcggccgccgacagggcggtgtcgtagatgcgcagttcgttgtaggaaccgcagtacagcgggtcgccccactgcgaacgcccgagccagaggttgttgtcgatgatctcattgagcatcaccggggccttgtaggcgccaatgatcgtgccgttgatgaaaagcttgacgatgccggccaagtcatcatgcacctgggtaatcagaacctcttgcccggcggtcatcttgccgctgtcgaccatgggcatgttgtactgcacgccgagccgacggtactccagcagaagcgaccgcgaaccgctgtccggggtaacatagaagtagctcacctgatcgccgccgttcgagacgtcttcgccaccgttggcggtacccatgtcgtagatgcgctgccagaccgcgtcggtgccgtcccaggtggtccagcactcgatggtcatctgcgtcagcggcgagatgagaccattgggcagatcgatgtagtcgccggccgccgcattgttggagttctgcgagccggtgttgcccagatccgcctggccgccggcgatggttgcattgccggtaccgttcttcagcgtggcatcggcgccgccgacgacatccggaatcgtgacaccatcgggactgctgtcgaaggtccagcggtgaatcagacctgtctggacatcgaggaaggccatggcggaagtgaccgagccgatctcgttggttacgacgcagtagtagtagccctggtcgtcgggcgtggctcctgtgatgcgaagcgttgcttctacgccctcgggcagcggaacgtcatacagctcaaagcccatcatgacgaccttctctcggtaccactgatagctcagttccggtgccacggtgccgatggcctcgcagaccaactgggcatcgccgccaggagtgacaacggcgccttcgatcttggtgatgatcggcaggccgtcctccgtcgtgaagctccagacgttgccctgcgtcaccgtgccgtcggccgcgacttcgtcgatgcgccagtagtaaaccgtggacaactccagatcgccgatgaggtcggctacggagaacgtggtctctgcctgcccttgcgagaacggctggagggcagacggatcctcgcccccggaaacattgaaagccaccgcgcctgcggtcggggtccagctcacgaccagaccccgagaggagacccctgtggcgccgtcggccggggagggattgtacgcccggttggcgatgggctcacccgggcccgcgtcatgcgactcttccagttcggccggcgacagggcaccttgccagatgcggaattcgttatagctggcattggcggtgttgtcgccccattgcgaacgaccgatccaggcgttgttatggttcaaagtcgagacccggttgcccgtggtaaacgaaccctgggccggtcccagatcgtctgcaccggccggcgcggtgtaccaggtcaccaaaccgggctcgattaccatgacgatgtggtattccgttcccagcgtgtagggggcgttgctcccgtcgaccagtctgccgccggccggaccgttccactccacccgatcgttgttcagattcgtcccgacggaccagcccatgtagagatactccgacgtgctggtgccgaaatcgaaaatgcgggaccagttctggacggacaattgcgtggcccagcactcgatggtcacggaatcgcccaagcccctcaggatgttgtcgggcagatcgatgtaatcggacgtgtctttgccccctcccgtcaaggtgatctcgctgtccgacaggatggcattgcttgcccccaagtccacgacgacagcgtcctgtccggccaccgagtctgtcaggtcgccgttaaaactccagcggtgagccagttcggctgccggtccgccggcggcccatccgagcaccagcagaaaggatattagatacatttgctttctacacatgcgtgacctccttcatcgaacattgacagaatccactcggcgtttcgatcaggaaacgctcgaccatccctcagcgtgtcggcccctcgacacaccgaagacactgttgcgatggggtaaggcagacgcgccacaggagcgtcagggccgccgagtgcatcgcgattgtctcgggtcgaacggacgacacggccgactgcgaagatgcacttcagcgaaccctctgttcccggacacgaagccctccaccgatttgagacagggtgccgcaaagtggcttgccggttctgccgagcaccttgctcgggttgcacccgaaggcgcggcgcaggaggcaataccctccccgcccccgtcatcccctgcatcatgcacatgggccagatgggacagtatcaaaccgcaggtcacctcagtattatgccacgaagacagggtgtcgaacaacaccctattgcgttttatttccaccacttcacgaatgcgcacgatgatcgcatgtccatggagaatgaaaaacccactggcaaacaggcgtatcggtacatgccgacatatggcacggtacctggcggggcagaggcgggtagtgattgtcggtggggatggtgggggctaggcacgaagaagggcctgtaccccacggggtacaggcccttggtttctgtcctgcgtccttcgatcatccggacgcagcgggtggttcgaaagtcgaccggtcagtcggccagcgactggacgagccactcatcggcggtgacggcggcatcgacgaaatcgacgacgcagtcatcgttgcggtcgccgatcacgtgcacggcgcacggagcggcagcttccgcgatgacatcgggaccggccaggtagttggccgcgatctgggccgccgacagagcggtgtcatagaaccgcagttcgttgtacgagccgcagtacagcgggtcgccccactgcgaacgtcccagccagaggttgttgtcgataaactcgttcaacatggccggagccttgtaggcgcccacgatggtaccgttgatgtacagcttgacgatcccggcgacgtcatcatggacctgcgtgaccagcacctcttcgccggcaggcagcggaccgttgtcgttgatcggcaggttgaaggccacgccaagccggcggtactccgtctggacgacgcgagcgttgttgtccgggcagacgcagaaccaggtcgtggcgtcgccaccactggaactgtcctcgccgccattggaggtgccgaaatcgtagacgcgctgccagatcgcgtcggtgcctctccaggtggtccagcactcgatggtcaactgggtcagcggcgagatcagcccgttgggcaggtcgatgtagtcaccggctgcggcgctggaggagttctgcgaaccggtgttggccagggttgcctggccgccggcgatggtcgcattgccggtgccgttcttcagcatggcatcggcgccaccaacgacgtccggaatcgtgacgccatcggggctctcgtcgaaggtccagcggtgaatcagacccgtctggatgtcgagaaaggccatcgcggaggtggtcgagccgttctcgttggtcacgacgcagtagtagtaaccctggtcgtcgatcgtggcgccggcgacattgagcgtcgcctcgacgccctcgggcagcggaacgtcatacagctcgaagcccatcatgacgaccttctctcggtaccactggtagctcagttccgacgggacgacgctggtggcctcgcagaccaactgggcattgccgccgggagcgacggcatcacccttgatcgaggtgataatcggccgcccgtgttgcgtggtgaagctccagacactgcctgcctctccgttggtgtccacacgccagtagtaagtggtctcaaattcgaggcccgccgccagactgccggcatcgaccgacgtgtcggtgataccttcggcaattgcggataacgcggcggggtcggtgccaaagtacacggtataaaccggcgactcgatcgtggctggagcgccccagctcagcattgcgttcacgacagcggtagcgccgtcggccgggctgggcttgttggccttgctcggatgggtggcataggtcaccgaatccgggatcacggtaatggtgtcaaaccccggaccggtccagccccagtcctggccatcgccgccgccgccttcctgcatgacgccccagacggcgatgagctggccttcggtcagcgacatcggcgccgccttctggctcgggtacttgccccattcctgcgaggcggtccagccatcgacgtaggcgacctgaaccgcatcggccatgttgtcattctggctgacgtacagcctctggtagtcgtcgccggcgatgtagaaggtgtactcgccggtggccggtacgaggatgtaggcactcatcctggccacgtagttgtcggcgatgttagcccatgtcggcagagtgaggatgtcgacctggtcggctggaacgccgctgttgaccttggcgatagcctgatcgatactcgcggcaccccaccagatctcccgcaggacgtcggcggaggtcaccgccgacaacatcagactgactaccgctgccactaacgttgcttttctcatttttgggtcctccccgtacattttcacgttctgtgtcggatacgttacagtcctgtcaacaatccaccgcatcttccctgttcaccgtcgctcgattgccacctccttcccacgtgtcgtgggctgaccacaccccgacaagcattcatctgggccacgccgggaacgactgttcccgggtcaacgacatcctccttgatcgggataattccgatggttcagccgccaatccggtcgccacggcgcgggcttggcgggaggaccgacgacaagcaatcacttctgtccagcggacttctccgacggctgacgcgcacgcgtccggacaccttcgtgaggtttgcccacctgagtgatgcagctaaatctggtgactgtaagcgattaggtgtcattgcgttcctggtcgggccagctcctcagatcccagacagacgcacgtcgccacagcagaagacatgcagaaaaaccgttgcgtacaatcgtaccgcaggtcgaacgaagcaagtctaacataagcgactttcccgttcaagccccaaaatgtgtcggcgtcgacgtcggcgttccaatcattcgcgtctctggtcgcctggattgcggttttctgggaccttccttcgacggaggggcgcgccgcaacctccatctccatcggttggcggcggccatgactttacacaaaactcgaccggcgcagccgggcatgcagtgtggccgggacctaccgccgtctgccaagggagtgcccgagacaaaaaagggggcccataccgcccggtatgagcccccgaataccgcaaaaccgtactgccttactgctgctaccagctcgacacgccgatcagctcaatctcggcgatctgcatgctgttgaccgaaccgcccaccggaccacgaatggccgtgaagagcagttggtagctggtgtacgccacctcgttctcaaacgtgatgggggtggcgttcttggtgaagcgaggccactcggtcgcaccggcaaagtccacgatgtcgccgctggcgatcagcgtgtacggcccgtcgatgccgtcattcgaaccatagagttcgaacgcgatcgggtcgcgacccggcacgtcattggccgtggtgaacgtcagccctgtgacaacagtagcaccgacggtcggcgtaacgcgaatgccggtcggccctgcatcggggacgaaatcgcccttgaagtgcaggtacttggtcgagacgttgttgtcgatcgacagggccggatgctcggcaccgggccaatcgccgtcattcggaacgccctcgatcacatccgccgggctggtgacgtcggcgagcacattgtggctcagcggcgtaccgaggctcagcgtgacgttaaccgaaccactgccggctgccggagcatcgggagcgccggcgccgacgatgatcttgacgacgttcgacaggtccgcgccttcaatcccggccagcgggatgttccagttctgcgtgctgacggcctgtgtggcagccggatcggcattcaccaccgtggcaaccccgccggctgcgtcttcgatcgcgacatacagacccgccgcatcattggacggcatggccatgccgatcgcttcaacggtccagtcccctgtgacgtcaccggtcgtactgacctccgagagcttggcgatgaccgtgttgcccgcatcgtggctggtcacgcacaggccgatgagaaccggatcttccatcaccacttcacggtcgccaccgagctgcgtccagttctccgcgtcggcggaaacaaacccagtgatgatgttgcccgcgcgcacgaccttgacgtagtacggcggtgcgaccacgctggccgaatcgttgttgaccgagcttccgccagccgtcggacgaccctggaacgaggcgccgttgccggagccagcggaccagaagttgcccgtgatcaccgtcatcgaatgcgctgcgctcggatcggtgctctggcggatcatgacgcccgccttggtccagttgttggtgatgttgctgatgctgtcgacgcgggcgatgatcgagccgtcgccgttgagcgtcttgtaggcgtagcggaactgatcggagttaccccagatgtcggcgccggaggcgctcatggtgatcgcgccgtcttcatcgacgaagtcgaccggcttgcccttgtaggccacgcgcagtgtgtcgggggcataggccgtcaggtccgccccgtccatggcgatttccagcgtgttgccggtctcgtcatacacaagggtcccgctgccgacagacacgaactcggccgtggtgaagctccactcgtcgccttcccagacggcggtgccgtcgttctcatccacgctccaggtgtacggcataccgtagaccaggccggcgtcaaagcggctgccttccaccgtggtcaccacgccgttgacggtcacgtcactggaaaccgcgccgcgaccggcataccaatcgagcgctgtggccgggttcacacccgtggcgccattggccggcgccgtcagacgggcgtgcgccggaacataggtgaacgccacctcggccagacccgaatccgggaacaggccgccccatgtgctgttgattgtcaggcggacgaacttggcgccgacgccggccaagtcgacgaccgtctcggcggcgcgagccagctcgacatccccgaaggcgacccattcggcgccgtcgaccgacgtttcaatggtgacgctcttggcgccgtagccgagcagtgcctcaaactgtgtgttggagttgaagaccttcatgtcgtacatcttgtagacgcgcgggaacgcgaactgaatccacagggcctcgcccgtgccttccggcggagcggccagccactgatcggtgctctccatcgagactttcccgtccagcgtcttctcggggccggacccttcctgggcagtgccgttgctcgtggcaacgatattctgcaccgcgaaggtcatcggttcggtggtgaaactccatacctgaccctcgacaccgctggcatccacacgccagtagtaggttgtggcgaagtccaggtcgatcccggcggtgccggcgtccacggtggtctcaatgatgccttcggcgatcggtgccagggcggccggatcggtgccgaaatacacgtcgtaaacgaagtcctcgcccacggcgggtgcgttccagctcaggatggcatcaatgacccctgtggctcccgatacgggcgacgggcccatcgccatcgtctcatacggatggctccagtactcgccggggatcagggtgatggtctcgaatccaggaccggtccagccgaagtccataccatcgccaccgccgccttcctgcatgatgccgtaaacagccagcacctggccctcggtcagggacatcggcgccgatttctgaccggcgtacttggtccactcctgcgagctggtccagccgtccacctggcagacgaccacggcgttggccggatcatcgtcctggctgacgtacatgcggttgtaatcgtctccggcgacatagaacgtgtactcgccggtggccggaatggttaaccagccgctcatcttcgcgacatagttgtcgcggatgttcacccacgtcggctcggccaggatgtcgacctggtccggcggcgttccgctgttgaccagcgcaatggcatcatcgataccgaggttctgataccacatctcgcgcaacaggcccgccgtcgaaacgctcgacagcagcagacacaccaacagtgccaacaatgctaacttcttcatagcacgtcctcctcggactcaaaacatttgggatttgattaccacacactccttcggactgtcctcacttcccttcgttcgatggccacctccttcctgccaacgtccgggtcgctgtcgcccggcaactcctctgtcatgtcacgactgggagccaaggctctcagtcacaagagaccgtccatggttgggatgggtccaggtgcctctatgggaaccgccatgcttaaggtccggccaaccgatctcgatggtgtgaagctggttgcagacaggtctgaatcactcactctctctcgaacctccctgacccatgcgttgctgcgaccaggtcagcgacggcaccgccgccactaccacgagcgcgttctcacagaggtggctggagaacacgtgtctcggtccttcagatggtcttctcatcaggggcaaagggtggcggggcattctgcaaacgcgcgcctgtatggttccggcgccgatcaggtatgctcccaagtgagctaaaacaacaccactcctgccgcaccgaagagatgcgaggacctataagcattgctctatcacaggtcgaataaccagattctaacgcacaggcaagacctgttcaagcaaaaaaccttcgaaaaacgtcgggtctttgtgtttgacgggggtcctgccgcgtggcggtcctgccgggccgacctgttggggggccgatttgccgttcacccggtcgtgcgatggcggtcattcgcgttgcccttgcgcctgccaggcctgcgtgggggaggcttggccggccttgggcgtggccatcgtaacaggcatctggaccgccagctcctgccgtttccggaaggttcgggcgagcacctcgccggtcgcggcgggtcgctcggtgaccaactcgggtgtgttgaacgtcaggaggcaggattcgtaaaaagccgggtctctttggggtagtacgatcggtttgtggacggtcccgtcctgcccgacgtagctgatgaagagccgggtaaagaccccgtgaagccgcttgctgctgaagacaagccatcggctgttgctggaccaggtctgccatgattcgctcagattgctgttgatttcgagcctgcggtacggatgcctgccggcttcgtcgccggccgccaggtcgagcaggtacaggtcgctgttgtcctgccaggcggggaaatacccgtaatcgcacatgcagaacgacagccatcggccgtccgggctgcaccggggcatcgcgatgcttcggcccgtatcttctgcggagagcacggtttccaatcctccccattggttggtgtcgaggtcgtacgagacgcgcatcaggctgtacttgacctggtcgtaaagaagcgggggggtcggcgtgtccttgggccacagcagcggcgcgctgcagaaatagaggtacttgccgtcacccgaccaagccggccagttctccagacgttccttgcgggcgaggtttggctcgactcctatcttcttgctgtcattgaagtaacaagcgaggaaggaatcaagatcgacggtgtcgcgtacctcgttgcggctggagtggtagaacatgggcaggttgttgacggaatagaccgccatccgcccgctcgggtgccaggaggtgtagccgaacttggcaccaatctcgcgcaccaccgtgccgtcgaccaggagggttcccacgccaaacgtgggcgatcgcacacccacgagcatcctgtcgctgcgattggcggcaaacgaatggcagttgatacagccattctccgtactcttaccgcccagcagcagcgactcgcggaagctggtcaggtcgcggaagtggatggagatatcgcccttgacccgcaggtgtgttgggtgcatctttcgatacaccaggaagcggtcgatgtcctcttcggcgatctgattggcgatggactggaagtggtcccattggccgttttgacccttcgcccagatgtcgatccgcagctctcgaccgcggttctgctccagcagggcgtgccagggtctctcgcgaatctggatggtgggcttcctgctgaagagctcgaccgccttaccttgtgccgatgagaccttgacgcggtatgcattccccggttcccgaatcacgaaattcaacggggcaatgttgggtggtatgaccgcgtcggcgtagtccggctcgattcggggccggcggtcgatctcgtacgggcttccgacaggttccggtcggttcgacagccaggcaaagccggtgacgaccgcggctgtgaaaaccagaagtaacgcgctgattacaaagggtttatgcacaacccgccccctaaccgtcgaggaaatagtaatagtagtacgtgtcgccgaaccgtcctcggagcgcctcacgggcttcggccttgtccttgccgtgctgctggagaagctggaagaactcgtggagcctgatcttcgcctctctggggatggtccgaccgggtacgtcgatcggttgcctcttgagcgtcctgtgcagcagaatggcctcgacgtagtgcctggcgtcctgcgaaatggcggcaggacgccacctctcgacgctctgaacgaactggtcgaggttcctggacaagagcagactggccatgccatattcgtaggccattcgattgcccgggttttccgtcagcagcaatgtcagcgtgtcggtatcccggacgaaatcgtgggcgagcttgacagaacgccaatgctgaatcatggcgtcttgagacaggccgggatcggtgtcgagccgcgccaaggtggtccgggcggctcgaccccagaatggaacctttgccagagcatgcaggaagacacgggccgtgctgaggttgcccttgatcatgttaactcgggccaaacgctggagcaacaggggtctctcgccataggtctcaatacagaccatcagtgcgtcttgcgcctgattggtcagtcccatgtccacgcacgtgtcgaacttctgccaataggcctcggctcgcgtcaggagaagggcctcgggtcgctgcggaaaggcgaacatctcgtccccgagtctgcccaggtggaacagtgcccggttgactgcatggcagacaaggtagtgatagggggtctggcggccgatttcgatgatcttcgaccactgctgctgatgtgagaggtaatcgacctcgaagagagtcttgaccttggggtcacggtacagcagcagcgtcgcagcggtcgcaagagccaacactgctgtgcggaggttcagtccgaaggtgctccgcaacggatcgccgaacagcttctcgaccgctcctcggactgcttccagtcctggagaaggtcttgccttcctgctcgatcgctgcgaccccaccgctccaaagagcacccgagcagtccccagtacgagcaaggtgaagggaaggaagagaattacggcccagacggcttctcgcatcagctccgaggacgtaagagtcctgatcttccaggacagcggaagcaactgaagataggcatcgtgcggacgctgcccaaagaaaccgacccccaggaccaaaggtatggcagcacctatggcgaactgcgctgtgccgagccggaaccggcctcggaagaggatctcggccagtccgcacagcagggccaacagcagatacgggcctcctgcgggtacgtagaaggcgaccgaaaaggccacgaaccacaggccggcgcggacctcctgtttgggtgccagccccaggtagaggcagaaggccgcgatcgccgccagaggccccatcgtctcgggcagatggaatgtgtactgcgagtagatggccagcagaaccagcggagcgaggaaccgcactccccgccatcgcgccaggcccagcgtgcgaatcgcaatgtcggtggacaggcacagcagccatgcttgggctgtgacgaccgccgccccggcccaggagtagtagaacaactgcgacaagaaggcacacaggtattcgagaatgccccctgggtaggtggtgaatcccgcaaagaagtcccatccccagtagaaaaccgggaagttgtctatcaggccggcgccgtggtagatcagatgcggctcgatttccagggcaaagtacaggtagtacgcgacgaagaagaccactgacaggggcaacccgaacgcgtgtcgagccttggtcttccctgccgtaccttctttcttggtcattggccttctctcttgcggggtgcagtgttttgtcgtttcggccgacccggcaatgctatcggccgctaagtctgctggtctgaatggattatagcaggattgtcatgagatcgtccagcgggtctgccgctctggccgggacggcgcctatcgggggcgtttggtgcgcagccaactcttgagcttggcgggtgtgaggctgttgagaatgtcgtttttggtggcccagccgcggccggcggtcgcgaccccgaacggcatcaagcccaggccctcggtgctgtgggcatcggtcccgatggcgagcttgacgcccgcctcgatcgccatcttgcagtgcaggtctttgaggtcgaggcggtacggattggcgttgatctccagagcggtgtgggtccgagcggcctgctcgatcaccgccgcgatgtccaggtccatcgcttcccgctggccgagcagccggcccgtcggatgaccgatgcaactgacataagggttctccatcgccctgagcgttcgcatggtgaccttctcgcgggggctgttcatgcccgaatggatcgaggcgaccacgtagtccagatcggccagcaggttgtcgtcgaagtcgagcgaaccgtccgcgaggatatccacctcggcgccggccagcagcgtgatccctttgagcttggcgccgatcctgtgaatctgctcgatctgcttggccaggcggtcggggctttggccgttggcgatggcggaggactcggagtggtcggtgatgcagagaaactggtagcccaacttgcgggcggcctcgaccatctgctcaatgtcgttccgaccgtccgaggccaccgtgtgcatgtgaaagtcgccccggatgtcctcgatctggacgagttggggcagggtgtgcgaacgggcggcctcgacttcgccgcggtcctcgcgcagcagggggacgaccgggtccagccccagtctcttgtagatttcctcttctgtggctccggcgacctgtttgtccccgtcgaacaagccgtactcattgagcttgagcttgcccttgatggcgatctcgcgaagacgcacgttgtgttgtttggagccagtaaagtactgaagggcggcgccgaaactctcggtcggtacgacacgcacgtccacctgcaccggtgtcgtctcggtctggatgatggccgagcctttcgtgtcgcccgaggcgaggacgcgttcgacgaagggtgcctgcgtgaatgactggatgatctgctgaggattcgccttggatgtcgtcttgccggtgcccatggccaccaggatgtccacgtcgccgatggtctcggcccgccggcgcagtgacccggctgcctcgactcgtttcaccccaggcaggtcccgcaggcaggcacagaccatctcggcggcctccatggcctggtccagccggatgcggcccgtcgacttctccagaaactcgatccctcgctggatggctgccgccttcttctggccgaagccgggcagcgttgccagcgacccatccgcgacgaccctcttgagatcgtccatgcctctgacacccaggccttcatacacggccttgacgcccttggggcccatgcccgggatgtggagcaactccagcagcgagggcgggatgcgctccagaagttcctcgtgtgccgcgactcgattgccggcgacaaattcctgaatcttggccagacttgacttgccgatccccggtatctgagccagccggccgtcgttcagcagcacgcccacatccacgggcagttcggcaatggcacgcgagaccttgcggtagctgttgatccggaaggggtcctcccccagaatctccatgatgtcggccatctggtcgaagatcgcgctgagtatcgcgtttctcatgggctcgattatacgcggaaggccgccaaagcgaagcggcaatccctgcgattctcagcggcgcaggtagcggatcagccagagcaccagcgtcaggatcagcgacagcaggatgcacgtgcccagcgggaaatagacccgccagtttctgcccccgaattcgagatcgcccggcaggcgggacaggccgctgcgtccgaggagcatccacaacaggccgaccgcgacgatcccgacgccgacggccaccagccacctgccaaattgctgaggtccccaatccatgttctgcacgatccatcctgtgcccaactggtgtgcgctgaccgaaagattataatggtcctgttgcggtccgttcaaggagcctgcaggtgtatacgcccgacggtgacatctggatcggcacctccggctggcaatacgaccactggcggggacggttctatcccgacaagctccccaagagccgatggttcgaacactacgcccgacatttcgacaccgtggaggtcaacagcactttctaccatctgcccagggccggcaccgtggaaaagtggcgccggcaggcccccgaagggttcacgtacgttgtcaaggccaatcggtacatcacgcacatcaagaagctcgccgaggtcgccgaggaggtcgggcggttcttcgaggtgatcgatcggttcgaggacaggctgggcgcggtgctgtaccaggtgccgcccagcctgcacagagacctcgaaaggctggatgcgttcatccattatcttcccgagcgaaggcgcgcggtcttcgagtttcgccattccagttggtacgatgacgcgacgttcgatctgctgaatcggcgtcgcgtcgccttttgcgtacacgacatggcgggcaatccatcgcctcgcgtcgtgacgggcgaaatggtctatgttcgctttcacggcacgaccggccgctatgccggcaactaccccgatgccctgctcgcagaatgggccggctggctcaaggaccagcagaagaacgtttgcgctgtttatgcctacttcaataacgacgttgagggccacgccgtccacaacgcgcggaccttgcggagtctcctgacaggctgaggctgtgtcagtccaggacggtcaggcctctcgcccgcgcgtacccacgtgcggcggcgatctcgtcgggagtgggccggcgggcgatcttcgggtgggcaggcgcctggtagcacggtcggtactggcccatcacgttgatcgtcgtatgcggactgattcggtctgcgaggaaatcgatgacttcgacgctgccggccagattctccggaagaacaaggtggcggacgagcaaaccccgggtggcgatgcctcgttcgatttgcagatcgccgacctggcggtgcatctcctggacggccgcaaagcagacctgcggatagtcggcggcagcagaaagctccgcggcgacggaggcatccgcatacttcacgtcgggcatgtagatatcaatcagtccttcgagcagatggagtgtttcgacggcgtcgtagccgccggtattgtagaccgtcgggatccgcaagcctttgttccgcgctgtctcgatggctgcggcgacaggcgccgcgatgtgcgtaggtgtgacgaggttgacattcacgcagccgatctgctgaaggccgagcatggcatcggccagctgctcgacgtcgatccgccggccctgacggaggtgactgatatcgtaattctggcagaagatgcagcccagattgcagccggcgaagaagatcgtccccgatccacccgcgccaacaaggacgctctcttcgccgaagtgagggcccatcgaactgacgacggcgtcagagccgattccgcagaacccgacctgtccggcgttgcggcgggcgccgcaccggcgcggacacagggtgcaggggtcggtcttctccccgagccgcctgacgttgctgctgaaccgggcgagatccattgccgcaagtcctgctacgcgttgtccgagattccatggcgtgaacagacgtctgttgtccgtttactatagcacgagacccgcggcgacaagagccgttttgacggaaaggccggatcgctccatattgtagggcggaccccgaagcggtatattgcaggcgggtcttgcgacgtggaaatcatgcagaaaaacacacaggccatagaacagcaggacagctcggcgcatctggcttgccagaaggtggttgctctgcatggtgagcggaccggcgatcaggacgagtccttgcttgcgcagcgtcttcggcatggagaccgggcggcggccgaggccctggtcgagcggtaccatgagcggatttatgtgtttatgcggtccatgggccatgatcgccagaccagcgaggacctgacccaggagacgttcatgcgggcctggtatcacatcggccagttgcgggagggcaaggccctcagcgcctggctgttccggattgccggcaacgtctcgcgtctgcaccggcgaaagcaccggcatcctgatccggtcgagttgagcgaggcggagccggcgcctgatgaggtcgactcggcccggcgggccgcagaccgggagctgttcgccgggctgcaccaggccgtcgggcggctgccgtggaagctccgtcaggccgtcgtgctgcactacatggatcagttgagcatcgccgaggcggcccaggcggcccaggtacgcgaaggaacgctgaagagccgtctgaacagggcgctggaggccttgcggaaggaagtcgtcaaagagtagtcccgggcacacgcatcgacgcgaggacgatggcggggtagcacatgatggtggacaaagagagaatcgaggagttgctcagggcgtttcccaagcgggggctggagccggtccgtcccggcctgctccaggagctcaagaaccgcatccctgcccgactgatcgtccatcggatggacacgatcaacatcatcgtggacctgcgcatcagccggatcgccgccgctgcggctattctggtggccttggtcatcgccggagcgattttcggtgggcgcgaggcactcagcaggcggacgtaccaggatggcaagaccttcctcaagtacaccttcgctggagaagacgcctaccgaggacaggttctcgaagggctcctcaacctgcgcgacagccttctggctcaggggcgggaggtggtcttctatggcgaccgggcgcacctcagagatccccacgtggttctgatgcactggaagctcgacgaagaccgatacggagtgatcctgggcgatctgtcggcccggacagtcagcgccaagacgctgatccgcctccaggcctacatgctcaaagaacagcgcaagtaagtccggcgggggggccgttgggtgttgctttctgacgccggggttggtagaatcaagtccacgttgcagggggattaggctcgcttttgggaaggggcaggtcatgcacagacgccggggattcacgctgatcgagctgctggtggtcatcgcgattctggccctgctgatggcgattctcatgccggcgttgtcgcgggtcaagaagcaggcccaatcggtcgcctgcatggcccggctcaagagctggggcctgatgttcaagttctacaccgacgagtacgacgggaaattcaatcccggatggggtgtcggtgagacgacgctgtggccgaatgccctgcgtccctactatcgggacgattgggagatgctgctgtgcccgacggccacgcggatcgatgaatccggccgggagggcaccttcatggccatgacgcgaaccttggcgacgccggggggaggatcgcacacgttcgctttcagctatgggatcaacagttggaccaaccacatgacggcagaccgcggcgaacgaaagctggagtggttctggaagaccacagcgcacagcggccagtacaacattcccgtgtttgccgattcgacctggcatgatgcctggccgcgacataccgatgcccccatccaactgccgtgggatttcggaggtggtgacaccggcacgaccggagagattaaccatttctgcatcgaccggcataacggctggacgaacttcctgttcatggactggtcggtccgccacgtggggctcaaggagctctggattctgaaatggcacaaggcgttcgacgtgaatgggccctacacacgggccggcgggatgcagccgtcggactggcctgcctggctgagcaagtacaaggaatactgaccgtcggagtcagtagatgatcgcggtgacttcctcgatcttgcgaatcacttcgcctgcgtcggaggggttggagacatacccatcgaagcccctctgaaggagtgccgccgcttccgcctggctcagatggttggccagggcgatcagcttgattgtcgcgtactcctcattctcgcggatgctccggcagataccgccggcgtcgatgccgttggccagcaggttgatcaggaccacgtggggcgcgaacctctggatggcggctcccgtttcgaagctcgtgcttgcggtatggacttcgtagctgtctctggccttcagtgcgttgaccaccgcggccccgacgttggcgtcgttgtcgatcaccaggaccctgagcctgccgacggacagcgcctcggtgggcatgttgtgggccttcatgaagcggatcagttcgttgaccgggatgcgccggtccttgctgccggggatgcggtagcccttgagctgtccggagtcgaaccatttggaaaccgttcgcggcgcgacgttgcagatcttcgccacgtctccggtcgtcagcacgttcttgccttttgccatcgttgcgattcctgaaacaaggtcgttgtgccgacctgttcttcgacccgggcgacggcgggccttaatcgagagcagacaaaaccgccctgcgacgtggccgtagcaggttccggcgccggagggtcccataagcacacgccggtcgcgcgtcgagcggggggcgggaatcgggttggattgggggcatggcgcgattagaatgtccggtcaggattgaccgacgtcacggtgcaggagtgcatgatgcggatattcttgtcccgaccggacattacggagaaggaaatcgccagcgtggtcgaggtgcttcgcagcccgaacctgtcgctcggtcccaagctggccgagttcgagcaggcactggcgcgctatcttggccgtcgccgggcggtggcggtcaacagcggcacgagcggactgttcctgagcctgctggccttggggatcggcgagggcgatgaagtgatcacgacgccgttctcgttcgtcgcttcggcgacgtcgatcatgatgacgggcgccaagccggtcttcgtcgacatcgacccggtgagcctgaacctgtgtgcggatcgagtcgaagcggcgatcacgccgcgcacgcgcgcgattctccccgtagaggtattcggaaaccccgccggattcgaccggatctgtcggatcgccgagcggaatcacctgcccgttgtcgaggacagttgcgaggctctcggatcggctctgcacggcaagaaggccggtaccttcggcgcgctcagcgtcttcggcttctacccgaacaagcaaatcaccacgggcgaaggcggggccatcctgaccgacgacgaggccctggcggacctttgcgtttcgcttcgcaaccagggccgcagcggcggcgatcagtggttgctccacgagcgcctgggctacaacttccggctcagtgacatcaactgcgcgctgggcttggcgcagctgatgcggattgacgagatcagggccaaacgcggccgcgtggcccgatggtaccagcagatgctggccggcgacgaacggctcctcgtgcccgccgcgccggtcggcggggacgtaagctggttcgtcttcgtcgttcgcttggcggattccgtcgagtggaagcatcgcgaccgtctgctggaggagatgcgccgccagaagatccaggtgagcaactactttccctcgatccatttgcagccgttcatcgccgagcgatacggacacagtccgggcgactttcccgtctgcgaaaacgccgctcggcggacggtggccctgccttttcacgcccacctgaccgaggaggacgtggcctttgtgtgcggcgccctgcgcggcattctcgacaccgctcttcgctgattctatcgccagatcggccgtcgtatcggaccgcttcatttcgtgtttttctgtttgcatctgcggctttatatcggaagctttacgtagagacggatgcacgcaacaatgccggggctggcatatcaggatccagtgaagaaggggggaacaccacagatatgggttggagggcaaaattcgtcttgctgctcatcgtctacagtgccggctttgcgaccgccgtctattgtctgtcgccggctcccgatctgaagccgggacagctcaacggcaaaggccgtattctggccaaactcaaatctgaagaattcacccagtcgctcaactccgggatgcacaaggcgatcgcgttcgggaaggaagccgcgacaaaggccgccgagatgatccgcgagaagatcgacgaagcccaggccaagtccaagggctgaacactcccgacaagaaatctcgccgaggaaaacacacgcgactgcggccaggggggcttagccgcagcccaggggggaatcgcaagtgtccgtaggccgcgggtccgaacgacccgcggcctgcacgcaccatccgagcccatcgaaagccctgcacctcctttgtccgaacccttatcaccgcggttcgcagcctgcgggataggcctcgtccgtgcggcatctgccgggtgcggcagtctcaacgcctggtcgcgaacgagatcaagcagcgggcctcggggacagggggacaaaaggctggcgaccatacgctggaatgctatgataagaccctttcgagtctggcgtaaggggtcgatggatgaagcaggggtatggtctgatcttcgatgtcgatgggctgatcgccgataccgagccgctgaatgcgcgggtgaccatccgcgtcctggcggagatgttcgggcttgcgggcgtgcggccggaggatttcgccgcagggtacggcaaaggggcggaggcgttcgtcaaggccggcgccagggttcatggcctggagctgagcgacgagcaggcccatgccggggccgagctgcgcgagcggtacctgaccgaggcggtgcgggcggaagggctgccggcctttccgggcgttctggacctgatccatgcggccctgacggaggacgacttccggctggccatcgccacgtcggcgacccgcgagctttccgaggcgattcttgatgcagtcaaggtgccgcaccagaagatggtttacgtcagcggcagcgaggtcaccaggaagaagcccgatccgcagatcttcctgatcgccattcggcgtctgggcatcgaggcggcccgctgcatcgtgttcgaggatgctcccagcggcgtgcaggccgcccgggccgccggcgcccgttgcgtcgccgtgaccaacaccgtacccgccgcagagctggccgacgcagatcgaatctgcgattcactcgaagagatcgatctgaactcgcttcgcgaacttgtggactgacctgacatggtggcaggacgccgggcatatccaatctgtgcgatgctccttctgctggcttcgagcagggcggccgcggcgtccgcttcgttggacgtattgctcgaaccgatccgcgaggcgaacaggctgccggccctggcggcggcggtggtgaaaggtcgcgacacggttgccgtcggcgcggtcggtcttcgcaaggcggactcgcccgagcgtgtgacggccgacgacaaatggcacatcggctcgtgcaccaagtcgatgaccgcgacgctggccgccatgctcgtcgaggacggcacgctgcgatgggacatgacgctggccgagatgttccccgaactggaatcgcagatgcaggccgagtggcgggatgtgaccttggagcagcttctggctcaccggggcggcgccccccacgagttggacgagagcggcttgtggggtcggctctggcagcgcgccgaccggccgccgcgtgcgcagcgcgagtacctcgcgcgtgaactgctgacaaagcacaagcccgtcgcgcctcccggcacgaagtacatctattcgaatgccggctatgccctcatcggtcacgccatcgaagaggcgctggatcgtccgtgggaagaggtgctgcgggagcggctctttgcgccccttggcatgacctcggcggggttcggcgcgcccgcgaacgttggcaaggtggaccagccctggggacacaaggccggcgaagacggggctttcgagccggttgcgccgggcctgcacgcggacaatccggccgcaatcggcccgggcgggacggtgcattgcagcatcgccgacttcgccagatacgcggcgtggcaactggcgggtgcccgaggcgaaggtacatggctgcatcccgagacattcgagagactgcacgtgccgtttgcctccgacagcgaatacgccttcggatgggtcgcgacgtcgcgttcctggggcggtggcaccgtcctgacgcacgccggctccaacacgatgttctacgccgtcatctggatcgcgccgaagaaggacttcgccgtcgttgtctgcaccaatgccggcggtcccgtcgccgaaaaagccaccgacaccacggccgctaccctcatccgcgaatacctgtcgcaggactgaccgtgccacgtgccaacaacagggctgtgtgttggcacgtggcacgccctcgcctttgcggacatgcgagaggcccggttcgcagtggcgttgtcagatgctgtggtcttcctgctcgtacgagcatactacgagggggccaggtcgatgaccgtggcgtcggggcaaaaggctggctcttctctaccccaggaggtatactgccctctcggatatggttcttgcagaggcaaagaggctgcggtccacctgctcaggaagaacgagcagtggcaccggcggctggcttggaggccgtgaatgctctgttttgtgtgggacccgaacaaggcgaagcagaatgttgaactccatgacatctcttttgatgaggccagcacggcctttcgagatcccctgtccctggtgatctatgatccgctgcattccgaagaggaggacaggttcgtcttgatcggaaactctcacaaggatcgtcttctggtcgttgttcacaccgatcggggcgaccacgtccggctgatcagcgcacggaaggcatccaagaaagaaagagcgcaatatgaagagaacgcaagaagatccggacatgcttgaagagtatgatttcagcaaaggtgtccagggcaagtacgcacaacgctatgccgaaggaacgaatgtcgtggtcatcgaccccgatgtggcggaggttttcccggaccatgattcggtgaaccaggccttgaggtcactggcggaaatcatccgaaggcagaagaggccggcgtgaccatgccttacaccggaccggtgcggggaagggtcgaaccgatgaaagtgtatgacgacgcttgcggacatgcgagaggccctgttcgcagcggcgttgtcagacgctgtggccttcctgctctcacgagcatactacgagcaggtctcgtttcacccccgccggcaagtcagtaatcgcgtcgcccaatcgcttgatcccgacggccccaattgctaccatacaagcatgaagatcgtcagcgggaaggtaattgaaggcaggatcgttgtcgaaggtgggccgctggaccccatgggcgaagccggccgagcgagacgatggccggtggtgaactcttgaacaggctatcgtcgtgcccgaaccttagggtggtctaatgcctgttgtattcagatataaggggttcaggttcttcttttactcgaacgagggcgatccgttggagccattgcacgtccacgtgcgaaaggcggagcgcgtcgcgaagttctggttggagccggagcccggggttgcccgtgcttacggattgactgcgggtgaactgcgcgagctgctgggcgttgccgtggagaaccgtgaattgattcggaggtactggaatgagcactttggtgtctaatgctctggcaaaacaggtcaggttcgaggacgacaccatgtgggtcgattttgccgacgggcgtacactggggattccgcttgcgtattttccgcgtctgctcaacgcgtcgccctcggaacggatgaaatatgtggtgagcggcgggggaacgggtcttcattgggacgatctcgatgaagatatctcggttcctgccctgctccttggcgtcggcgacagaacccggcgctcgtagtgtgctcgtacgagcatactacgagggggccaggtcgataacggtggcgtcgggcaggtggcgggtgatgatctcggcggcgaggttggtccagtggccgcaggcgtcgaggacgacgctgtcggtggtgacgacgatggggggccgtggacggttctcggtcgtcagttggcagttgtcggttggcggctggccgtgggctggggacggagaactgtcaactgtccactgaccacgcagttccgcgtcggggttcagcgacaggcggacggtccagggccagtggcgctcttgggccaggtcggtgaggagcgttttgagacggccgctgttggagacggggctgtcgagcagccaccgggcctccgcgatgccgatctcggccagaaacgcgccgatccgagcgagggcagggactgtttcttcgaccttgcggtacgtcccgtgaatgctggccaggtcacggaagcagccatcccggccgcggaagatcaggcctccgctgagggccgcctcgatcgtgatcagcaggttgtacccatcgatggccagggtccggccgggcagcgcgccgatcgcgacgcgacgcgccagccgcgactgcctctgcgcatcggagcaggccgaccgcatcaccgccagccgctgcctctgcgtcaggccaaagcggtcgcccacgagcttcagggcgctcttgtccgcgtagcccttgctcagcagcagggaaaagtcggccagcgcctcgcgcagcgccggcagcttgtcggccgcaaacagcgcggcgtcggccggatgccgccctcgatgttctcgtttgtcaggcactttgggatttacgattcacgatttacaatttactatctgcctcgtgcgtctcaaacgcgactcaatcgtaaatcagaaatccagaatcgtaaatccgaatgtccagtcacaacctgtcagagatacaactcggcgatctcacggtcctcggctactcggtggccggcgaggagacggtgatcgccgtgccccagctcgatgtgtgcttcgacgtgggcaaggcgccggaccagatcatccccatcggccacgtcctgctgacgcacgggcatatggaccatgcggcggggttcgcctattacctctcgcagcgcaacttctgcgggatggcgcccggcacggtcctggcgccggccaacctgatccgcacgatgcaggagatcctcgactcctggggccggctcgacggcaaccgcatccccgcccggctcgtcggcgtgcggccgggcgatgaatacgccatcaagcccaacctcttcgcccgggcctttcccacccggcacaccgccggctcggtgggcttcaccatcctggagaagcgcaagaagctcaaacccgaatacgtcggactgaccgggccccagattgtcgcgctcaagaagcaggggatcgccatcgacaatcccgtggagatccccctcgtcacctacctgggcgacacgcagtacgtcgatttcgcccggctcgactacgtcgtccacagccgcgtcctgatcgccgagtgcacgttctacgaggacgagcacatcggccgggccaacgccgggcggcatatgcacgtcgacgagctcgccggcctgctcggccgcctcgacaacgaacacgtcatcctctcccacctgacggcccgcacgcccatgggcgaggtccgccggatgctccagaagacgttgccgcccgcgattcacgacaaggtcctcatcctgatggaccgcaagtaccgccgcccgtagggacgccggcggagggggaagggacgcgggggagcgaatccgcaatcggaaatcggcaattatttgttttccatcgggcctcataacctccgctgtgtgtttggtttaagtggctgggcacaaaaaagatcaccaaatatacaacaaaaggctggacaggtattggtctgcccatacaatgaagccacgatatggtgattagacaataccgcacagcggcgggtacgatccggacgcggcggggcggcggtgtggccgcccgggcgggtcggacccggttgggagacagcatatgacgacgagactggacccgaggcaggccaacgcccggcgcgagctgtatcacctggagaaccgcctgcggcaggggccggccagggcttcgggtcgggcggacggctggtggcaggccgcgtcgttcgaggcggcacacgaggcggtggaggacctggaacggcagtatggccgccggtcgcagcagtgggcgtacttcgacgccgccggcgatccggtgggcctgatcctgcggtgggaccgggcggtgggcaaagagattcggccggtccatcgcgggccggatggacgctggcggatcggcggaatgcctctgccgcgtcccctgtacaatctgccggctttgctggcccggacggatgagacggtctacgtggccgagggcgagaaggcggccgatgccgccggctggctggggctgctgggcacgaccagtccgcacggcagccacagcgccgccaaggccgactggcgtcctctggccggacgcgacgtcgtgctgctgccggacaacgacgaggccggccgccgctacgtgcagaccgtcgcggagatcctgcaaagtctcgatccaccggcccgcgtgcggatcgtcgagctgcccggcctggagcccaagggcgatctgttcgactgggtccacgccggtgggggcatggaggaacgacagaacacgctggcggccctggtcgaggcggcggaagtttgcggcgcgcccgttgcggattgcggattgcggattgccgattgcggattcaactccacgcgtcaatccgaaatccgacatccgacatccgcaatctccgctcggagcgtgccgatccttcagtgcttcgccgacgtggtgccgacgtcggtgcggtggctgtggccgggacggatcgccatgggccgcctgacgctgctggtgggccggccgggcgaaggcaagagcttcctgacgaccgatctggcggcgcgggtctcgacgggccgaccctggcccgacggcagcgagggcgtcagcggctcggtgatcttcatctgcgccgaggacgacccgtccgacacgctgcggccgcgtctggatgcccacggggcggatgtgcgtcgcacgcatctgctgtcgatggtccgcaagaccacagccgagggtcgcacctacgacgcggcgttcactctgaacgacatcgagccgctggagcggtgtctccagatgcacccggactgccggctggtcgtggtggacccgatcggctcgtacctgggcagcgggactgactcctaccgcgacagcgacgtgcggctgctgctggacccggtggcccgggtggcggacctgtacggtccggcggtcctgctcgtggcccaccgacgcaagaacgctgccgtcgcccacgccgacgacctggccctgggcagccgggccttcaccggcgtggcccgctccgtctggcatctgatccgggacccgaagaaccgcgaccggcgcctgctgctgcccggcaagaacaacctggccgccgagggtcagggcttggccttcatcatcgccggcgacccaccggccgtctgctggcagaccgaggcggtcgacatgaccgccaccgatgccctcgccgccgaaaccgccgccggcgagagcaacgccgaccgaaccgttcgaaaggaagccgccgcctggctgcgggcgctgctggccgacggccccatggcggccgccgaagtccgtcggcaggccgaggacgccggcttcacctggcggaccgtccagcgggcaagggccgatcttcatgtctcttcgattcgcgacgctgcggaaggtcgccaccggtggcatctgcccgacacgaagggtgacaaaggctgacaagggcctgcgtcgttggcacgctgtcatgctgtcacgcggtcacgcgcgccggcagtgaaggcctatgtggttattgtgcatattgtcacattacaggatcttcctgcatctgtgtttctgtgtgttctttggcaaggtccgggcagactctgatgggcacactatgaggaacggcggacctgcccccgagcgtgccaagtgccaagcgacagacacacaggcacgctgtcacgctgtcacgcgggtcgatgcgggcagggcgtcacttgggcggcaggggcgatccgccggtggcgggacgattcgccgttggggacgggccgctcagtggagccggcggaggcgggcgttgacggctttgaggtcgaaggcctcggggtcgtaacggccggcccattcgagcagttcggccagttgcggatcatccgggtgtttccttgcttcgaggatgtcgctgtagccccagggcccgccgcaatcctcgggcggacaggcccgttcgcccgccagacagatgggatacttgccgccggcctcgggttcgaggatcttctccaccgtcagcgtgtgacgccagtcgtcgccgaaatcgtagatgtagcggagcttggccttcggacgcgtgacgacgtcgcagagcctcacctcggtgtcgccggcggtcatctccatatcgaattcctcgttgaccgagggcgcataccggccgctgccgatccgaaactcgtgcagatggcagttctcccagcccatcaccacctggatgacgtcgtgcaggtcggccagggtgatcgcgccggggacctgcacgcgccgccagatgggcgggcgaatgtcgtcgagcgtgatcttgatttgatagattctctgttcactcatcgtgtgcctttgacctccttcttgatccgctggatgtggccccgaccgagggccttgacctcgcagccgagctcgaagtaccgacggatccgcgcgtcgtcgagaatgccgaagcagtcgatcaccgccagcggttcgcccgcccagccgaccacctgatcggggtcgagcttcaggtacgcctcatgcgggaccgccaggatcagggcctcggcccccgcgatcgccctggccaggtccttctggacgacggtgtgtgtcaggtgctcctggttgcggaagaagcgggcccaggactgtcccggcgccgggtaggtgtcctgcgactccagctcgtaccagtgctcgacgtagggatcgtgcacgcggatgtcggcgcccatctcggccagcttgcgcgcgaccatctcgctgccgctgtagcgggtgtcgccgacgtcctggcgatagctggcgccgcagagcaggacctcggcgccggcgatgtagcggcccatgttccgcagggcgtcgcgggtcaactgcgccacgtgcagtccgcgggtgtcgttgatgtcgatcgcggtgggagtgagtttgaaaacctgctcgccgtcctcgaagccgaggatatgcttgtaggcccagtagcccaggccaccgtccttgggcaggcagtagccgccgatgcccgggccggggaagatcatgttgttgtgcgtcggacgcatccggatggcgtggatgaccttgatgaggtccacgccgttgcgctcggcgaacaggctccactcgttcaggaacgccaggatcgtggcgcggtaggagttctcgacgatcttggtggtctcggactcgatggggcgatccatcacggtcagcgggaactgctcggtgttgaggacctcgcggaggaatttctcgacgcgggcgcgggcctcggcgttgcagcccgcgcagacgcgccagaagtcgcggatcgacgagacgtagtgccgccccggcatgacgcgttcgaagctgtgcgccagcagcggctccgagtgaattcctcgtgtggcgaacgcctttttcatgatcggccaggcgacgaactcggtggtgcccggggcgacggtcgtctcgatgagcaccagacagtgcggccggaccttctcgccgatcgtccgcatggtcgcctccagggcgctcatctcggcctggccgttgcgcatgtttcccagctcgtgcttggtgtagtcgcactggacgtccacgaccacgcagtcggccagcgtcagacattcgctgttgtacgtggcgaccagggtcttcttgtcgaggacacagcgggcgatcatcgggtccacctcggggtcctcggccttgacgggggactggccgcgattgagcagggggatcttccagtagctgcgcgggctgggacgctggcagccgatgacgaacttgttcggtcggccggtctgcttgtccaccgtgtcggcgatgatggcggccatcaccgcaccgacgaagccgacgcccatgaccacgacgacttccttgccttcggttcgggcggcctcggcgagggcccggaggcgctcgaattccccggcgtactgctcgggcgtcggcagttcgaacttctccccggtcggacttgcagaatactgactcatgttcgagttcctctcaaagtcaccaatccctggctgcatggccgttgacccggacgagcgtcaggatctgcacatcggcggcacacatgacatgagcttagtcattaacccacgcaaggcaaggtttttccgcccgttcggccaccccgccggcgtccgcacagggcggcatgggttttgcgtcacagaggcgaaactggtataatgccagggtggcaagtcgccacatggtccggcggtccggccgggcacggatcagggtaaaatgggagatcgcctcatgcgaacggcagggtggttcgctgcctggacggtgttgctctgtgggctgggggcgccggccgccggtgccgcggatctggagtatccgtgcgccctgcgcgatgcctatgacgcggatgacagttgctgggtcggcatgagcctcagcggagagtatcccgtcccggtcatacccgaacagtggctggtggggcctccaccgtccgagatgtcggcggtcacgatgccgacggatcactgggtggaactgctgtaccgtggccggatcgtggatgccgacggcaacgatgtcctgatccgggagtggggcaaggccggcgaagagacaatcgtgtttctcaccgacggggccgaccaggagttccccatcgccttggcgaaggcggacctggcgatgcaggcggtcagctacatctacctcgacctgccggacgtgttcacgccgtttgcccctcgcggattgcgtctggtggcggtggacagcggagggggggccccgggtttcgatgtggcgtcggtgcaggcccgtgtcctgcgggcgtgcggttcgcgggccgacgaccctgtcccgatcgacggcgccgcgaacgtggcacgcgacgtgacgttggcctggacgcctgcgtgcgatgcgatcgaccagagcctgtacctgggcgacagccgccggctggtcgaatcggccgatccatcggtccggctcgcgcttcttccgtccgatgtcaactgcttcgagcccaacggactggcgctgaacacgacctactattggcgcgtggatgccaacggggccggaaccggcgaagtctggtccttcactaccgtggaccatatcgtgatcgaagacttcgactcctatggcatctccggcggttatctctacgagacctggcacacacgcggcaaggcccgcgtcggagaagagtcgtttcaggcccgacgcagttgccctcagtgcatgcggtttgcctactactatgacaacgttcatctctccgagacgtatcgcgatttgtgtccggcgcaggactggacgcaggccggggcccagagcctcgcgttctggctgtacgggatgccgggcaacgatatgcagggccggatgtacgccgtgttgagtgacgggactgccgatagtcgggtgacctacgacggcgacaagggaatcctcacgagcccggagtggaatatctggagaatcccgctggcggatttcaacggagtggacctcagcgcggtctgccgtctgacgctgggattcgtcttcccctccgctcagtcgggtcagtacggcagcggaaccatctatgtggacgacatctgcctctattcctcgctgtgccttgaggagcaccgttcggcggccgacctgacggcggactgccgcgttgactaccgcgacctggggcagatggcgacgcagtggctccaggcacgcggcccggtcgtggatgtggtcgcgccgggcgagccggtgctgtggtatgcattcgacggcaacacccaagacagcgccggacggacgcagggactgatccaggggcgtccgacgttcgagatcggcgtgcacggacgcgccattcacatggtcaaccggggtgacgcagtggtggtttccaacgcatcggccgtgttcgaggggattcgggaagcgatcacgatcgcgttctggcagcggggcgacgattcgggccatcgcaacgatacgttgtgctgctccgactacgcctacggccaaaccaacccgtcgattgccgtgcacctgggctgctggagggacgcggggcagtatcggtgggattgcggcacgccgtggtcgtttgccaaccgtctggcgggtcgtcaccattgccggtacgaatggaccggacgctggaaccactgggccttcaccaaggatactgcggccgggccgggtggcaaaggcctgatgtgcgtgtacctcaacggcgttctctacgacagccgctcggggaccagctcgccgatcgaacggatcaaatcgttccagatcgggtcgggatggtatggccactatgacggcctgatcgacgacttccagatctacgactacgctttgtccgaggcggaggtcgcctatctggccagtgacgggacgggccggctgccctgggattccggtctggctgctgatctggacggcagctcgaacgtggacttcggcgactttgcgatcctggccgacgagtggctcgaaagccagctctggccgtagcggcctaacgtggctgcggcttggatcgaaggtcgcgcgacgtggccagggcgatgacacgcccctggtcgccgacggcgcagtagaagtggtagacgactccttcgtgcttgagaagccagggtttgtgggcgtaggtctggtcgtacggctcggagggcgccaccaggtcgggcccgtcccacctggtccagtgcaccagatcgtaggagccggcgaacgtgtcgaaggccttgggtcgccagaacgctccgaaatagaacatcacccagacgtcgcccatccgcaccacctgcggatcgcccgagatgccggttccgttgtcgatcaccggttcggtgccgtagcgcagccatcggcgcatgtcatgggagaccgccatgccgatccgctcgggactgccctgggccttgccgttgtagaacatcacgaacgggtagccgagcgtctgctctctgtcgtggatgatgttgctcttgtactgcgtcaggctctcccagggccgcacgtccgcttggtcgcgtgacagcaccggcttgtcgaggcgatgccacggaaccggccgggtcggctcctgcgtccaggcgatgccgatcgccagcgggtcggtctcgtagcccttcagcgcgccgccgaggtacgacatccagtatctgccgtcgtaacgttccagctcatacgagcctgcccacgtcgtatcctggagggcgacgtagccggccgcctgcaccgcgtcccacccctcgttgcggaacggcagaatccggcccagcggccgccagttcagcaggtcgttgctgtcggcgatcgccgtctcgtacccgttgccgtcgaagaggatgtagatcatgtaccatttcgcgtcgcagcgaaagacgctggggcagtcgagcttcttgccgtcttcgtccctgaggattacgccgtacttgaacggcgtcctggcctcctcgtagatgcgctgcatgaccgtcgcttccaccgtctttcgcgttgatagggccggcacgattcgtcgctccacgccggcgctgccggtggtttgcagaaaggtgacggtggcaaagaccatcgctgtcatcgctgtcatacatggttctccatccactcgggcggcatcgcaccacagagtctgcgatcgtgcaaagcaggataccatgtcgcgacgctggccgcaacgtcgggagaaccagactcatctgacataatctcccgcggccgacgcgaatccatgaaccgctgccgcgtctgcggtcgtatggagtcagaggcatgcagcatcggctgcatgcgacatgaagaatgactatccaggttttgctggaggataaggcaatggaagccaagaagaccattctcgtcatcggcgcgacgggtgcccagggtggcagcgtcgctcgccatttgttggccggcaacacgttcaaggttcgcggtctgacccggcatccggattccgagaaggcgaacgcattgcggcaggcaggcgcagaagtcgtcccgggcgacctcgaagacgccgggagcatccgagcggccctgaagggctgttacggctgcttcggtgtgaccagtttctgggagcacttcgagaaggagtacggccagggcaggaacctggtcgatgcggtccggcggtccggcgtcgagcatttcgtgttcagcacgctgccccactgcaagaagatcagcggaggaaaactcgaagtgccgcacttcgacatgaaggcgcagctcgaggagtacacacgccgtctgggtctgaaggccacgttcgtccacgtggcgttctactacgagaatttcctggcgtttttgccgccgcacgagcaggaggacggctccttcgccttcggattcccccaggcagacactccgctggccgccgtcgcggtcgaggacgtcggcagtatcgtctcgatcctcttcgagaggccacaggactatctgggcaaggtggtcggcatcgtcggcgacgacctgacgggcgatcaatacgcggaggcgatgacgcgcatcctgggaaccagggtcgtttatcaccatgtgcctcgcgaggagttcgccgcgttggggttccccggagccgaggacctggccaacatgttcgagttcaaccgcttttacattcccaaccgacgggcggatgtggagatgtgccgggccctgaacccgaagatgcagacgttcgagacctggctccggtcgaacaagggagccttcgtgaggctcttcgaacgggagcacgcccgcctgcactgataccgaccggtgtgcgcgtggggaacccgacggacgaacctactccatgtggataacgttgcgggtgcggtccgcttcgagtccggcttccttgatgacgtcgtacaggtcgcgacagccatgcaccttgacgaagtcgaagtggggatccgattcgtcctttgtggtcagttgaaccgtgccgatgccgagcaggcactcccagagggagcggcgcagcttcaggtcgattacgcggaacatgtcgatattatcgacgcggcggtcgaagaccccgcgcgaccattcgatccggtccggcgtgacctcgtagtagatgctcttcaggacgatcgccttccagagcagcaccagcagagccccggcgatgcaggccagcgcgccgaggtcgatccaggcctcgacctgagtcaatcgctgggccgggatctccaccttcggcaggtaggcgtccacgtatgcgaccacctgggccacacggtacttcaggaccgcccagcagagggcgaccagaatacccatcttgatggcagtgcccgtgagggcaaacacactcggacggccgtaccagagaacgtcgtcgtcctgctccggcgtgtctgaactatcctcatcctcttcgggatcgggatccgaatcggttgcgcccagcctcatgcgggtctcggcgcgcttgccttcgaggaactcaccgcagaagcgacacttgatcgcctcgtaacgaatctcttcggcacaatagggacaaggtttcgtgcggtgccggagccgctgggtcagatgggtcggttccgctggtcttggcataactgaagcaccctggactgtatcattccgtcgaacctgattcgccaccgcctgcggccatcaccgggcggcgttccatacacttatcggccagattggacggatcggaccagtgcaccagacggcccggaagcattttgggttatcgggcgttgcatggcgtcaggtcggcggggggactttggcgagcagctcctcttccggcatgatacagcgcagcggatttccgatgtattcctcgatggccgggatcgtgaacgactcgtcctcgcaggcgaacgaaatggaggtcccggccacgccggcccggcccgtccgcccgatgcgatgcacgtaatcctccggctcgtaggggaactcgtagttgaccaccaggccgatgtccttgacatgcaggccccgtccggcgacgtccgtggccacgaccaccttcaccgtgcccgtgcggaagtcttcgaggatacgcagccgcttgttctggggcaccgccccggagagcagctcgcacgcgatgccgtgcttcttcagtttgttggccagggcctgggtgtgatcccgacgattgcagaagatcagcgtgcgatcgtcgccccgcttcttgaggatgttgtagagcagcttgaacttgtctcgcgacgtgacgatgtacacgatctggttgaccgtctcgacggccacgtgttcgggctcgacttcgcagatcaccgggtcgggcatccactgcgatgccaagcgcaaaacatcctccgtcagggtggcgctgaagagcatcgtgcggcggtggttcttcggcggtgtctcgcggatgatgcgtttgacttcggggatgaagcccatgtccagcatccggtcggcctcgtcgatgaccaggatctcgacgtctttgagtttgatgctgcctcgcttgacgaagtcgagcaggcgtccgggggtagcgacaatcagatcgacgggccccttgtcaagccgtcgttgctgccgcttgacctccaaccctccgtagatggccaggcagttgaaatggcagtatttgccgaggtcctgggcgtccttgacgatctggatggcgagctcgcgcgtgggggccagcaccagggcgcgcggcgatccaagcggtcgttcaccgtggctgggttcctggaggaaccggctgaagatcgtgatgaggaacgcggcggtctttccggttccggtctgggcccggccggagatgttctgtccggcgtgtgcgtggatcaggactttggcctggatcggcgtgcaatactggaatcccagatcggcgatcgcatgcatgatcgggtccggcagccccaggtcgtggaaccgcacctgtcccggcttctcggggacctggaactgatcgagactccacgacggtttctttctgccgcctcgtcgtcggcgggaccgtttcgcgcggggtttggtgtcgggtggcggaggcgtcgccgcgtcgttgatgcacggctcgcccgatggcggtgcctcttcgaccaattcggtcgacggtgacgagtctgtcgaggttgtcttattgtgtggttctgtcatggccagcattgaactatagaaacgccgcaaaagcgagaggaaaacccgaccggaaacgaccgccgttcgcgagcaggagatcgtgccctcggcggttcgttccgttggggtggtcggtcgtctatgcagagtggggcctcgcgttcctgcgacggcgccaggccggccctctcttggcatggaccgctgtcggccgggaagcgacgaatgctctggtgcggtggtctgacgaggggctcttctttggctgctccggcaccggttccgcggggacacaggcaaaccccggacactcttgcgggcggaagcgtcgcccggtgaacttctcgatctgtcggaggtacttcttttcgtcctgtgagacgaacgtgatcgcgtccccggtggcgctggcgcgcccggtgcgcccgatccggtggatataatcttccgcgaacgccgggacatcgaaattgacgacgtgcgagatgccggcaacgtcgatgccgcgggcggcgatgtctgtggccaccatgacctggtacttgccgctcttgaagccgtcgagggcccgttgccgctgaccttggctgcgtcccgagtggatcgcgaccgagacgatgccggatcgctccagccggcgcgtgatcttgtcggccccgtgcttggttcgcgagaagaccagcacactgtacatggagcggttcttcagcatgtgcagcagaaggtcgatcttctgtgatttctcgacgggatagacgtgctgcgtgacggtctggaccggattgtgcgggcggccgatctgaatcatcctcggcgacttttgcatgccggccgacaaccccgtgatttcggggctgatcgtggccgagaagagcatcgtctgccgcttggtgggcagggcgtcgacgatccttcgcacgtcccggatgaagcccatatccagcatgcgatcggcctcgtcgaggacgagcacctcgatcgcttcgaagcggatcgagcctcgctgcatgtggtcgagcagccggcccggcgtcgagacgacgatgtcgacaccgcgtcgcagggcgcgcagttggttctcgatgctgacgccaccgtagatggcgagcgatttcagatggaggaaccggccgtagcagaggatcgattgttcgacttgcaccgccagctcgcgcgtcggtgtcaggatcagcgacctgacccctttcttgtgtcggtttctcccgtgagcgagccggttcaggatcggcaggacgaacgcggccgtcttgccggtcccggtttgggcgcagccgatgagatcatggccttcgagtgcgaccgggatcgcctgggattggatttctgtgggtgtggtgtagccggtggcaagaatcccttgcaccagcgggtcggaaagaccaaacgtcttgaatggcatgagacaatcctgaaagtaggacggacgtaccagcgtccggcctggtgacaaaaatgacagtccccgggggatggcacggccaaccctccgtgggacgacaggtgtggagtgaggttctgacgcggtgtagcgaacggcgtgagactccactaagaaccctaccgatgcccgccggactgacagaccttatcaacataaggtccgttctggcggcatactcggctctccggcgtggcagcgccacggccgggggctatcgcactggaccggagatccttacttccggaccggctgctggttcttctcacgacgtcggttaatgatttcttcggccaggcgtgtcgggacctgggcataacggcacatttccatcgagaacgtcgccatgccccggctcaggcctcgtacgatggtggcatagccaaacatattggccaacggcacctcggcccggatcacggtatacgtgtcccgcaccgtggtttccatgatgattccgcggcggctgttgagatcgcccacgatcgggccctggaactcggtcggtgtctcgacctccacggtcatgatcggttcctgcaggcacggtctggaccgtttgaaggcctcgatgaaggcgtccctggcggcgatgcggaacgccatctcactggaatcgaccgcgtggaaagacccatcgtcgaggcacatcttgcagccgacgatttcgtatccggccagcggccctttcttcattgccgcctggaatcccttgttaacggcggggatgtactcgctgggaatgtgtccggaggtgatattgtcctcgaactcgtacggggcctcagcgtccggccccagcgggatcagtcggccgacgacgtgggcatactggcccgacccgccggtctgtttcttgtggcgatagttgaactcggccgcgacggtgggcgcttcccggtagctgacgttcggggcaccgaccgttacattggccttgtactcccgccgcatccgctcgacgtagatgtccagatggagttcgcccattccggcgatgaccgtctcgcccgtctccgggtccgtcgagacgcgaaacgtcgggtcttctttcatgaaccggctcagcgccttggccatgcgctcctggtcggccgaggtgaccggcgtgatggacaggctgatgaccgggtcggctatgaagatgctctcgagcgagtaattgattccttccccgcacagggtatcgccgctggcgcactcgaccgccagcaacgcgatgatgtcgcccggaccggcgtcattgatgtcggtccggtcgttcgcatgcatccgcacgatgcgccccacgcgcagcacgcggttggtgcgggcattgcggtactgctggcccttgacgatccggccctggtacacgcggacgtagctcagttgcccgaacgattcatcggtgatcttgaagaccatggccaccagcggggcgtccggatcgctggccaggggggtttccgtccctgcgttgtcgtggtcgcgcgcgaaataggagcgatccatcgggctgggcaggaagtcgcagacggcatccatcagcggctggacccctttgttcttgaaggccgagcccatcatcatcgggacgatgtcgcggttgatcgtggcttcgcgaataactcggcgaatcaggctctcttcgaccggctggtcttccagcagcatctccatcaggccatcgttgtacatgctcagtgcttcgagcatcgcgtggcgggccttgctggcagcgtcctcgtacgcggtcgggatcggactgcggataaccttctcgccgtccttgccttcgaagcggattgcctgcatggtcaccaggtcgatgacccctgtaaagctgtcgccgcagcccatgggcaattggatcggcacgacattcaacccgagcttctctgtcatttcctgccggacacgatcgggatcggcgcccgtccggtccatcttgttgacgaacgcgattcgcggcacgcggtagcgtttcatttgctgatcgacggtgatcgactgactttgaacgccgccgacggcgcacaggaccatgattgccccgtccaggacgcgcagcgaccgctcgacctcgacggtgaagtccacgtgccccggcgtgtcgatcagattgatgctcatgtttctccaggccacctgcgtcgccgccgaggtgatggtaatccctcgctctctttcgaggtccatgaaatccattgttgctccgccctccccggcgtggacctcctgcatgcggtgaatacgcccggcataaaacagaatgcgctcgctcaaggtcgtcttgcccgagtcgatgtgcgccgaaatcccaatgttccgaatcctgctgatcttttccatctgtttccgaaaccactctctgacaaaccacaatcaatcgcccgccttatcggcaggaggagctataaatccgtcctgtcgctggtgattcttcgcccttgccaccgttttctgggttgcatcgaccggcgggtacctaccctccctctcagcagagcgaagaatccaacagtttacccgatggattacgcccaggcaagagaaatgtgccgcttcaggagaaaaaatacacccgatcggtcgggtcttgccggccggaacgaagaaacgggtggaaacgcgcaggttccgggacaggacgggctggccgcatgccgggccccggaggagggccgacgagttgcgcgtgcccgaacccggctggtcccaaggcgtccgtcgccctcaagacttcactgttttgtcaactgaggtctccgggcgcgacggcggctcatgccggccttttctgtgacccgcacctcgtcctgcgacctacacaatggctggggttccgccacgcgacgataccccaaggccttgatgacttcgaggacttctgtccaggtcgggaatggccgtgcattggcccgcttgtattcgtcgattgccatcacgaactcgaattgttcgtccgacatctggccttcctcggcggccttgcgatcctcgctgcggcgccggccgggcccgcggcgccgatccagtcccagccgccggtccaccacattctgccggcgttccactccgctacgccgctccacgaagtccgggctggtggtgtccgcttccgtttgccgtctgtcgtcgctgcggcgctcacatcgcccttctcggcaaccgcatttgtccgtgtgtttcttgtctgcctctgccataggggatcggccttctctcttgtacgattgctccgcgtctgctgccacccggacggggagaccgctggttacattcccgggatacgccttcgcacgagtcaatcagaactcgtcgtccagcagatcggcgtcgaaatcgacttcttcctcgtcctccatcgcatagtcgtagaagtcatcatacgcatcctgcgactcgatcacgacgtgggcctcgtccaggaaatcctcgggcaccatgagggctacccctttgtgctcgccactcgggtcgagctgctccttgattgtggcggggatgtcgttgagcttcaggagggtctggtactccttggcctgatcgatatcgctcaggagggtgaccaccaccaggtctttgagttttgcctgcccgttgtttttcttgtccatcggctttttcatcttcgcgctccgtaagagaaccacgtgcttttcaccatccaggagtccgctgttgcaggcccacgggccgaaacgggcgacatggtaccctctctcctggttcgtcttcgcctggatcgcgggcagcgacggccacaaagcacacctgccggcgccaagctcaatggagcctatcggcctcagagaggaggagatttagggggtttggcgttttttttgttgcattgggacgggtcctgggcgatatgttcgtcaaaccgcgtgcggggccggaggatggggtgccgaagaccgcgcggtttccggttctctcggccagagaggggagggctatggtggttgttggggccaaagagaacgggcggagcacagccacggcgcatgacccgtagtccggtggcgtgaattccgatggcgtttcgggggtaggcttcagggcggcctcgggcggggggcttgaggacgctggggtgcgacgccgggcatacccgagggggggaggtacgagaaggtgccaacagcctataaaattgggggcggcagggcctcaggaacggttttttacaagaattgctgtactcctggaggggtaacagccgatgaatacattgatattcctgtgacgattggaaaattttttgcgcacagggatcaagcgggtggacgccgcggccgatacgttaggcatatataggaaagcgccacaggggcctttcctttcagcggcgttcgccaggcgattgttcggtggaaggcgcaacagcggccagattccatcgagcccgggaaagaagtgaggatttatgggacggaacgaagagggggagcacattcgagttttcatgctgggttgggagttcccgcccttcatcagtggagggctcggcacggcctgctacggtctgacgcgagcgatggatcagctcggtgtgaaggtgacctttgtgcttcccaagatggtcgagagcgaatacgtcacacacgtcaagctcctgtcgccgcgttccctccagacggccgcttcttgccgggcggcggattatgacctgacgaacgtgatcttcaaaacgatcgcctctcccctccaagcgtacgcgaccccggaaagctacgatgcacggctggaagaaagtctgcggcttcgagccgagctgggcgagaagcagacgggcgaagattgggaccacggtggtgactacggcggcgatatgtaccgggagatccagcggtatgccacgatggccgtccgccttgcccggggggaacagttcgacgtgatccacgcccacgactggatgacttatccggccggcgtggcggttgcggcggttaccggcaagcccctggtggtgcatgtgcactcgacggagttcgaccggagcggcgagcacgtcaaccaggtcgtctacgacatcgaacgggagggcatggagcgggctcagaaggtgatcgcggtcagccattacacgcggagcatcgtgatcagtcgctatgggatcagtccggagaaggtcgaggttgtgtacaacggcgtggagcgcaacggctcctggtcggtgggtgagacctgcatcaaacgggaggagaagctggtcctgtttctgggccggatcaccatgcaaaaaggacccgagtactttctgcatgcggccaagaaggtgctggaggtcatggacaacgtcaagttcgtcatggccggctcgggcgacctgatgtatcgctcggtcgagctggcggcgcaactcggaatcgggcataaggtgctgttcaccgggttcctgcgaggtgatgatgtccgtaagatctaccagatggcggatctgtacgtcatgccgtcggtgtcggagcccttcggcatcgcgccgctggaggcgctcgacaacgacgtgcccgtgattatcagcaagcagagcggcgtctccgaagtccttcggcatgccctgaaggtcgatttctgggacgtcaatgagatggccaacaagatcgtggcggtgctgcggtacccgccgctccggatgacgctgcgcaaccacggcaacttcgaggttcgcaagctgcgatggaaggacgccgccagacagtgtgcgagcatctacgagcaactgctcgtcactgcctgacgaaggggatgtcgctcggggaagggcgtcggttaagaaaaggattttcggtatgccttcggtttgtttctacttccaggtccaccagccgatgcggctgcgtcactacacggtgttcgacaacgatccacgctacttcgacgaccacaagaacgccgcgatctgtcgaaaagtcgccaacaagtgctacctgccggccaaccgacttctcctgaagctcatcgagaagtaccagggacgcttccgaatctcctacagtctgacgggcgttctgttggaacagcttcagatgtacagcccggaggtgctcagcacgttccacgcgctggcccggaccggatgtgtcgagttcctggcggaaacgtactaccacagtctgagcttcctctattcccgccatgagtttgtcgagcaggtcaagaagcacgccgacaccatcgaggacctcttcggtcagaggcccaaggtgttccgcaacaccgaactgatctacaacaatgagctggctctcctgatcgaagcgatgggatgcttcgatgccgtcatcacagaaggggccgaccacattctcggctaccgcagtccgaatttcgtctatcgccccacggggtgcaggcacctcaagctgctgctgaagaactactcactcagcgacgacatcgccttccgcttctcgaaccgtcattgggtcgaatggcccctgacggcagcgaagttcagccagtgggtcaacgccgtcaatgggaacggtcatgtggtcaacctgttcatggactacgagaccctgggcgagcaccagtgggaagacaccggcatttttgagttcatgcggcacctgccggaggagattctcaggcatccggacaacaacttcaagacgcccagcgaggtggccgccgcgtacgagccgatcggcgaggtggatgtgcggcatatgatcagttgggccgacaccgaacgggacctgtcggcctggctgggcaaccccatgcaatcgaacgccatccatgagctgtaccgcatcgagaagcaggtcaagcgagccaacgacgagcagatcctcgcggactggcgccgattgcaggtctccgatcatttctattacatgtgcacgaaatacttcagcgatggcgatgtgcacaagtacttcaacccgtacgattcgccctacgattcctacatcaacttcatgaatgtgctggatcatcttcaaaggcgctgtgcccgatcgagcatccaggcggtggccggatcctcgcccgccggcgcagcgaacatgtcggtgaccaactgacgcgggcggacgaacggcgcaggaagatacccgcgaggtccggcatcgaaatcaccagtgcacggggagtattgctgtgttgacgcatccgaaggtcggtgccgacgagatcgtccggctggccatcgaggggaacgagatcacaagcctgctggaccgggaatggctcctgaccaacgagcgtggcagctatgcttcgggcaccgtgatcggttgcaacacgagcggatatcacggtttgctcatcggttcgttgaccccgccggtcaatcgcgtcatggccttgtcgaactgcctggagatcgtcacgtgcggcgggcaggcgtttcatctgtccacgttcgagttctccggcgagccggttctggcggcgtgtccctacctgcgcgaattccgccgggatagcggagcgcacttccgctacgagttcgaatccatcgaactggacaaggcggtctaccttgcgcccgacagcgacacggtcgtggtggaatacgccttcgaaggcctcatggagcctgtggagttcatcgtgcgtcccttcgtgggcctgagagactttcaccacatgcagcagaatgacgtaccgatgcgctgcgagcacctgcagccggggctgctcgtccgccaggatgtaccgggccgtggtgtgctgcggatggactgtccggcgatgcgcttcgaggacgacggccagtggtggttcgatttcagttaccgcgtcaaccggcagcggggccagcaggcgagcgaagacctctggacgcccggcttctggaggggggtcctcgaagaggacggacgcatcgtcttctgggcgcgtctcgacgagcgctatcgtccggaccggccggtgatggtggaggtcgggatggtgaagaaccgatggatggcgcaccagcgggaggttcttcgtgaggcgcgggtttcggacgaggtggaccgcaagctcgtcctggcggccgatcagttcgtcgtcaatcgccgatacggcgacgtcgaggggacgaccatcgtagccggatatccctggtttgccgactgggggcgcgacacgttcatcgccctgcccgggttgctgctggtgacggggcggttcgacgaggcccggtcggtgctgtgtacgtttgcgtccgctgcggatggcggcctgattccgaaccgttttgacgaccgcaatgggccggcccatttcaacagcgtggatgcgtcgctgtggttcatccatgccgcgtttgaatatcttgaagcaacggaggacaagagcaccttcagcgaggaactgctgccggtgattcggtggatcatcgattcctatcagaacggtacacggttcgggatccacaccgacacggacgggttggtccaggcgggcgacaaagatacgcagttgacgtggatggacgccaagtacgacggcgtggcgtttacgccgcgatggggcaaaccggttgaggtcaacgcactgtggcacaacgcactgtgccgcatgcacgagttttgccttcgcgcggacctgatctcggacgccaggcggtacgccaagatggcgcagcaggcgggcgacagcttctgcgagcggttctggaacgaatcggtcggatatctcaacgacacggtgatgcccgacgggcgggtcgatgcgagtcttcgaccgaaccagatcttcgcggtttcgcttccgttcggtccaccgttgagtggggcccgacagaaggcgatcgtcgcggccgtcgagcgggagcttctgacgccgtatgggcttcgcacgctgagccggcgcgatccctgctatcagggccggtatgaggggccgcagcgaaatcgagatgcggcctaccatcaggggacggtctggccctatctgatggggccgttcgtcgaggcgtatctgaaggtcaacgatttcaagccggccgccctccgcagggcgggtgagatgatcgagccgctcctgaggcacctgaccacgaccggctgcctcggcagcgtctccgagatcttcgacggtgacgaaccgcacgagcccaaaggctgtccggcacaggcctggagcgtcggtgaactccttcgaatctatcgtctgctgaagagcaagcggtgctgagagccgatgcggttcacaggctccagggactgcgcatcgggcggcggagcatccggttggcctggtcgtctgcgacgaaccgctccttccgggggtcccagtgcagcttgcgtcccaggcggatggcgatgtcatccaggtgacagatcgtatccgaccggatagcggcctcgatgggactgaccgtcttgcttcacgtccatgtggatcatacggacgccgttggcgtagaggtgttcgacgcgccagaagagcggcgtatcacagagcccatcctcggggatcacgccggtgccttcgatctccagcgggccggtgtcgtccgtgccgttgccccactgggcgatgtcgatgtggtggatgccccaggcgccgctgagacagccgagaccgtaatcgtggatatgcatccagtagccctcgctgccttcggctcgtgaggcggcccgttggaaggaataaggagcccatggggccgggcccagccacatgtcgtaatcgaactgatgcgggtcgggttccggctgggtcggctgattgggcagcgacaggccctgcacggagccgaccacgatggtctgcaatctgccgattctcctgttccgcacgagttcgcaggcgaagcggaagtcccggccggagcgctgctgcgtgccgaactggaagacgacaccgtattcgttcaccgctcggcgcagggcctgggcggcggcaacatgcacatcggccggcttctccagatacatgtccttgccgttccgggcggcctcgatgccgatcaacgcgtgccagtggtcgggtgtcgcgacgcagaccgcgtcgatatcccggcgggccagcagctcgcggaagtcgtggtaggtccgggcatcctggcttccgtaccgctcgtcaatctgccgcttggctttctgacggaatgcctcacggaggtcgcaggccgcgacgacgcgtacgtcttcctggccgaggaaggcgcgaaggtggccgccgcccatgctgccgacgccgatgcagcccatgacgatcttctcgctgggtggggtggcgccttggcttgccaacacgcggcccggtacgaagcaggggaatcccaaggccgcgccgagggcggcgccgctcttgaggaaccggcgacgagggatggtcttcttgacgggcgatcccgggtgaactggaaacgtgcctcctgctgtctttgccgtctttgtcatgtgtcgtcttctttcttgccaaggagaggttcgcacaaagccctcgatgaggggattatagggggccgtcacgtctctggccagcagaaccaccgtgcgaacgattcggcttgggttttggtctgtgcggtggtacactgttacggtggttcgatgccacgacagcttcggattgatggaccgacatccggattcaatgactggagtgtgcagcatgggcagcgacagaaagacatcgaggcgtcggttcgtccaatcggccaccggcgcgattgccgctttcactatcgttcctcgtcatgtgctgggccaggggccgacgccgccgagcgagaagctcaacgtcgcctgtatcggagtcggcggtcgaggcggcgccagcgtcgacgggaccaagggcgagaacatcgtggcgatgtgcgacgtcgacagccggcgggccgtggacgcgttcgcgggttttcccagggcccggaagttccgcgattaccgcacgctgttcgatgagatgggcgaccggatcgatgcggtgaccgttgccacgcccgaccacacgcatgcggtgatcgccatggaagcgattcggcggggcaagcacgtttactgcgagaaacctttggctcattcgattcacgaggtccgcgccctgatggaggcggcgcgcgagcacaaggtggtgacgcagcttggcaatcagggccattcgtatgacacgatccggatgttctgcgagtgggtctgggatggggccatcggcaacgtcacggaggtccacgccgcgtgtggttcggtctacagcgcgattgacgatcttcccagactccaggagagacacgaggtcccggtcgaactggactgggacctgtggctgggacccgcgaagtatcgtccgtatcatccgatgtacgtgccgggcacgtggcggcgctggacgccgttcggctgcggcgtcatcggcgactgggtctgtcacgtggtcgatccggtcttctgggcgctcgatctgggtgctcccaagacggtccaggcccgggccagggattacgaccccaaggctcatggcgacacgttccccaaaggcaccgtcgtggtctatgagttcgaagccaagggcaatcgcggaccggtcaggcttgtctggcacgacggcgtcgagacaatcccgcggccggacgatctggaagccggacgcgaggtgcccggcacaggggcgattgtcatcggggacaaaggcaagatcatgtatggttcacacggagccggcagcctgcgaatcttccccgaggagaagatgagggcatacaagcaaccggccaggacgctgccgcgtgtgaaggaccacttcgtcgactggctcgatgcgatcagggaaggtcggccggccggctcgcatttcgactgcggcgggccgctgacggagatcgcgctgctgggcatcatcgcgacgaagatgctgggcgagaaactcgaatgggacgggccgaacatgcgcttcgtcaattccgacgaggcgaatcggcatctccgtcctccctatcgtgatggctggacgctgtgagtgactgaggtggggagccgtgactgtcggtcgggtgtcccgctctgtcatggtgagcgcagcgaaccatctggcctgcgcatgcggggtctgcatcatagcgaagccgacatctcggtcgagagccagatccttccgctgcgcgtcaggatgacagaatgcgcggggtgacccgatgcgcatcgggattcctacgaacggcgacgcaggtcgtcggcgatcaggcagccttcgcaggggcagaaggcacgcaggttcgcctcggccgtgccgggcgggacttcgcagccgggctggaggatgaatctcgcgcctgccgagccgatgcatttgcgggccgcacaggcgacgtcttcgggcgtgccctgaagcaacacggcgctcgggtcgaaattgccggccagcgtgacatcgggaccgaccgcttcgcgtgccgcggccagcgagaccatccaatccacgtcgatgatgtcggcgccggtccgagccatcagggcgatgttgttggcgatattgccgcagatgtgaagcttgaccgtcgcgccggcttcgtggatggcgtcgatcagtcgcttctcgaacggcagcacgtactgctcgtacatcgcgggattgatgaggctggcgaccgcgtcgccgatgccgatcatgtccgcgccggcatcgatctgggcccgcgcgaagcgaatctcgttgtcgatgatgacctcggccgcctggaggtacatctccggtttgtcgatcaggtccatgaaggtgttctcgactccccgcaggtcggcgtactcggcgatgggaccctcgacccagccgaggacgctgtgggtcgcgccgacggcctgggccatcttcgcaacgctctcgacacgttgcctgggacgctcggccttctcgatctcgaacggcgcaagccgggtgacgtcctcgggggtctgaatcagcattctcttgggtttgccgacgccgtcgggcgggtagtcgaattccatcccataggcggacgcttcgcgccaaggatcgctgatcgcgctggcctggtcgaggccgaacgcatgggtcaccgccaactgcgacgcgaccaggacatcgccgtcgaggtagtagtcccggtaggtgcgtccgatgaagtgggcggcccaggccatgaagatcggtgtcacggccagccgatccaccggttggcctcgcaaggtcgcatagattcgctctttcggtgtcatcgcggtctccacggattgctccagttctcgggtgaccccggctcgccggctcgtttgccggtgtgcgcacttctcgcatgatagcgatccggcggacaatgtccaccgcctttccgaggctgtgggatttgtgaggcgaatgtgagaaaatcgcttggcgggcctcggccgggtttgataaaatccgtcgtcttgaatgtgccgattggagaatcttggcgctatgagatgcacgattgggccaggggaagaaagatcacttcgagggctgcctgaccgaacacctgcaggcgccgcgcccacacgatagggaggttcgttgcgatgttgagagtgggaatcgtcgggttcggattcatgggacgcatgcattttcgctgctggaaggcgcgggaagatgcgcaggtcgtcgccgtctgcgatgcgaaccccaacatcaaggaggacacgcaccgggcggtgggcaatatcgacggagccgccggcgacatcgatttttcgggaattgaggtgtttgccgacttcgaccggatgattgcgaaggcggggctcgatgcgatctcgctgaccctgcctacctatcttcacgccgagttctccgagcgagccctgtcacgaggtgtccacgtgctgtgcgaaaagccgatggcgctgaccgtgagcgactgtgaacgcatgatcagggccgcccgcaacagcggcaaggtcctccagatcggccattgcctgcggttctggccggagtatgtcaaggccaaggaactggttgacagcggccagtacggcagggtcgtcgcggccatgttccagcggctgggttcgcctcccggctggagcctcgacaactggttcgtcgacgagagccgcagcgggggagtcgcgctggacctgcatattcacgacacggacttcgtacaataccttctcggcatgccccaggcggtttgcagtcacggcgccatgagcgcgcgggggcaactgatccacatcgtcacgcagtacgtctatggcgacgaccaggtcatcaccgccgagggcggttgggggatgatgcccagcttcggctttgagatgagcttcaatctgatcatggaaaaggccacgatcgtctatgacctgacccggcagccggcgttgcgcgtctgtccggccgagggcgaggtttttacgcccgtggtgctgccgcaggatggctacgtccgccagatcgaccactttgccagggcggtccagggccagacggtgccgccggtcatcactctggagcagtcccgtgactcggtgaagatcgtggaagcggagaaggagtcgatccgcagacgcgagcgagtcgccattcgataaccgggggaaagaacaggagacggacatgaaatgcaggaactggcccgtaggcgtgtgcagttggtcgctccagacggacgtccccggcgtggccaaggcgatgaagaagctgggtttgcagcacgtgcacctggcgatcgccggtgcgatcggatccggcggcagacagtaccttgatgcgatcaaggcacagaactggacgatcacctcgaccatgctgaactttgcgcacgaggactactcgacgctggacaccatcaagatcaccggcggtatcgtccccgacgagtattggcagggggatcgcgacctgttcatccaggcggcggagatcaccgccgccctgggggtcaagtacctctcgatgcacgccggcttcatcgacgaaaccgacaaggcccacgccgccaagatcaccgagcgaatccgcacgctggccgacatagccgaagagaacggcgtgattttgctgctggagaccgggcaggagacggccggagagctgcgccatttcctcgagagactggaccacaactccgtcggcgtcaactttgatccggccaacatgatcctctacgacaaaggtaaccccatcaaggcggttcacaccctggcaccgtggattcggcacatccacatcaaggacgcgctgcgcaccagcgagcccggcacgtgggggaccgaggtgccctggggtgacggacaggtcggcgtcgccgagttcctccgggccctggaagaggtgggatacgacggggcgctggccatcgagcgcgaggcgggcgatgatcgtttcggcgatatccagaaggcagtccagcggttggcggcggcgagttgaccggaccagcggcggcgcggcgattcaaggagaatgacatgactttcgggatggattcgaccctgtattggaagctcagcgcgttgatggctttggagttcgcggtctggggggcgtggtatccggtattggcggcgcggctgctgggtccgctgaagttcagcggcaagcagaccggctgggtctattcggccttgcctctggcctgcatcttcatgccgctgctggctgggtatctggcggataggtacttcaacacggagtacattctggcggtggcccatcttagcggcatggtgctgctgtttgtcgccagctatcgcaaagacttcaagtcgctgtttccggtgatcctgctctacgcgctgtgttatgcggcgacgttgcctttggtcaactcgctgatgttttatcacctggccaagaacaacgtcgatacggcgaaatccgcctacatcttcatgtgggcgccgattgcctgggctgtggccggttacttcctgaccggctggcgctggatcttcaagaccggtgaagaagggagggattgcctgatcctggcggcggttttgtcggtggtcatggcggtcatctgtggcggcttcatgccgaacacgccgccggccggcgcggcaggaagctccgcactgggcatgctgaaaatcccgacgttcctggtgttcctactgatttcgatggttgcgccggggatgatgcagttctacttcctcgggaccgcacagttcatgcaggacaacaagatcgcggccaagaacgtgccggcctcgatggccatcgcccaggcggtgcaggcagcggcgacgttgctgctcttggagcgttttctgaatccggagatgatcggattgggctacaagtggacgctggtggcaggggctgcttcctggctggttctgttcgtgatctacatcattccgcgtccagcggccataattgtggggtcccaggcctttcacgggttggcctatgtgttcttcatcattgccgggcagcaatatgccggagcggtggcgccggaaggggcgggcggctccatgcaggccctgatcttcacggcccagagtggcgtggccttgttcggtggcacccagctggcgggtgtagtgatggacaagttcaaggtgggcggtcagttccagtggcagaaggtatggatggtcccggcggtcatcatgctggtctgcgtgattgccctggtgctcttctacaaagggacggtgccgttgatttgacggcactggttgggcttcgaacaaaaagggggctgcttctggtgcaagcccccttgttgttttccgctgggcgagtctcagaccgtgaacttgcggaactcggcgatcagggcggcggtctgggggccgggtttaccgttgccaatgacggcatcgtcgaatttgaccaccggtacgatatccttggtggtgaccacaatgaacagctcggtggccgaggccgcctgctgtggcgtcagacatttctccacgacctccatccccaggttccgggccgcctggagcacgaattttcgcgtaatcgacggcaggatgttggccgagaggggggcggtccacagggttcggcccaggatggcgaagaagcccgaaccggcgccctccgtaatcaggccggcttcatccacgagaattgcctcgccgcagcccttctcggcggcattctggcgggccaggacgttggccagcaggttcagcgacttgatatcgcaccgtttccaccgccagtcggggtgggtcgagacggtgatcccttccgccttgtcgcgggtgtcgtcgggcacctcgctgactgtcaggaagaagttgggctccagatcggcgttccagacgtggttgcggggcgccgagcctctcgtaacgtggaaataaatcttggcgtcgggcaggccgctggcggcaaaggcccgctcgacccggctgcgaatctggccaatgtccacactggtgatgcggacctccgccaggctccgggcgaaccgcgccatgtggtcgtccagggcgaagagcttgccgtgatagctgcgaaggacctcatagaccccatcgccgaagtagattccccgatcgaagtagatcggatcgagagagtcgacagggacgatcctgtcattgagcatcgccagtttcatcaaggcactcccgagaatgcatccgttcaggttcgagcaacgcctgcggctgacagaatacgaaaaaccagcagaaatgtctttacaaaaatggccgcgcgccgtagtatacctgtttttccaagattgcagtccttgacctggagtttttgaaatgtacgcagtaatcgaacagggcggaaaacagcacaaggtggccgagggcgaccgcctgaccatcgagttggtggatgtggaccccaaagccagacagatcgagttggacaaggtccttttcgtgggggacggggcgaccagccggctcgggaccccgtatgtggaaggagcgaaggttatcgcctctttcgagagcacggccgaagacgcattggtcaagggcgacaaactctatgtcacgcacttccgccggcgcaagaacagcaaacgccgtattggacaccgccagaagtatctccaggtcacgatcgacaagattgaggcctgacacgggcgaagaccaccgttgcgcaattccaccggctcggccgcatccttgggtcgagccgttctatttggccctccggcggcacggttgtcttacggcgccaggatctccatgccgcatggcccgcagcgaaagcggacctcgaatcgtcgtccatcctcatcctcgagaatcagcggctcggctgtccccccggaccggagaccctcgcacagactcatctcctgccgcaggcagtacttggtggtcatgacaaggcgacccgacaggtccaggcccgattcggccgctggttcgatggtctcgaccccgtggcggcggtaaaatgcctcggccttgcggttcagcacgttgcccagataggacaggtgtttctcaggataggcgacggcgttcttgcggaccacgccggccggacggggacgatgggcctggcgcacctgcatcaatcgctccacgagtctccttctggcggcgttcagctgcgagacggacagaaagtacgtggacgtggtttccatccgcatctcgtggcaggcgaacagggttttgccgagcttggtcagttgggtgtggattgtcttccgggccgcctcctcgttcagggcgggttgtttgtcgcccgcgatcacgacggccgcctcgtttccgtcttcgtcgcggccaatcagagtcagttcctgggacttctccacaaggctcatggcgagctggatcttccgccgggcggccttgccggtcagtttgccggagaacacgcggtcgtagttgcgatagattttctggccggcgcggatgccgtgcatcttttgtggatagactctgcggccctcgacgcggttgaccagtgtgccggacaactcccgttttccattgaagaagcagatcccgtcgccactgtgcaggtcatgatcgtcgccaaggacgaaacacaacttctctacgttcgccaccgtcccgatgaactctcctctggacttggggctgtcgatggcgccaacgcccgacaggggtccggtcaggccgtaatcggtgaatccgcgactgaacgtcttgttgggattgggctcgaaagcgagctcggatgaccccgaggaggttcgcgcaaaacctctgtccgccaggagcgtgtcgagcttgcggcggtagaagcccacggtattggcgacgtaggcaacatccttcagccgcccctcgatcttgaatgaactgaccccggcgtcgatcagctccgccagatggtcggccagattcaggtccttcagggacagcaggtggcggtcgcgggccaggatcctgccgcgtcggtccttgagagtgtatcgccgccggcagggctgggcgcattggccccggttgccgctgcgtccgccgatggcgtagctcatgtagcactggccgctggcaccgacacacagggcgccatgaacgaagcactccagttcgatggtggtggcccggcggatttcgcggatttgacccaggtttagctcgcgggccaggatcacccgcgagaagcccaccgcttcgaggaatctgactttctcgaccgtggcgttgtgcatctgtgtactggcgatcaacggcacgggtggcaggtccagctcgagcaggccgacgtcctggacgatcaggccgtcgatcccgacgcgatgcagttcgccgatcatcctctcggcctgcgccagctcgtcgtcgcgcagcagcgtgttcagggcgacgtacacccgggcgtaatacggatgagcgaagtccacgatctgttggatcgccgcgatcgtgttgcccgccgcttcccgggcgccgaaccgcggtgcaccgacgtagacggcgtcggccccgcaccgaatcgcggcctttgccacctggacatctcgggcgggggctaatagttcgattgcggcggtcatggtcgttggcgatggcgtctcggccggaagatcggcgagacgggagcggtgatgcgacgattacacatggggactctattcgcgaaggggaccggcggtcagcttcctgtcttgtgcgactcgattcgccggcgggtcctctctcgccaggcagcggagccgttggcggtgaagtactcgaacgaggcatcctcgaccagctcacccagcagagccttgcggtcggccgagttcgaaatctccccgatgatctgtttccgggcccattcgagctcggccaggaacaggccgtgctgctcggtgaagatcgcttcgagcttattacgcagatgaccggcataagcggggcagtagccctcggtcccgatggcgatttgaaggtcgcctcgtcggacgaccgccggaacgaagaagtcgcacaatgccggattatcgaccacgttgcacaggatgcccagttcctggcagtcgctatacacctgccgattgaccttctcgtcgtcggtcgcggctatgacgagcacggcctcggcaatatactccttggcgtacttggcccggatcagttcggccgaccgctccgcgcacaagctggtcaggacgtcgctcgcgcggtccgctacgatcaccagacgcgcaccggcatcgagaaggacgtgcgccttccggacggcgacggtaccgccaccaaccagcactaccctccggttggtcagatccaggaatatcgggtacttcggcatagcgccgtggattataccagtcgctgatttgattcgacacgaattttcggtgtctttcccaacaaatcccattgggccggtttttccgttcgcaaggatggagcgatgtgttacactcaccccctgcggcgtcgctggtccaatagcatggtcgggcaggcttcctgcggagcgggcccgggaggtccggttttgtgatacaactgtctgcgcctttggcggaagaggatgtccgtcggctgagagcgggtgatgaggtaatccttcgcggtctcgtgtacaccgcccgcgatatggcccacaagcggctctgcgccgcactcgaggccggagagacgctcccgatcgatctgaacagggcgattctctacttcgtcggtccgacgccggcacgaccgggagcggtcatcggcgcagccggcccgaccacgtcggcacggatggacccgttcagtcccaggctgattgctcatggtctgcgggcgacgatgggcaagggctatcgcaacgacgacgtccgccgggcgttacagcggtatggagccgtccacctctcgacgctcggaggagccggtgcactgctgagcaagcacatcgtccgcgccgacgtcgttgcgtacgaagatctgggccccgaggccatccgacggctggaggtgattgatttcccggcagtggtggcgtatgatgctgccgggggcagtgtgtacgacagggttcgcaggatgtccggagcacaatgagatgaaaacagcgttgctggggctgatgcagtccggcaagagtacgatcttcgcggccatcagcggcaaggccattccgccgatcggagctaccgcgatcgaggaggcgattgtcccggttccggaccagcgcctggattggctcaacacgctttacaagccgaagaagaagaccctggcgaccatcgacgtgctggatctgccgggcttcagtttcaccgacgaacacggtcgcgccgcggccaggcggctgatcggccagatccgcacggccgatatgctggtcctggtcgtgcgggcgttcgaaaaccccaccgttgccgcataccgcaacagcgtcgattggaaacgcgacctggccgagctgaaaaccgaactgctcctgagcgatctggaactggtcaccacgagggtcgagaagctggaaaagcaggtccacaagcccaccaagacgcaggcgcaggacaaggcggaactggcggttcaactgaggttgcaggaggctatcgaggcggaaaagccgatcagttccgtgatccagaccgaggaggaacgggccattgtcaaatcgctcggttttctgacgctcaagcccatggcggctgtcatcaacgtgggggaggaccaggcgggccagacgatcgccgtggacgggccgatctcggcggtgacgatgtgcgccaagctcgaatacgagctggcgcagttggatgccgagacccgcaagaccttcatggccgatctggggatcaccgagtcggcagccgagaagttcgttcagatgtgctactccacactcggattggtgagttttctgacggcggggtccgacgaggtgcgggcctggccgatcaaggacggcacggtggcggtggatgcggctgggaagattcacagcgacatcaaacggggattcatccgcgccgaaaccatggcctacgccgacctgaaggcactgggcgatgagaaggccgtccgggcggccgggaagatgcgactggaaggcaaggagtatgtcgtcaaagacggcgacatcatcaatttccgattcaatgtgtaggcatactcagggcagacgggagtcgagcacggaatgaaggcagcggtgttgacgggcgttcgccggatggaggtgagggaggttcccgatccgaagatcgagaaggggaccgatgtcctgctgaagattgggaaggtcggggtctgtggctcggatgtccattatttcgagaccggacggatcggttcgcaggtggtgcagttcccgttcatcgtcggccatgagtgcgccgcgacggtcgcgaaggtcggtccggacgtgaggagcctccaggtgggccaggaagtcgtggtcgagccggcggtgtcctgtcacgcgtgcccgcagtgcaaggcggggcgcgagaatacctgcttcaacctgcgttttctgggcacgccggggcagggcaacgggtgcctgtcgcagtacatcgtgatgccggaggaatgctgtctgccgacgtacggcaggatttccatcgagcagggggtgctctgtgaacctctggcgatcgcggtctacgcggtcaagcagtcgcgtctggccagggggaaggacgtggcggtgctgggcgccgggccgatcggtctgtgctgcctggtcagtgccagggccgccggtgtcggcgcctgctacatgaccgagaagatcgacgagcgagtggagatcgccagaaaggcaggggccgcttgggtcggcaatccgcttcgggaggatgtggtcgcggcgattctccaacgccggccgcttggaatggatatcgtgtatgagtgcgcaggccagcaggagacgatcgaccaggcggtcgatctgctcaagccgggcggcacgcttctgctcatcggcattccgcgggaagaccgcatctcgctgtccatcgataaaatccggcgcaaggaggtaacgatcatcaacgtgcgccgtcagaacaagtgtacccacgaggcgatggatctgattgcgtccggtgcggccagggtcgatttcatggtgacgcaccgctttgcgctcgagcaggttcaggaggcctttgagttggtggcgggataccgggacggtgtcgtcaaggcgatgatcgagatgtgatcgccccacgacggagcggcagcccgacgacaggttggaacgggggtggtgtacgggggtaggtgtgggggtttccaggtctatggtgcgtttggagatttgatggtcggtcggatcaagcaggcatccgtcatcagcatcggcaacgaagtcctcagtggccataccgtcgacacgaatgcggcacatatcgaacgacagttgcggatgatcggtgtcccgacagtcagttcgcatacggtagttgatctccagccggcaatcgtccgcgctctgaaactggccgccgaggaggccgacatcgttatcgccaccggggggctcggtccgaccgacgatgatctgacccgcgaaggcttcgccgaattcctcggggtggaactggaacttcgggaggacctgcttgtcagaataagtgagatgttccggaggcgcggggtgccgatggtgcgcaaaaacgcgaaccaggcccgcctcccgaaaggggcggatgttgtgcccaacgagtggggaaccgctcccggcatcgtcgccgagaaggagggcaaggtcttttttgctcttcccggcgtcccacgagagatggagcgcatgctggcggcctgggtgcttccgaggttgcgggcgtgggcgtcgtcccaggcggtggcagtcagaaggctcaggtgcttcggggccggcgagtcggcgattgccgaaatgatcggcgaggcgatgcggcgggaccgcaacccgctggtcaattgcacagctcattcgggggtcatcacgctggagattgtcgctacggcggacaccgtcgccgaggccgaacggttggccgaacgggaggaggtcgccctgcgcgaggttctggggccgctggtttatggcacgggtgaagagaccttggcggaggtcgtcgggcggcagttgaagtgcctcgggaagactctggcgctggccgaatcctgtaccggggggcttctcgccaagctgatcacggatgttccgggggccagccggtatttcacacgcgggtgggtgacgtacagcaacgatgccaagacggacgaactgggagtgccgcaggagttgatcgaaaagcacggcgccgtcagtgggcaggtggcggaggccatggcacggggggcacgggctcgagccggcgccgactatgcgattggcataaccggcatcgccggcccagacggcgggaccgaacagaagcccgtcggcttggtattcatcagtgtcgactgcgagggccaggtgcaaacccgacgctatgtgttcccctgggaacgcgggtatgtacgtcttcacgccgcgcagacggcgctggatatcctgcggcgcggattggcccgttgacttgcccggttggaagtggtagaatagacagggatggattggtgctgcacatgaggtttgtatgaccaagaaacgcaggcacttaggggaaatcctctacaaggcgggacttgtcaagagggaggccctcatcgaggcaatcaagaccggcaggtccaataacaagcggcttggccaggtcctgcttgacttgaagctgatcgacgaggagacccttaccaaggccttggccaagcagttcgatctccagtatgtcgatctggacaaggtcacgatccctccggatgcggtgaagatcatcccggaagacttgatccgtcgccacagcattctgcccctgagtgtggccaacggccgtctgaaactaatcatcggcgatccgatggacctggacatgatggactcggtccgactgcgtttgaacaccgagttggagtgctatctcgccagtccgaagaagatccgtgcctatatcgaaaactcgctcgaacaggaggtggacaagccggaggatgatcggctcgtccacagcatcgacaccaccgccgccgagctggcagaaatgggacgggaattggcggccgaggcacaacgggcccaggcggccgatgccgacgacgagggaccgatcatccgactggtgaacctcatcattgacacggcctaccatatgcgggccagcgatattcacgtcgagccgatggcggaccgtgtccgcatccggtatcgcgtcgacggtgtttgtctcgaaaaagacaacatcccgaaaaacatgcaggcgccgctgatcacgcgtctgaagattctctccggcatggatattgctgagaaacggctgcctcaggacggtcgtatcaagcggaatatcgccggccaggacatcgatttccgcgtctcttctctgccgggaaaccacgggcccagtgtggttcttcgtattctcaggccggacgcggtgaatatcggcatcgaatcgctcgggtttgagcaggacaactacgagacattccagagaatcatcaaacgacccaacggcattttcctggtgaccggtccgaccgggagcggcaagaccaccacgctgtatgccgctctgcaagagttgaacaagcccgacaagaagatcatcacggctgaagacccggtcgaatacatgttcaccgggatgaatcagtgccaagtcaaggaggagatcggcctgaccttcgaccggatccttcgatcgatgctgcgtcaggcgccgaacatcatcctcgtcggcgaaatccgcgatagcgaggtggctgatatcgccatccaggccgccctgacaggccacttggtgttcagcactctgcacaccaacgatgcgtgcggggcgattacgcgtttgatcgacatgggggtcaagccgttcctggtggccagctcgattcaggccattatggcccagcggctggtccgcgtgatctgcaagaagtgtaaggtggtggacgagcatcccaatccgcatttcctgcggctggtggggatcgatccggaggaggtgaagaagcgtcctgtttataagggactgggttgtccggcgtgccacaacaccggctacaagggccggctcggcatcttcgaaatgctcgaaatgaactcggaattgcgcgaactggcattcaagcgcgccacgacgacggagctgcggagggcagcaaagaacgccggaatgcgcgggctggcagaggacgggaaactgaagatattcaaagggatcaccacagccgaagaggtctctcgcatcgctcagaccgaaggcgtggtagaagagtaatcgtactttcaggcaaaggatcaccagatggcgacagtgaacatggataggctgctccaggcgtgcgtgacgcagggcgcctcggacattcacattacggtcggacggcccccggtgctgcggatcgacgggcatcttcgctcgcttgagacgaaggttctggagcccgatgatacggtggccctgatgaagagcatcacgccggaacgctgtgaacaggaactccaggaggaaggggggacggacttcggttttgccttcggcgatgtggcgagattccgcgtttccgtgttcaaacagaagggcaatatctctattgttctacggcagattcccaacaagattctgacgtttgaacaactgggcctgcccaaaatctgcgcggcgctgtgccgtcgtccgcgagggctcttcctcgttaccggtccgaccggaagcggcaagaccactacgctggccacgatgatcaactacatcaacgagaactttgaccggcacattgtaaccatcgaggacccgatcgaatactaccagccccacaagaagtcggtcatcaaccagcgcgaagtgggtgtggacgttcccagcttcggggaagccttgcgacgcgtgctccgtcaggacccggacgtgatcctcgtcggcgaattgcgcgaccttgagaccatcgaagcggccgtccgggctgcggaaacgggccacttggtgttcagcaccgtccataccaccagtgccgccggcacgatcaaccgtatcatcgacgtgttcccggtggaccagcaggagcagattcgaatccagctttccggcaacctgctggcggtgctcagccaggccctgtgcccgctggccagcgggcgaggccgaattgctgcgtacgagtttcttgttgtgacgccggccattgccaacctcatccgcgagaacaagacctaccgtattgattccagtatccagacgggcaagaaactggggatgcagttgctcgatgagcatctctggaacctctacgatacaggcaagatcacgctcgaggagatgcttgacaagggtcgccagccgggcgctttgcaggagaaggcgctggccaagatcgccggagccaagggcaagatgaagaagaaagccgccgaggctgcccaggagatggaagacatcgggccgattctcaagacgtaagggtccgatacgctcggcgattgccacgtgtaacggggcggttacagacacgtctaatgacacaggcttccaggtagcacgcaacgcagcgtgctcttataggtcttgttgcgccttgttaaccaggtgtcctattgctaatttttgtagaattaaatgtttactttgctataatcgggacgtagagagagatagagaggctttaagggctttgagctatgggcaagagcagaatcgctatcaagctccctccggttgagcagttgcgcggtcggcccctcggtcgaatcctgatgaaaatgggcgttctgagccgtgagaaggtccacgagtgcctcactatccaaaagcagcgcggtggaggcgttcgaatcggcgagatcttcctcgaacttggggtgattgacgagacccagttgcaggtagctttggcggcccagcgggggatggagtacgtgaatatcgatggccttgatatccctcaggatgtgatcgacaaagttcctgctcagacggccacgagttaccatattgttcctattgagtacaacaaggccaagaatgaactggttgttgcgcttgacaacgtggacaacttccgtgcgacggacgatctgcggaccctgatggggtttatggtcacggcgaagatgacggatcgggacgcgttggaggccgcgctgacgaagtactactcgtcggaggatgacaacatcacggaactgatcgacgagatccagtcggatgcttttctggccgagttcgatggccgcaatcagagcatcgacctggatgagttgaaggaactgtcggagtcgaatcccgtcaagaagctgctgaacctggtgctcctgcaggcgattcgagacaaggcgtccgacatccacttcgagccgttcgagaacgagtacaagatgcggtatcgtatcgacggtgttctgtacgagatgatcccgccgccgaagtatattgcggcggccttgagctcccgaatcaaggttatggcgaacctggacatcgccgagcggcgactgccgcaggatggtcgcatctcgcttacggtccagggtaatccgattgatctgcgcgtcagcgtgcttccgacgatgtttggcgagagcgtcgtgctccgtgttctggatcgcagtcaggtgagcttcgatctggagaaactgggtttccagccggacgacctcaagctggtgcggcagctcattaacaagcccaacgggatcattattgtgacgggcccgaccggttccggaaagaccaccaccctctattcggctctgagcgaactgaacacgatcgacagcaagatcatcacgacggaagacccggtggagtatgatcttgacggcctcatccaggttcagatgaagccggacatcgggctgaccttcgcgcgatgcctgcgttcgatcctgcgacaggacccggacatcgtgctggtcggcgagattcgtgaccacgagaccgccgaaatcgccgcgcaggcatcgctgaccggtcacttggtgttcaccacactgcacacgaacgatgcaccgagctccgttgcccgtctgctcgatctgggggtggagccattcctgatcacggccacgatcgaaggcgtgatcgctcagcgtctggtccggcggatctgcacgaagtgcaagaccccgtacgagccggacgaggcccagttgaaggaactgaatctgacggaagaggaaatcgccggcaggaaattctactacggcaaagggtgcagcaagtgcaacgggaccggctacaaggggcgaaccggcatctacgaaatcatgatcttcaatgatgaaatccgcgacctgattatgaatcgtgcctcgaccaacgtgctgcgtgtggcggcgcagaaggcgggcatgagaccgctgcgccacaatggtttgatcgcggtgttcgacggcatcaccacgatcgatgagattgccaaggaaacgatcacggaaggctaaggcgctgaccgtgtggaaccggggatcgtagcgttcgagtgaggtaggaacatgcctgtcttccaatatgtagcgttggattctcagggggtcgagatcaaggacgagatcgaggccctcagcgagaaggaagccatcagcaagatccgcaacatggggtacttccccacgaaggtccgctcgaagacggcgacgaaacaggtgggcaagaccgccgcgaagacacgggcccgtcgcggggccaaggcgaaggtcaaggtcaagtatgtcacggaattcgcgcgccagctttccacgcttcaggatgccggtttgccgatcctgcggtctctccgcatcctggaagagcagcagaaatcgggcgccttcaagcggatcatcgggtatgtggccgacgacatcgagggtggctcgacgctttcggaggcgatggcgaagtatccgcggtgctttgaccgtctttttgtgaacatggtggcggcgggggaggccggcggcgtgctcgacctgattctggcgcggatcgccgacttcaaggagaaggccatccggctcaaaggccgcgtcaagagcgccatgatctaccccatcgtggtgctctcggcggcgttcctgatcctgctgggcctgatggcgttcgtgattccgcagttcaaaacggtgctggaagaaatggtcggcggcaaactgaaccccatcacgacgaccgtgctgggcatcagcgggtggatcgcctacgactatggctgggcggtgatgatcgcgatcccgatcggcctgatcgtcgtcatacggatcatccggaaattccagccgggacgcatggcgctcgatgccatcaatctccggctgccggtggtcgggcagttgtccagcaaggtctccatcacgcgatggacccggaccctcggaacgctgatcagcgccggcgtgccgattctcgacgccatcaacgtgacgcgcgagaccgccggcaacgaggtctatgcgaaactgctcggcaacatccacaactcgatccgccaaggcgacacctttgcggcgccgctccgccagtccaagaccatcgacctgctcgtcagcaacatggtcgcggtcggcgaggaaaccggcgatctggacaagatgttgctgaaggtggccgacaactacgacgagcaggttgacgtgctcgtcgggggtctgatgtccatgctggagccgctcatgatcattgtgctcggcagcgtcgtcatggtgatcgtgctggcggtgttcctcccgatgatccaggtcattacgagcttgagcgccgccggtggttaatcggcccgataccccgattcaggcaatcatgtatcttaaaaggagaacagtatgaaacccgtcgccaacccagcccgaacgccgagagcgttcacgatcgtcgagctgctgaccgtgatgagcatcatcgtcatcctgatcggcctgctcgtgccggccttgaacaaggccaagaagttcgctacgaatgtcaagcagatggcgcaactgcgcagcatcgacgcggccatcgagttgttcagcaacgaattcggcggctacccggattccggcgcgctcgacccgaccggcgctccgtattgcggcgcgatgaaactggcggaagccatcatgggcaaagacctgctcggctgccatgcgaacaccctgttccgtcgcgatggtctgggggccggcggcgttctgttgtatccgcccaatccgacggcggcgaatctgtcggcgcggaaagggccctacctgcaagcggagaacgccaatgcctaccgcctccgacagatctatggcgacagcggggtcggcgcattcctgcccgacacgtttgtgctgtgcgacgtgtacgatcgccagatggcctcgggggagaagacgggcatgccgattctgtactacaaggcgaataccgcaaacagtctgcatgatccgaatgtggcgtcggccatgaccatcacggacagccggggcaatatctacaactaccatgataatcaggcgcttatcgggttgggcaagccctgggaggcacgaggctccacccagacgcctcacaatctggccgacccgctgcggttcttccgcaacacgcgaagcgacaagatcagcacgacggaccggccctacaggcccgattcgtacatcctgatctcggccggctgggacggggagtacggcaccgccgacgacatctgcaatttcgagtggaagtaccgggaatagcgttctatcgggcgccatccttgggcttgccgtgacgagcagttctttgatctgtgcacagacgcgggtcgagaagggcgtctgacgggaaccgtcgggattgaaagaggacgatcgtgaaaccgaaaaggtcaggtttgacactggtggagattctggtggtggtggggatcatcgccatcctcacgggaatgctcctgccggccatcggcatggtcaggaagacggcccgggaggccaagcagaaggtgcagttcacggccatcgatctggccctggccaccttcaagaacgactacgggagcctgccgccctccgaccgctacacatggctgcgtgacacgcagcaggcggagaactcctcgggcgctcagaaactggcggaggccctgcttggctgggatctgttgggcttccacccggattcgggctggcgcgccgacgggatgaaccgctggccctatcgcgtcgggacgacgacccatgcggaggggacctatttcctctacgaccggacggtcgagtacgacatgaacaagaggaagtcccgctacctggatctggacacggccaacgccgtgcggctgggtgtgaccgccaaccatgatggattgttcgatctgggagcggtcggtgtgccgctggcggccgacacttttgtcataggcgacgtcttcggcaagggtaaggaagtgacgctgctggacggatcgcgtcgcaagtccggcctacccgtgctttattatcgtgccaacccctcggaaaaagtccgggaggacatctacaacgctcaggacaacgactatctcatcgtcgccaaggagcagatcgatctggcacagcggggcatggctccgctgagagcttccgggcggttctggaatcctctggccggtgcggtggccacgttctacgagttcatcaccgactggcgggcctcgacgcagagttttccggtcccgcacaagggcgattcgtacattttgatctcggcgggatacgacgggttttacggcacggatgacgacatctgcaacttccagcggtaagtccgacgccggtttcggcgacggtctgcgaccatgacgaatgcaagacgacatgttggactgagcctcgtggagatgctggtcgtggtggccatcgtcgcggtcgtggccggcatggtggtgatgctgacgctgcggatgagcaatcaggccaaagagcgcgatttggccggtgcgtttgcgctgttcaggagcgccctgcaggagtatcgggaggaaacgggcgagtttccgcctcagccggaacagaaccatgccaatgccgcggtgcacatccggggattgtacgagcggctgatggcggagccggcctcgcggcaggttctgacgcatctgtcgaacctctccaggccgggcgaccagcccggtgcgaatatagcggaggtccgcgatccctggggaacggtgctggactatcgctatgggccggacgacgattttccagaactgctttcggcgggaccggacaaggagtttggcacccccgacgacatcagcagcaggaccggctgacgaagaaacgcatgacgccaagggtttgttggcgtggccgtgtcgcgacaggtgtttgcccggggcgggagaacaacggcgcgagaggaaatggatactcatggattgccgagcacacaacaagagcggtgtgacgctggtcgagatgacgctggtgatcgcgaccatcgcgctgttggtggggttcgggcttccggcgttgcggtcgctggtccattcgttcgaatcgcagagcggcacacgcagcatgatcaatgccgccctgagttccgcgcgggccatggccgtgaggaatcagaaatacaccggtgtacgatttcagacgctgtgccgatcgagggacccgcagaacccgctgactggcatggtcgatgcgccgcagtacatgatcttcatcgtgcatgaagagccgaagaatatgggtgggctggctgtcggtttcagggcggtagagggtctggagccggtgaagctgcccgacaccgtgagagtcctggacatcagccagctcgcggccaacagcgatatcgacgaagaccgtgagctgaacgacgccttggcgttttcggttgtcttctcgccgtcgggcaagctggtggtgcacgaggttcgcgttcgcaatcgggacggatacagcctgccgagcaatgagagcggttcgaacaaggtgtcgctggacgaggtgttcaactccgccctgaacatcacgacgtacggtcggggcatgttcattcaggatgactactccgtgcggaatcccgctccgggcaacggagttgactacgggctcggccgcgagatgagtcgtacgagcttcgtcctctgcgatcacccgcggctggtggaactgttccgccggaaggttctgtggtcggagtatctgtcccagttgtcgggcgacaacgtggtctatgtgagcccctataccgggaccttgatttcctccgagtgattgggcgatatggacaagccactgcgacaacacggtttttctttgctggagacgctgctggcggtcagcacgctggcggtcggtatggtgtttgtcgccggcacgttcatggcgggaatttacttcacgtcgctctcgacggaacgaaccatcgctgcggtggcgagcgacgaggcgctggccaagattcgcctgtacggtctcgatgtgtccgatccgaatctgaagaccgacgagtttgtcccctacgacgagctgacgacgatcccggccgacgagttcctgtacccgtcgcatgcggatgcggcggcgcggcagtactcctggatggcgctgtgcaaacgcacggcggacagccgtctggtccaggtcaccgtgtttgtctgtcgccatgccgggaccgatgctcggtattgggtgcgcgcctccgatgagggtttcccgaatcttgagcagagcgacttgcctcgacccctgcgtgtccggatcacccggaacgccggcgcggcggccgatgaagtgtcgattgttgattcagtgacctcggaccaggtcgacgaaagcacgttcctcaacgacggggctacgcttcttgacgaccggaccgggcagatctatcgggtgcttcagcggtaccgggagtcgcccgaacgaatccggctggaccgtccctggcgagacggtgatgccgacgcacgcggggaagcatgggtctgggtggttccgcgaccggttgccggcgggcgaagtcccctggtggcggtctatcaggaagtgttgcggttttagagcgatcgaatgcgaagagcctttacattgatcgaactgatcgtggcgctgggtattctggcggtggtcatgtcgttcgccagcgtgatcttccgggtgagcatcgactcgcaccgcgtcgccctggccaacgccgagatcatgcagaagctccgcgtgattaccgaacagctcgacgccgacttccagggatggcgcaaggacggagacctgttcatcatctgggatgccgagcgcaagagcgactaccgcggtccgaatccgaacgatccactggcgttcgagcgattcgaccggatcatgtttttcacggcgggggacttccagacgtacaaggccgatcctcccatccggggcaacgtggcgcgcgtctgctataccctcgtgagcagaccggccgacaatgccgccaaacgcctgcggcctcaggagcagaagccggccgagcggatgctggcgcgaacggtgcacatcctggtgcccacggcggaccccgacgacaagctcgacaccggttcatttaccgacgagcagtggcgggaatggaacagcaccctcgaatacgacaacatctcgttgcaggagtggatgcagattcccagggccgagaagatcgacattctctcggtagtgggcgacgtcacgatagccggcgccgttgccagcacgacgagcgaggctgcacgcggcgtggtgattgatctgtctcaaccggaccccgtgcacgcgctgctgtgcgatggcgtggggcaattcgccgtccagggctggaacgatacggagcagcgctggatgccagaggtcaatccggacggcgacgaagagctggacgacgattccgattttctcctggacggcgacgatctcgatccgaacgacaatcccggaatctggtatccgcgcggcgcagtgacgctgcgaaacgtcacgtacgaggcctcgcggatcgacgaggcgcatctgcgtgaaatccccggactgggacgcgccctgaagttcaccttcaccctgtacgactcgaaagggcttctggcgggcggcaggacattcacacatatagtctatttggacgactgacggggtaacggatggcggcatgggttagacaatcttcggcggactctcgtccgggttcggcgctgatccttacggtggttctcaccagcctgctggcgatcgtgggggtgctgttcatcatgacggcgcggatcgagcggatggccacgtcggcgacgacggagaaccagcaacttaacctggcggtcgagacgctcgtggcccggatcggcgagatgctgacggccgacacgcccggtgtctcagacgatgcggagtactgggatttcccggatgtcaatgacccctggctggcggacttggagccctaccggtcggggcccaactactactggcggcagatcagccgtatcgccgatatgaacgcggccgacgccagggacgtgcggatccgtgtcctcggcgaccgagacgtcatcgacgtcaacatgagcgggaccaatgccgacgccgacggagatggcgtgggagatgcgcggtggttcgaggtgcccgatatcatgtcgagcagaggcaaaccggtctatgcggccgttcggattgtggacaattccgctatgctgaacgtcaatacgggctactggttcgatccgacccggcccgactccgccagcgtcgatggaagcagcgttcagcagatcaatgtgattgccctggcggggaaccgggacagcacaccggcggaccagcaggcgcatgcggcggccctcctggcggagcgccgaatcgatcctgccgacggtttgacgggctatgaacagtgggtgatctggcagtacgggcggttggacccgaacaacccctaccggacgtttgatctgtcggatgagctggagctgcgctatcggtttctgttgaatcacgccgccatcgacgcgcgcgttgagaattgggggcgattcaaagcgaacacgatctccacgccggtggatgcggcgggccagacgctcgaccggtggtttgtccgggcccgcgacgacgggatgctcgaccccaactactcctgccggcatgtggccacgacctacaacatggaccggattatcacgcccagaccgatcgcggtcggctcggtgacgctgcgcaagaaagtgaacgtcaacagcgccgacgagaacgccattcgcgacgccattgtcgccgcactgagcggcgggggacgcctggcggatgtgctcagcggcgattcggcccagctggcggccaacctgcgcgactacattgacgacgatgatgtcgttacggcgatcgccggtcccggcagttccggtgcgcactactacggtttcgagcagccctgcatctatatctccgaaatcgcctaccgtggggtgacggacgcggcgggtgtggttcacacttcgacggccatcgaactcttcaagccgtacttcgaagacagagacccacagcccggccaatggcgtctgacgattgcggacgcccgcggatccagacacgtgccgatcatgtggtcggggacgcggcgttttcacgtcattctgaacgaggacccgctggcggagttgtttgatgacagcgtgttctccgatcccgaggagtcggcagacgcgccgcagcgatatgggtaccgccccagtgcgtatgcgaatccgacggcacaggccgatcccaacggcttcgcagagggagcccggatttcgctcgagcggtacgtggtgcagacggatacctggacgacggtcgatcacgtgccggtgaggaccggttggatggtgcccaaccagggagcccgcagtcgccagcgcgatgtctcgccgggtaagtgtgttcgcaagctctggagcgatgcggcgaccaacgcccctggactggggcatgcgacaggcaactacgtcgatcctgatgaaggcgttattcaggcgcatccggcgaaccggccgctgaagaacatcggcgagctgggaatgctctttgccaccagtgcctccggggttacccccaacgatacggcagccggcgtgctgctggaccttgccaggccggattacgcggaattgctgaactacctgaccgtcctcgatccggccgagcacggccggtctgccgatgagacgcgtgtcatgggacgaatcaacatcaacaccgcgcccgcgttcgtgatcgcacaactgccgtggatgcagtatcagcccagtggacagcccaccttcgcgcgggcccaggcaatcgtggagtatcgcgagcagcacggtcccttccgaagcgccgccggattgttgcaggttccggagatgcggcaactgaacagcgacggcgttgacaatcggcacgcggacaacccgccgggccccgatatcaccccggacaatgtccgcgatgacctggaggagcgcgacctgctcttcacgcgagtcagcgatctggtgacggtgcggagtgacgtcttcaccgcctatattctggttcgcatcggtgtcaacgggccgcagaaacggatgatggccattctcgaccgcagtcagacgagccaagcgaatcccagggtgaggctcgtttcgctgtatccgattcctgatccgcgatagggcttacgcgccgatccactcgacgagcttgggatgcgctctcttgttggccacgagcacctcgaaggcgtgaccctggtagttctccgggtccacagggaaaagcgatctgcctctccagtcggtggcgatcgctccggcgctttccgcgatcatgactccggcggcgatatcccacagcctgggcgtgcaggctactgtgcccaccaatcctcccgccgccacgtacgccagttgcagcgcggtcgtcccgaagttgcggaatcgcgactggcggaggatgcgggcgacccaggacggcagggggtcggccaagtggctgtcgagccccacgctgttcaccggcgtgatgtcgtcctggctggtttcgatgcgtcggccgttgagctggggttctcctccgtggaccgtggtgtacatcgagtccgtgccgggatcgaaaacgacgccggcaatcggccggccctcgtagagaacgccgatgctgaccgtgaagatcggaatcgcatgggcgaagttgttcgtcccgtcgatcgggtcgatcacccaccagatggccggctcgccccgaggcgcacgcttgaagatccttcctggctcgccttcttcggcgatgaagccgtggtcggggaagctctctttgatgcggtcgatgataagctgctggcaatgccgatcggtatccgtgaccagttccgtcgggctcttcaaggtggccttgacgtagttcatttcctccatcgcgcgctgccccgccagacgggcggcgacaatggctgtctcgagaatctggcttaacgcctgctgttccaagcacataccaaactacctctctgctgttgttgacacgagcatcagtccattctattctaccggcgttatgttgagacgccaatcggcaaatgccgccagactcactcgtcgcgcaacggcttcggaacgccgtgtcgccctggtggtatcggtgttgatcttctcgctgttcgcagggctgtggattctgcagcgcgtgggttttgacttcgggttgctctttcacccgtgcggcttcaagcagcgaacaggatggccctgtccggcctgcggcatgacgacctccgtgctcgcctttgcgcgagggagattgttggacgccttttacattcaacccgccgccgcgtttctgtgctgcgtcctcgtgctgacggcatttttggctttgctcacgggggtccttgggatatatttcaaagtcttcgatcgtctcttgtacgagacgaaagcaacgtactggatcgtggttttgctcgtgattctggctgccggctgggcggtgatgctggcccgggccttcgcggtgcagaggactggttagccgtatggacaatggggagttgcgggagtgctgtgcatgatgaaagttctgattgcagacaaactggcccgggaaggaatcgacatcatcaacgcggccgacggtgttgaagccgtcgtcaagacagggatgagtgaggatgaactggcttctgtcatcggcgagtatgacggattgatcgttcgcagcgactccaaggtcacggcgaaggtcctggccaatccgggcaagctgaaagccgtcgcccgcgccggtgtgggagtggacaacatcgacgtcaaggaggcgacccgcaaggggattctcgtgatgaatacgcccgggggcaataccctcagcgcggccgaacacaccatggcgctgatgttggccatgagccgaaacgtggtgccggcctgcaacagtctgaaggcgggagcctgggaccgcaagaaatacaccggaaatcagctgaaccgcaaggtcttgggcctgatcggcttgggacgcatcggtatggcggtggcgcatatggcccagggattcaacatgaaggtactcggatacgatccgctggcggcgccgaaggacgcgcagcagaagggggtcgaggtcacggatgatatcgaacggatcttcagggaatccgacttcatcagtgttcatgtgcccaagaatgagcagaccctcaatatgatcggtgcgcggcaaatcgagatgatgaagccgactgtgcgtctggtcaactgcgcccgcggcggcatcatcaacgaagaagccctgtatgatgccttggcggccaagcggatcgccggagcggccctcgacgtgttctcgagcgagcctcctgtgaacattcgcttcgcggaactggacaactgtctggtgaccccgcacttgggcgccagcacggaggaagctcagatagaggtggcggtcgaggcggcggaaatcctgctcgatgccatccggggcggtccgatcaagaatgcgatcaatgcgccctcgacatcaggtgccgtaccgccgatggtccggcgctatgccgaactggcccgccgcgttggggcgctgctcagtacgatcgctccgggcaacatcaaggggatcgaagtccagtatcgcgggacggtcgcggaaatggacacccagccgatgacactcggcttcctgatggggctgcttcagaagcattttgacatgcctctgaatatggtcaacacgcccgtgctggccagggaacgcggcatcagcatcgacgagaccaagaatagcgaggccaaggatgttgcatccagcttcagtgcgaaggttgtcacaacaaaagtcactcgcacagtgaccggctccgtgttcggtgagcggctgctgcggattatcgagattgacgggttcaatatcgaaatgacgccgcaaggagcggtgctggtcatcttcaacgacgacaagccgggcgtcatcggggcggtgggtacgatctgcggcaagcacggcatcaacatcggcaccatgggcgtgggccagaagctggaggagcacaaggccgtcctggcggtcagcctggacaaagagccgagtgccgacgccgtggaagaactgcagaagctggacttcgtcaacgagatctacgtctgtacgctgtaaacacccgccgccggcgacctgcaggtacggatgccgcaacgccccttcgactgtacgcggcatgtggacggtgcggccagggggaatggagatcatggccgaggaactcatcatcagcgtcagtgggatgcgtggcatcgtcggtgagaatctgaccccggtcattgcggccgagtacggttgtgcctttggcagttttctcagggccaacggagatactgggcagcagcggccttgtgtctgcgtcgggcgggattcccgtgtcagcggccagatgcttgcctcggcggttgtggccggcctgtgttcggtcggcgttgacgcgattgatctgggcctggtgacgacgcccggggtgggcattatgctgcgccatctcggttgccgcggcggtgttatcatcacggcgtcgcacaacccgcttccttacaatgggatcaagctgcttctggacaatggtatggcgccgccgccggatacggcagcacagattcgccggcgcttcttcgacagacagtttgcgttcgtcggttcgccacagtgcggacgggtggccgtcaattccgagaccgatcagattcatgcagggaaggtattagcggttgtgcagtcacagcagattgcgcgccgcaggtacaaagtcgtgctggacagtgtcaacggggccggcgcgcctgtggcgaagcggctgctggcggaattgggctgcgaagtggtggcattgaacgatgagccgacggggctgtttgcgcatgagcccgagccgacggctgccaacttgggtggcctttgcgaagccgtcaggcgggccaaagccgacgtcggtttcgcccaggacccggatgccgaccggctggcgatcgtcgacgaaaacggcgtttacatcggcgaggagtacactctggcgctggcggccaagtatgtctattcctcccgcacgggtgcggcggcggccaatctgtctacctcccgaatgatcgacgacgtggccaaagccgccggcggccgcgtcatacgtacgccggtgggagaggcccacgtcgccagcgccatgctggcaaacaactgtatcatcggcggcgagggaaacggcggcgttatcgaccttcgcgtggggccgattcgcgacagtctggtggcaatggcattggtgcttcaactgatggcccagacgggccagacggtaagtcagttggtgcgccagatcggtggctactatatgtacaaggacaagttctcggccgatgcgcaccaggccgcctggatcatcgatcggacgaagcagcggtttgccggtgcggtgctgaacacgtccgacggctgccgtttcgacttcgacgacggctgggtgcatctgcgaacgagcaacaccgaaccggtcatgcgcatcatcgttgaggccaaggacgaagcggcggcgcgacggtatattgaggcggtctcggagattcgcgagtccgcacgggggtaggctggtggcaatcagatgcaagaacgacatggccgtccgacggattcaacggatcacctatgtgggcatggcagtgaacgttgccctctcggtcgtcaaggtcgcggtcggactggtcttctcctctcttgctatggttgccgacgggattcactcgctcagcgacttggtgaccgatctggcagtcctgctcgggctgtatctgggggccaggaagccggacaagacacacccgtacggacacggccggctggagacgttttccgctgttcttgttgcggttgtgttgatcgtcgtcggcggagccatgatctactatgccacgctggcgatcaccaggaatgccgtggtcgtgccgcgctggcctgttctcgccgcagcggtgctgtcgatcctggcgaaagaggctctctatcgggtcacgcggcatgttgctgtaaagtcccacagcaccgcactttatgccaatgcctggcatcatcgcagcgacgcgctcagttcggttgccgtgctgatcggctacgcggcgctgtacgtcggattcgatcatggcgatcaggtggcggccattgccgtcggactgatgattatcttcgtgggcgtcaaggtcgtcggcgacgcgctgcgggagctgaccgagggggtggtcgatccgcggacaatcgaacaggttatgaaggtgatcgacggccacaaaggggtccgccagtggcaccggctgcggagtcgcacggtggggcgggaactgtttctggacgttcacatcctcgttgacccggcgttgaatgtggcgacggcccatgaaatctccgagagactggaggagactctggaccgagaaatggcttgcccggtcaatctgacggtccacatcgaacctgatctgcctgccttccgcaagcaggtttaggcccggcggaacaccgagacggcggcgcggttttccatctcggtgcggcggaaaactattgcaggccggggtgctacgccatacaatcaatcttttttgcagggaaccacgtagctcaagaaaggacatttcatcagatgagtcttcagagtttcttcgctccgaaatccgtcgctatcgtaggagcgtcgcggcagaaaggcaaggtcgggtacgagattctggtcaacatgatctcgtcgggtttcgaagggaagatatggcctgtcaaccggagcacggactcaatcgaaggtctcacatgctatccggacctgacgtcgatcggccagacgccggaattggtgattgttattgtcccggccaagtccgtgctgggagtcattgaggaatgtgccaagatcggcacgaaggcggtgatcatcatcacggccgggttcaaggaggttggagaagagggcaagaagctcgaggacgagatcgtgcgcgtcgcacgtcgggcgggcattcggatcatcgggccgaactgcctgggcgtgactgtgaccgcttcgaagctgaacgccagtttcggaggggatcttccggaagtcggtggcatcggctacttgtctcagtcgggtgcgctgctggcggccatcctggacatcgccaaggccaacggtatcggcttcagcagcctgttcagtatcggcaacaaggcggacgtcgatgagttggatctggtcgaagcgctggcagaagaccccaacacgacggttattgccggctatctggagaacatcaaggatggaaacgcgttcgtccatgccgccgagaagatctcccatgagaagccgattctcctgatgaagtccggggggactgcggcgggcgcccgagcggcgtcgtcccataccggttccctggccggcagcgaggtggcctacgaggccatgttcgcccgggccgggatcattcgttgcgattccatcacgcaacaattcgattttgcccaggcgtttgccaaccagccgctgccccagggacccagcgtggtgatcctaacgaacgccggcggggccggcatcatggccgccgacgcgatcgaacgggaggggttgaccttcgccaagctcagtccggagacgatcgagaagctgaagaccaagctgccgcccgccgcaaacttccacaatccggtggacgtcctcggcgacgcattggcagatcgttatgagttcgcgctcgatgtgctcctcgacgatccgaatgtggagaccgtattggtccttctgacgccacaggccatgaccgaagccaaagagacggccgaagcgatcgttcggatgtcccgacgcaagcccgacaagccgattctcgcgtgcttcatgggggccagcaaggtggcggagggggttaaggtgtttcgacaggcgaaaatcccgcagtatgattcgccggaagcggccgtggccacgatcaaagcgatggcagactacgtccggtggcgtgcgcgaccgaaacgggtggtgcggctgttcccggtcaatcggcgcaaggtcgagagcatcatcgagaggcatctgcggcaaggcgcccgcgagattggcgaggcggaatccaaagaaatcctggaggcgtacggctttgcgactccgaacggctcgattgccacgacgcccgaacaggcggccaacatcgccgagcaactcggctatccggtcgtgctgaagatctggtcgccggacatcgtgcacaagtccgacgtcggcggcgtcaaggtcgggctcaagagcgcgcaggaggtcaaggacgcgttcgacctgatgatgtaccgtattccgaagaaggcgccccaggcccacatcctgggtgtactggtccaggagatgtgctccagcggccgcgaagtcatcctgggcatgcatcgggatccgcatttcggcccgctcatgatgttcggcatgggcggaatcatggtcgaggttctcaaggatgtggcattctacctcgctcctctgacggaggacgaggccaagcagatgctgatgaacaccaagacgtatcagctcctcaaaggagtgcgaggccaggagggtgtggacattgaagtgattgccgaggggctccagcggctcagccagttggtgacggagttccctcagattcaggagatggacatcaatccatatgttgtgggccttccggggaccacgcccattgcagtagacgccagaattagtgtagagaagtgacatgcaagcgattgattggcaagcgaagtacaaagacaaagtcaaacccgcttcggcggcgatgaaactgatcaagtccggcaacagcatcttcatcgggaccggctgcgcgcagccgcagcatctggtgcgctccctagtggagtactccgatcacatctacgatgcgcacattgtgcacctgctgacgatgggcgaggctccgtatgtggacgaccgattccgcgagaagttcaagatgaacagcttcttcatcgccgacaacgtccggcatgcgctggatcggggggtcggggactacacgccgatttttctgtcagagattcccggcgagttcgaaagcggacgcattcccatcgacgtggcgctgatctcggtggctccgccggatgctaacggtttgtgcagtctcggcgtctccgtggacatcgtgcagtcggcggccgccaacgcccgctatgtcatcgcgcaggtcaacagccacatgccgcgaacgcatggcaacagcttcctgcacgtcaataccatcgatgtgctggtcccgtacgatgagccgatcatcgaggtccccgtcgacgagcccgacgagacgctccgccggatcggacagaacgtcgcccagcttgtcgaggacggcagcaccatcgagtgtggtatcggacgcattccgcaggccctggccgaatacctcgtctacaagaaggatctcggcgttcatacggagatgttcagcgactggatcatggacctgatcgactgcggcgcgatcacctgcgcgaagaagtcgctcaatcgcggcaagatcgtcgccagcttctgcatgggctccaagaaactctacgactacattgacaacaatccgttttttgagttctatcccaccgagtacgtcaacgacatcaacgtcatcagccagcatgacaaaatggtcgggatcaacaccggtctggaaatcgacctgaccggacaggtctgtgccgattcgctgggccacaagttctacagcggcatcggcggccaggtggacttcattcgcggatcggcgcgcagccgtgggggcaaggcggtgattgcaatgccctcaacggccaagaatggccagatctcgcgcatcgtgcctcatctgacggagggcgccggcgtggtgaccacgcgtgccgatgtccactacgtcgtgacggagtacgggattgcctatctgcacggcaagagcattcggcagcgggtgctcgacctgatcaacattgcccatccgaagttccgcaagggcctgatccaggcggccaaggccaagaactacatctaccaggaccagatcgagttgtcgtgggaccaggtgaactatcccgaagagctggagcattacgccactctgcgtgacgggacggagatcttcttccgcccgatcaagccggtggatgagccggccttgtccgagatgctctattcgctcagcgaggagtcggttcggacgcgctacatgacccggacggtcgcctttccgcacaaagacctccagcggttgacgaatatcgattacaagagcgacattgccatcgtcggcatcgtacccggcgtcggcggagacgacatcgtcgcgatcgcccaatactacctcgaccccaagacccaggcggccgaagtggcgttcctcgtgcaggacgagtggcagcagaagggcatgggcaccttcctgcttgactacatcacgcaggtagcccggcaacgcggcgtcaaacgtttctatgcgaaggtgctgccggacaacaagcccatgctggcggtcttccagaactccgggtacaaagtgaatgtggagtttgacggagacgtctataacgtctcctacgacctgaccaaagagcactcgtaggattgaccttgtccggacgaagagctgctttcattcactcggaccagatcgagcagtaccgctacccggagggttgtccttttcgacccgaacgggcggggagactccgccgggtgctcctctcgatgggactgctctccgggccgggcgtcagcgaagtggctcccgtcgctgccgatcgacgggcactgaagcttttccattccgctcgttatctgcatgtgctgaagaaagcggaccagggacaatgggacatccaggccctgcagatgggcatcggcaccgacgacgtccccgtcttccggggcatgtacgactacgcggtgctcgcgaccggcgcgacgctcgtaggggcggacctgatcctctcgggacaggtagacgtcgccttcaatccgtcggggggctatcatcacgcgtttcctgagaaggcggccgggttttgctacatcaacgacaacgcgatcgcctgttcggtcctggccgaggccggcaggagagtcctctatctggacgtggacgtacacaacggtgatggtgttgcccatgccttctacgaccgttcggacgtcatgaccatctccatgcacgagaatcccaagatgctctttccgggaacgggattcgaggatgagatcggcgagggcccgggcaaggggtattgtgtcaatctcccgttgcccgtcgggacctacgaccgtgcctacctcgatgctttcgaatccgtggtccttcctctgatcggcgtcttcgatcccgatgtgattgtcttcgagctgggtgtcgatgcgctggcgggcgatccgctggcccatctgcacctgaccaacaacacatacgtggagattatcaggcacttgctgaacttcggcaaaccgatcctcgccaccggcggcggcggctacaacgtcgagaattccgtccgtgcgtgggccctggcctggaccgtcttcaccggggaggacgacggcccggacctcggccctctgatgggcggcgtcatgatgcagagcacggattggcaggggggcctgcgcgaccgcgaactggtcgtcacggaagaacagagacaggcggtcctgcccgcactgatggcctcgatcgacattgtcaaggcgaaggtcttccccatccacggactgtgaccgggtctgtgacagcgaaataaaaagacccggcgtcaggccgggtcttgggatcccctgaaggatcgaagatcatcgcttcttgaaagtcccgtcgagttcgccttcgatctccgcctggatggctggttccgaaatggtaacgggcttcaatgtcatcgcgacggccgcggccgcaaggcaggcaataccggcaggaaggaaggcccacatccaggcgtgcgcgtttcccatcacgccgccgagtcgcggaccggccaacccgcccacgccgtaggccatgaacacccaggggtagttctcgccgacattcttgttgccgaacagatctgcagtcgctgcggggaagagcgcaaaattgccgccgaagttgaaaccgatcacggcagcgccgagataaaggcccacctctttccctccgatgaagtagaagacgatcatcatgatgccctggaggaagttcatcaggacgatcgacatctttcttccgagcttgtcagaggcggctccccagatgattctcccgaggccattgagcagggcatagaacaaccccatcgctgtgccggcgatgatggtggcctgcgccggctcgacgcccgccttgccaagggcttcttttccgaagagagcgatgatgccgatgaccatcaatcccgccccggcgccgaaggtgaaattcgcaaacaggacccagaattgataggtttttgccatgcgcccgggcggaaggtcgatgccaccttcgctgcccttgcctgaggtcggcggcgtccagcctttcgggagccagccggccggagggttgactaacaccagggagcccagggcgaccaggacggcgaagagcaccccatagagcttgaatacgtcgctgacgccccagcctgcaccatacaggcccgcccagccgggcgtcagatcgatgggcccgaatttgaatccttgggtgagcttgacccatatcagggcgccaaacccgaagcctgccacggccaagcccataatcaagcctttcttgtccgggaaccattttgccagtgccgcgatcggacagacataggccaagccgatccctgcacctcccaacagcccgacgccgatgagaacgccccagaaactggttcctgcaaaccccgcaagcaggtatcccaggcccagcacgatgccgccggtgagcgcgacgatgcgcgggccggctttcttctgccattttccggcgatcagcgccatgaccacggcgaagcagaccaagccgatggagaacggccattgggtcttgtcggtggcaaagttgaagggctctgccgtgagcttgttggtgaacgccgaccacgcatagatcgcgccgagacagagttgaatgaggattcctcccaccacgaccagccaacgattcatgacctttttttccggcatgctctctccttgtgtggaaaaaggccgggtgcgcaacaggttgcgcacccgagtcacttgtatggcatgatggggctatttgccccggcccttgaccaggacttccaccacgtgcggatccgccagggttgtgatgtcaccgagattgtcggtgttgttctcggcgatcttgcggaggatgcgccgcatgatcttgccggaacgagtcttcggcagcgccggtgcaaactggatcacgtccggcgcggcgatcgggccgatctccttgcggacgtgcgcgacgagttccttcttcaagtcgtcgctctcatggatgccctccttgagggtgacgaaggcatacagggcctgtcctttgatttcgtgcggcatgggggtgaccgcggcctcggcgaccttggcatggctgaccagggcgctctcgacctcggcggtgccgatccggtgacccgagacgttgaccacgtcatcgatgcgtcccatcagccagtagtcgccgtccggatcgacccggcacccgtcgcccgtgaagtactgatcggcaaacatggtgaagtaggtgtcgacgaaccggtcgtggtcgccccacatggtccgcatcatgcccggccacggcttgcggatgcagagcttgcctccctcgttgggaccgcactcggtgccgtcatcccgcaggaccaccgggtccacgccgaagaacggtctggtcgcgctgcccggtttcagcgtgaaggcccccggcagcggcgtgatcagaatgccgcccgtctcggtctgccaccaggtgtccacgatggggcatcgttcgtggccgatgtgcttgtagtaccagatccatgcctccggattgatcggttccccgaccgtgcccaggatgcgcagcgtgttcaacttgtacttggcgggccattcttcgcccaggcgcatcagcgcgcgaatcgcggtcggggcggtgtagaacaccgtgacgccgaacttgtcgcagacctgccagaagcgaccggcgtccggataggtcggaacaccctcgaacatcagcgtggtggccccgttggccagcggaccatacacgatgtagctgtgtccggtcacccagccgatgtcggccgtgcaccagtaaacgtcgttgtcatggatgtcgaaaatgagcttgtgactcaacgacacatgcagcaggtagccggcggtggtgtggaccacacccttgggtttaccggtggaaccggaggtgtagagaatgaacagcggatcctcggcgttcatcttctcgggctcacagtgttcgccggccctggctatctcctcatggtaccacacatcgcgtcccggctgcatgtggcagggatcgtccgtctccttggtcacgatgacgcactcgatcgatggagtcttcttcaaggcttcgtcggcgatgttcttcagcgggatatgcttgcccgcgcgcagcgacacgttggaggtgatcagcatccggcactgagagtcattgatgcgtccttcgagggcgtcggcgctgaaaccgccgaagatgatcgagtggatcgctccgatgcgagtgcacgcgagcatcgcgatgggaagttccgggaccatgggcatgtagatcgccacgcggtcgcccttcttgattcccttggacttcagaacgttggcaaacttgcagacctctctgtgcaactgctcgtacgtgtatttcctgacattcgaatcgatctctccctgccagatgagtgccgttttccgggcggtcggtgtgccgagatgccggtcgaggcagttgtaagagacgttcaactggccgtcggcaaaccaggtgtgctcgatcttgcgactcttggtgtcccaggtgtactccaggctcttggtcggcttcttaaaccacgacagcgattgcgcctgctccagccagaatccgtccgggtccttgatggatctttcccacatcttcgtgtactgctccatgctggagacgtgggcgttcttccggacggcctcgggcggcggaaacgtccgattctcggtcatcagagaattgatggctttctcttgcgtcattgcgttctccttttgcgtgatcaattgtttgtcttgaaggcttcccattccgctccgtgccggcgatgtcaaatccgggcgacatcgcatcgattgcgagtgcgaatgcgagcgcaatgtaaaaatgtctttataatgccaggcaaggcggatgtcaaaggaaaattcagatcttggaggcgacagtcaaggtaacttggttgcggccgggccaatggcttgcaccccctgaccgatgctgccgaaacaggggtggaggtcttgcccctcggacgcgctgtgccggcagcgtcatgccgttgttgagcaggcagtctcgtcggccatgacggactccggtgtccggactacggccgttccgcgagaagagggcgctggtcacacgagggttgcgccacgacgtcggtgtcgggcaactcgctcagcgtccagtagaggtcgatcgtccggatggcctcgacgaacttgccgtaatccaccggcttgacgatgtagccggccacgcccagcttgaagctctcgatgatatcgcgctcttcattcgacgtcgtcagaaccaccacggggatcttcttgagcaagggatcgtctttggcgatccggaggaattcgacgccgttcatcttcggcatgttcagatcgagcaggatgacgcagggatgctcgccgccttgctgccgcagataggccaaggcgtcctctccgttcaaggcgtgcgccaaggggttgatgaccttcaattccttgaacgcccgcttgaccgtcatggcgtcaatcgtgtcgtcttccaccagcagaatcggcttacagttgcgcatgaccggcttcctcttgtgtctctacccgcagagcaggttgtgagtttctcggtagtgaccactgttcttgtgcgattgccatcgacgtcttccggcccagtgcacctgctcccgggcgcgctgtgcttcacaggccacattctgagaagccatgttgatgcgatttcagcatgggaggtcttgcggatcacatctcctcttgctgatacagcattcatcggcacatcgggtgtcgggttccaacgcattcgcgccgcgcaaccatccgaccggtcccagccatgatcgagcggggacaatcgccgctacgcttggtggcgttctgaatgcgcgtctcttcgtaattcctgttttcacaggattttaaggcgaggcggtttgctggctgcctatgagggcgccggcgcatgtcagcaaccgtgcgaataccggcttgatggacagattcgggcgggcgaatgcggacctgcggagttctcggacgcaagagccccttgctcacaacaaactcgtggcgtcgtagtagtgcctcaggaggtattctttgtcgggacctccgaggtggtcccagggcagtctctggtcgggttcgaatgctctctgtgcggcagtctccagttccatgcctgcggcggcgaaggcggtccgccaccgctcgtggtcgaagcattcgtcccacagatcgaaacgtgcgccgtcacgccacgcggcctcgatgacttggccgcaacgccggtcgccccggccgatggccgattcgagcaggctccggtggatgtcgtggaacttgaaatgcaggtgattcgcacgacgccgctgcttctcgtcaaggaccagctcccttgcctgctggaagtattctgccggtctctggccaaaccaggcgaggggagtgtgaggcttcggcacgaaccaactgacggtgatattcagttgggcgatgtggtggtcgacgctcttacggagtctcgccaaccggtcggacagatcgacgatcgccttgacgtcgtcgagcgtctcgccgggcagcccgatcatgaagtacagcttcagcttctgccagcccgactgatatgccgcctcgacggcagcaaacaggtccttgtctttcagcggcttgttgacgatctgccggagcttctcgctggccgcctctaccgcgatggtcaggccgctctttcgtaccgacgtgaagtacttcggcagcatgtgaagctgctgatctacacgaagactcggaaccgacaggcccactttcttgtcttcgaagtattctttcaaccgggcgatcagctcttcgagaggcgggtagtcggcgctcgacagactcagcaggctcacggtgtcgaaccccgtcgtctcctgcgaggccttggccagttcgaagaccttcgcagcgctgcgatagcggatcggtcgtcggcagaagctcgcttggcagaaccggcaccggcccgggcagcctcgcatgatctcgatgctgacccgctcgtgaaccgcttccacgaaagggacgatgggacgcgtcgagaccggtgcgttctcgaagtcgctgacgacggcattgtggaatcgagtcgggagcgcttcgtttcgagcctggaaggaggtgatgtaggaatcctcgtatcggaactcatagaagcgggggacataggcccagtcgaaccgctgtgcgatctcgaacaagaccgcatccctggctcgaccctccttcttcgcggcgatcagaagattcgccagttcgacgacggcttcttccgcctcgccgaggacgaacagatcgatgaagtcggcgatcggttcgcagcagttggccatcccgccgcctgcgatgaccagcggattgtcctcgctgcgatgttcgcttcggacgggcaggccggccaggtcgagcatgttcagcacattcgtgtagcaaagctcgttggtgagactgaagccgatcacgtcgaagccagccaatgacgccttcgattccaggctgaacaggggtatgttcttctcgcgcaggaccgcctcggcgtccacccagggcgcaaagacgcgttcggccgcgacattcgccaggccgttgaggacgtgatagatcagggccaggcccgtgttggacatggctacttcatacacgtcgggaaagcacaacgctaccgtcagttcgcaccgctcgatggccttgcagacctggttgacttccccgccaatataacgcgccggtcgccgtacgaaaggaaggaactcgcgctcgacccggtcggccagtatctctatctttctgtctgtcatgtggttattataacgagtctggcgtggtcttgatagatggggcggggtatgtcccgccgacagacgcatggggctgccatgaataaaaccggtcgtggaatcgttgtcggagtcttgtgtctgttgctcgcaggtgccctgtgcgtcagcctccggacgccacagacggttcaggtcgacagcggctacaaggtcgtcatggggacattctcccgtgccgtggccatcgcgccgagcgagaaggtggcacgcgcctgtatcgccgccgcatttgaagagcaaaggcgcgtcgaggagctgatgagctaccacaatcccgactccgagctcaacacgatcaatcgcgaggcttaccacagggcggtcgaggttgataaagcgacctttgaggtcctggagagcgccaggcgattcagcgagctttcgggtggtgcgtttgatgtcacgatcggtgctctgggcgatctgtggcgtcgcgccgccgccaccgacaccacgcccacggaggttgaaatcgccgaggcccaacgcaaggtgggttacgacaaggtgctgctcgatccgaatacgcggacggtccgctttgcggtcgaagggatgagaatcgatctcggcgggatcgcgaaaggctatgcggtcgaccagtcggtcgaggcgatgaagaagcgaggggcggtcgggggaatggtggacttgggtggcaacatccgctgcttcggattgcccccgaaaggacaggagtgttggcgggtcggactgcaggacccgaacgtggcgccggacgaactgggcgactcgaagctcctgttggttctcatgataacggacgagagtgtggctaccagtggagactaccgccgattcgtcaaggtccagggaaacaaggagagccacatcatcgataccggaaccggcaaaggcgcgcgcaagctggtcagcgacacgatcattgctcccgatgcgatcactgccgatgcactctcaacggctgtgaatgttctggggccggaggcgggcctcaccttgatcgagagtatccctgaggtggaggcgatcctcgttcccgtcggccaaggcgctcagccgatcttcagcagcggagcgaaagcctacgtccggtagcgcgccggacatggcaccgccaggacgtcattgtgagcgttcaactgtctcggtctgtctggctttgggctcgcgcgggggcggggcggtcttgccgcggtagacgatgacgccggtggggcattttttgtaggcggcctcattctcgccgcagggagcatatttggtgtagtccatgcgggcgaggttgtcggcgacggtgaaggcctcgctctgcttggcgcacaggccgcaaccgatacagccaacctggcagaaggcccgcgtgcttctgccgttctcccggcttctgcacgcgaccgtcatcatgttctcgtggctgaaggggaccatctcgatcaggctccgcgggcaggccttcgaacaagcgccgcagccggtgcatttgttgtagtccaccgtggccagaccatcgattacgtggagcgcgtcgaacttgcaggcgcggacgcagtctccgaacccgaggcatccgaacttgcacgcctgggcgttggccagcgcgttggcggcggtgcagctcggaatgccctggtactgggcgtagtaggtccggtcggccgtgtgggcccggcaatggacgatcggtcgtttggccggccccgactcgctgattgccaggtttaagatggcggcgattctgccggcggcgtcggccccgcccggcgcgcactgaccaagcagttcggggttggcgatcaccgccttggcgtatccactgcaaccgggatagccgcaggctccgcaatcaaggtggggcaggacctcatagacctgggtgacccgtgggtcgacgggaaccttgagtcgttcactggcgacgagcaggaccactgcaaagaccaggcccaggccgagcatgatcagaccggccagccacacgccactcatcgctcccagaagacttgtcaacacgatcatatgatccctgcaaatcccatgaaggccagagccagaagtcccgccgtgattaacgtgattggagcgccacgcagggattcgggtacgtcgaccatctgcatgttctcgcgaatcccggccatgatgcaaatcgcgatggtgaagccaatgccgccgccgaagctcagaaccaccgcctcaatcagggtaccggtgccccagacgacgagaaaaaggcacaggcccagaatcgcgcagttggtcgtgatcaaaggcagaaagataccgaagctctcatacaaggacgggaagaacttcttcaggtacatctccaccagttgcacggcggcggcgatcaccatgatgaaggccacataccgggccacctccaggttcaggggcatcagcagccagtggtcgatcatccaggtgagggtgccgctgagtgtcatgacgaacgtgaccgccaggcccataccgaaggccatatcgatccgtccggatactccgatgtacgggcagatccccaggaacttcgtgaacacaaggttattgatcaggaccacggagatgaagcctgtgagcagaacgtacagcaaatccatcgtgcgactcccttagctccgtttccggctgacgtagttgatgaacccgagcacgaacccgaacgtgagaaacgcgcccaccggcatgcccatcgccgcccatgcggggaaggccttgggcaggacctggatctcgaagaggcggccggtgccgaggagctcgcggatcgtggccagaacgcacaaggcgatggtgaaccccacgcccatcgccaggccgtccacgatgctcagcaggacgccgctgtggctggcccgggcttcagcccgccatatgatcacgcagttgacgatgatcagcgggacgtacgggcccagggcctcgctcatcaccggctgataggccctcaggaagaggtccgcaatggtcacgaaggtggcgatcgtcagcgtgaacagcaggatgcggacgtgcggacgcaggccctttcgcatcaagctgaccatgatgttgctgcacacgagcacgaagatcacgcacagacccatggtcagcgccggcttgatcgcggcggtcaccgccagggtcgggcacgtgcccaggagcatgcgaaagaccgggatctcacgccacaaacctgtggcgacggcctctgcatacaggttctgtccgtcaggggttgctgccatggccgatcagccctttctgctggagttggtccttcagttgcggcaggtagtggttcatggcctggacgacggcggtgctgctgatcgtcgcgccgctgatggcgacgatggtcgaatcgatgtcccgctcgttggcggcgccgagcccgacgagcgagaatggcccgaccggcgccccggcaaactggttgcggtaatacgcgtctttgatctggtcgccgaatcccggggtttcgctgctgctgaccacgtcgtagccggcaagcctgctgaacgaggcatcggttgcgacaaccagctcaattctgtcggcaaaccccgaccctacgaccttgaagacccatcctacgacggcattgccggcggtggccttgaatacgacggccgactccgtcttcccgtcgaggcctttgacttccaccgggctggacagaggtacaaaagcctgtgccgcaggcagcagaccgcccgccagactggtcagcttcagagccttgttcacctcgatccgcgggccgagcgcggcattcgtcgcggccagcagcagcccgcacagcacggaggcgaccaccagcaaccagctttcccgtacgaagtgcttcaagctatccaacacgaggcaatcctcccaccggcacccgccggcacagtcggtcgatcagaggggtcaggccgttcattaccaggaccgcgaacatgaagccctccgggtaagtgccgacgatgcgaatcagcagcgtgatggtcccgacgcccgcgccgaagagccacatcccgcggcgcgtcagcggagcggtcaccgggtccgtcgcgatgaagaacgcgccgaacagcagggcgccgctcgtgaggtggtagaacggctgcacgtaggtatccggatcgatcaggtaggcgattccaccgaacacgaatgccgccaggagcacggcgacggggatgtgaaaaccgatggtccgacgccagagcagataggcgccgccgagcagggcggcaatcgcgctggtctcgccgaggctgccggccacctccccggtgatcgtcgacagaagcagccggcggctgtacgtcttcgcttcggcctggtttttgatggctgttttgctccaggccagcggggtggcttgtgtccgagcatccaccgcgtcggccggagagagcttcggcatggtgctgtcgatcgacgccggcacggtccacgtcgtcatcagcatgccgaatgaggcggtcaaaaaggcgcgtccgaccatggccgggttgaaaacattggcccccaggccgccgaaggccatcttgccgactccgatggcgatcgccgagccgaccgcggccgtccagaagggcagggccggtggcaacgacagagccaggatgacgccggtgacgaccgcgctgagatcccagagcgagttgggcttcctgcgaatcaggttgcagacccactcgatgcccacgcaccagaggacgcacaggccgatgagcaccagggcgcgaacccggaagtagaaacccgccgccgccaccagcgggaccagcccgatgagcacgtccagcatgacccgctgcgtcgagagccgcttgctgatgtgcggtgcgaatgaaaccgtgatatctcggagcatctatcgaatccttgttatcctttgccgtgccgccccctgcccgtcaggccggcatcttctttctctgcctggccaggaagatctttcctgtcttgatgtagccggtcagttcgatgttggcggggcaaacgtagctgcagcagccgcactcgatgcaggcgctgatgaagtggcgctccgcgacatccagcaggttagccttgaccgcatgagcgattcgcgtggggttgagattctccgggcacacctccaggcaccggccgcagcgaatgcaggcggtctgtcgccgttcgaacttggcctggccgatctggtgccgggtcaggacggtcaccgcgccgctggtcttcgtgatcggtgtgctcagatcggcgatggccagtcccatcatcggcccacccatgacgaccttggcagatttctcggtcacgcccccgcagaactcgaggagagcttccacaggagtgccaatggcgacgtagtagttgcccggtttggcgacggcttcgcccgtgacggtcacgacgcggtgagtcagcggtcggcggtagatgacggcatcggcgatggcggctgcggtggccacgttgaccacgacgaccccgatcatgggaggaatgcccccggtcggaaccgtttggccgagcacggcattgataagctgccgctcgcctccctgcgggtacttggtttgcagcgacaccacgcggatgtccgagctcaatccagccctcttgatcgcgtcgccgatcacttcgatggctcttggtttgttgtcctcgataccgacgaagaccttcgacgcaccgcaggcccgctgagcgagccgaatcccggcgaggacctggtcggtccattcgagcatcaagcggtaatcacaagtgatgtagggctcgcactcgcaaccgttgacgagcagggtgtgctttgggggtttcgcgtccggctgaatcttgacgctggtgggaaaccctgctccacccatgccgaccagaccggcatcccggacggcctcgcagatctcctgagggctgtaccgagccggatcgaacccggccggcaggctgaacgaaggcaaagccggcggcgccagctccccaggctcgaggacgatggcctgacagcgtccgagcaccgggtgtgacctcaaagccacctctttgaccttgccggccaccggagcatgaacgggcgcacagacgaatgcctggcactcaccgaccttctgggcggcctccacgagatcgcctttctggacggccggctggcagggggcgccgatgtgctggctgagcaggatcgacaactctccgacgggcggtcccggctcgatcggcttgtcttgggtcagatgcttgctctcgggaggatgcaccccgcgagcaaaggtggatctgccatgcgaatcggttgccatattgatgcaatccaagtgctaacgcttcttttcgtaacgccggagaaggagactggtcgtgacagtcaagccaacggcaaacacgaaagccatggcggcggctacaggcgttcggtgccgttctgccaccaccgcttccagcaggcggtcgaatatcgccaaggcagcgatgaacgcgccgaccggcagcacgaaggcgacgaccgccttccacgccaccgagggccccccggcgtggccgagtcgctcatagaccttgacgcagtcgtgtgcctgactgcagccgctgcaaggctccgtttgcttcatggttgccactaccaaaagagaaaaccaaaagtataatgcctccactaggcttttcaacggtaacttcgcgatttccagaggtcatgggcatgagaacgggattggcgctgctgggcgtcgtgctgacggctgtgctgatcggctgcgcggtcaatccagtcacaggggaggaggaactgatgtttttcggcccggaaaaggatgtcgaactgggccgcaagtacgcgccacagatcgagagggccttgggcggacgattggccgacgagaatctccagagctatgtcaaccgcgtcggccagcggatcgcgcgggtgtgccaccgcccggacatcgcctaccactttaccgtcgtccgtcagaaggggattaacgcctttgctgttccggggggctacatctatatcaccagcgggcttctggaaaagctcgagtccgaggcccagttggccgcgatcctgggccatgaagtgggccacgtggtcgcgcgtgacacactggtggccatgagccgacagatcggcatgacggcgctggtggccgccgcggctgttggcgatgcgccgggcgacgtgacgcgggcggcaagtttcatcagcggcgtcctgtccctgcaatacagccgagacgatgagaaagatgccgacctggcaggactgtcttacatggttcaggcgggctacgatcccagcggaatggtcgagaccatgcggatcctgcaggaattgcaggaagttcgaccgatcgagtttttctccacgcaccccaaccccgagagccgcatcgcgtacctggaagatcgcatcggtgggcgctatgccatgttcagcgaattgaagaagggcacagacgagtaccggcagaatgtgctcgacgttctgaccacacgccacagccacggcgaggttgcggaaccgaacactccgtagagcggccacctgtcgcgttgagcgatgtgcccggcgctcaaccttgctctgcctctgccttgcgggcttttcgtttctcctcggtggcgctgaacttgcacttggggcatcggtccgggaagtcgttcggtacgatgccttcggggaagacttcgccgcacttggcgcatttgactgccttcacgaccctgtccttgccgcatttctggcaggtcaacagaaccctggccatcggattggccatttgtgtggttctctcctgcaattgcgtgtagtaagttttctctcccatctggtaggaggcgttgcaggctgtgcataggacccacacctgtgtatcgtcagagaggctttcgacgccgccgggaccgctggagcgagtcacgacgaccacgactaccgctatgatcagacacaacgcgatgatcccgccgtaaatcaagttcttcatggctcaaacctcccgactggaattggcgccttctgtaactctgccgacacggttctgctgattgtggccgtcttatcgacaccaccgacgcggaagatactccgccgtgcaacccttgtcaaatgcctgttggggccccggaacaaggagggtgcactgtgtgtttgtaggtaggttcctggggaggccaggaaggggggctgtcatctcgaagcgcgtggcggatgtcatttcgactaagggcgaagcccgcacggagaaatctggccggcgataaggcaatagcccgttcgcagccagattcctccactccgctgcgctccggtcggaatgacaaagtcgattgcaacccccgtgaaggtgtacctacaaacatcaagtgtacccgaacaaggaggtgtcgcgtgtgacggaccgtccatcgttcccctgtcgtgcatccttcttgatctcaacggccctcgggaaggcctcacaatgcggtgtctcggatgtacgcggcgatgttcgggccggacaagccagtggcgccgggggtgttccgcgtgatctggagaatccgcagaggctcttcggggaaacccgttcgcgccgacaggtaagcggattcgaatacggccatattcctgaggttctcggcggcgctgctgatcagcggatgctcggccgggttccggacgctctgcgcaaagctggacagcagtcgttgcatcgtatccagttcggtttcctcaaattgccagacttggtcctccagaccggagtcggtgttgaggatgacacgattgtccgtgatcgtcagacgggcttccttggcgtaaatctgcagacccctgcgcgtgggaccctggccgctgcgtcgtgtggcgacgatgctggcggtcagagcatcggtgaacttcatggagaccaccgccgtgtcctccgtcaggtacaaccgctgttgcttgtcgggggcttgattggtggtcaggacatagacctgttgcgggagggagaagttccagaggatctgatcgacgatctgatgacagtcgtgcaacaggacccctcctccggccaatcggggatcggcatgccaggcgggccgatcggcgtcgggagtctcgctgtacgcggtgacgagaaacgcgcccttgacctgtccccggacgatcaagtcgtgggcggtgctgtaactggaccgaaacctcgccggattggcgatcgcgaatcggaccttctcatactccgccatctggacgtactcgagcgtctcttcgtagtttcgggccggcggggcgagtttgagcacgtggaatttcttgcggatcgccgtcttgaggtgctcgtcgcagagatgggtgtcggcggcgacgagaaggcagtcgagttggttctggacgaccatctgccggtagtcggtatagggctcggcctgaagctcggcggcggttctctccgcctgctgcgggtcctgatccgcgacggccttgatgaggaattggccggtccgacgcgccgcctccagaagaagatggccggcgctgcccaagccgaggacgcccgctgtcaatgttggctctgtcatacgttatgctacgtgggatggacagctctgtttgccgtggaccgcgatccacgcgcataccaacagggcctcgggtcccgcgacatcactcgccgattgccattctcattgccccgtccgtgtgcggcaagcccctaccgatgtccatttttcggcggtatgatgaagtgctcgggcaccgggaactgagagcacaacagcaggacctctttgccgatctgctcgatgaccgattcgttgtcgatgttctcggccacctggtgaatgaaggtggcgatctgctcggcctccggctccttcatcccccgggtggtgatcgccggcgttccgatcctcaagccgctcggattgaacggaggggccggatcacctgggacggtattgtaattgctgacgattcgggcccggtccagggccttggccagcttcttgcccgggatccccttgttccgcagatcgatgagaatcagatggttgtccgtccctccggtgaccagcttgaagccgtattcgagcagcttgttcgccatcgccttggcatttttggctacctgcgtggcataagcgacgaactccggcgtattggcctcggccatggccacggcgatcgcggtcagcgtgtgcatgtgcgggccgccctggaggccgggaaagaccgccttgtccactttggcggcgtgctcagccttgcacaacagcaggcccccacgcgggccacggagggtcttgtgcgtggtcgtcgagacgatgtctgcatacggaaccgggctcttgtgaatgcccgcgaccacgagacctgcgatgtgggcgatgtcgctgacgaggtatgccccgacttccctggcgatctggccgaagatctcgaagtcgatgatcctcggataagcggtggcccccgagatgatgatcttgggacggtgctttttggcgaggtctcgaatggcgtcgtaatcgagcaggccggtctcggtgttcacgtagtaggggacggaattgtagaacttgctcgtcagggagaccttccagccgtgcgtgaggtgtccgccgtgggacagggacatccccataatcgtgtcacccggctcgatcagcgccgcataggcggccaggttcgcgaccgagcccgagtaaggctggacgttggcgtgatcggctttgaacaacgctttggcccgatcctgggccagtttctcgatcaggtccgtgacctgctggccttcgtagtagcgtttgccgggatagccttcggcgtacttgtttgtcagacagctcgcgctggccatcatcacggcgcgcgagacatagttctcggaagggatcagccgaatcgagccgctctgcctggcttcttcctgccggatcagctcgtagatctgagggtcgtactgttcaagagccgtttgcataccgaattcttcctaaatgacgtgtcgatcatggcggtcacgaccccgcaaggtcaggtaaccggcaagccggtacttataacgcggcgtcgcagcccacgcaagtatttatcgttgacaaaaccaggccgactactacagtgggtccattgtataccctgtgaggtgataatctacttgccgctatgcccgaaccggatgctcaagcacaagcgcaggccgaagcccacttcgaacgagcccgccaggctgttgaggcgggcgatttcgaccgggctattgatgcatatctggcgggactgcgccacagtcccgacagggtcgagggcggccacatagatctgcgcgtgctggctctgcgacgcgaggagcggggcggggccaagccttcacccgaggaggtcgagcaaaggctctcggagggtgacacgccgctggagaagatgctcaacgccgagtatcttctcgccaaagaccctcagaatctggcctatggagaagcggtgcttcgcgctgctgtcgcgggtcgatacaccgagacggtcaagtggatggcggacctgatgttcctggccaacaacaatgcccgcaagccttcggctgcggtctacatcctgctgaaggattcctacgaggcgatcggacaagtcgagcgcgccgtggccgcgtgccagcgtgccgcacggctcaaacccgaggatccgatgctggtggaggacctgaaacgtctggcgggcaagctcggtgcttccagacgcggcggaaccggggcgccgctcaccgtctctcctgccgcccggccgcgaccccagcggacccgcgttaatgcggcccagcggccccggacgcaggagccaaccggagccggtccggagaagcccgttgcggccgctccgtcggacccgagtgatctggccgccgccagggcgtttttcgagaaggcccgcagcgccgcggagagcaagaactacgactacgcgatcgagatgtacctcgagggtcttcaacgggcccccgatgcgctcgaggagggacacctgcccctgtgtgagctgggtcttcagcggcgggggcgcggcggcaagaaaccctccgtggtggagcgggtcaggcgtctgaggggcaggactccgctcgaacagatgctcaatgccgagtacctgttcgcgaaagaccccgaccacacgccctacgccgaggcgatgctcaaggcggcggtggaaggcggataccaccgcaccgcccactggatcgccaacctgatcttccagacgaacaacgccatcgagaagccgtctgtgcagacctacatcctgttgaaggactgctacaaagcgatggggcagtacgacaaagcggtggcggcctgccagcgggccgtgcggatgaagcccgacgacaaagagctggccgacgagttcaagaacctctcggccgaattgacgatgtccaagggcaaatacggggtcgagggcgacttccgccagtcgatccgggaccccgagacccaggccaagctgtattcccaggaccggatggtcaagacggaggactaccggctcagcgccgtcgaggaggcccggcgggcctacgccaaggagccggacgtcgcccagaacgtgttcaatctggccgatgccctggcggatctggagcaggaggacgcggaaaatgaggcgatccaattgctcagcgaggcggccgagcgccacaaggacttccggttccaggaacgggcaggtctgctccgcatccggcagggccgccgcaggctccgggacgccaggaagcaactgaaggcggagccatccgatgccgcggtccaagccgccgtcagggaactgacggaggccctcagccgcacagagctggagcattaccggctctgcgtggagaactaccccaccgacctgtcggccaagtacgaatatggcctgcggctgatgcgcggcgagcggtacaatgaggcgattccgtttttccaggacgcccagaaagacccgcgccgacggattgccgccatggacaagatcggctactgcttctttatgaagggctggtacgccgacgccatcgatgtcttttcacaggcaatcgactcctacgagataaaagatgatgcaaccgccaaggagttgcggtataatctggcccgagcgcacgaggcgcagggcaacctggaccaggcactggagctgtaccgcaggatcgcccagctcgactttgggtacaaggatgtcagtgaacgggtagatcggcttcgggcggagttgaaatcggctcggacggacggcccgggcgacgccggatcgagagaatcaacctctcagtgagttttgtaatcgcgttttggaaacgaccaggagaacaacgtggcacattcgttatcagcgaagaagagagtcaggcagaacgccaaaaggcgagtcatcaatcgggcccgcaggagccaggtcaagacgcaggtcaagcgcttcgaagccgctttgagcgaggggaacgtcgagaaggcgacagcggaattccgggccacagtcaagaagctcgacaaagtggcttccaccagcacgatgcacaagaagacggcggcgcggaagaaatcccggctggccaagaaacttaacgcgttgaaggccggtcggcagaccagtcagccgtagggctgcggccggtccgacctccggccccgtagcctgccaattcggtagcgctgcaggaaagtgccagcacccagtcgagaacgagatcgattgggtgctgctttcgttggagtggcctatgcccaatgtgtatcgagaccggattgtcaagttgcttcagcatgccgattacaccccggttaaggtcgcccaattggccagggcgctcggggtgcaggcggatgcctatccggagttcaaggcggccttcgaagagctgcgccgcgccgggcatgtcgtcatcggaggcggcaaccttgtgactttgccctccatggcgggccagatcgtcggcaccttccgcaagaacgccaaagggttcggctttgtcgtgccgctcgaagcaaacgcgcacggcgacctgtttatccctcccgacagcacgggcgatgccatgacaggcgacaccgtcatcgccaaggcaacgcgcaaaggcacacgggggggcgagacccggtataccggcgagatcatcgaggtgctcgaacgtgccgacaatcagttcatcgggaccctgaccaggcatccggaggcgtggatcgttcagccggatgggagccggttcatcgagccgatcgtcgtcgaggatgttacggccaagaacgccagggagaaggacaaggttgtcgtcgagatcctgtcgtacccgaatgagcagtacctggctcggggcgtgatcgtcgaggtgctcggccgcgccgggcgatacgagacagagattcaagcggttctgcggcagttccacctgcccggcgcgttcgacgaggagtgcctggagcaggcgcgcagcgccgcggccgccttcggcgccgaaccgggcgccgagcgggaagatgtcagcgacaaagtgattgtgacaatcgacccgcccgacgccaaggatttcgacgacgcgatcagtctggagaccgacgccgacgggaactgggtgctcggcgtgcacatcgccgacgtcagccacttcatcccggccggttcgccgctcgacgaggaagcccgccttcgaggcaacagcgtctacctgccgggcaagacgatacccatgttgccggaggtcctcagcaacggcatttgcagtctccagcccgaccagccccggtttgccaagagcgtttacatcacctacgacgacgccgcccggattctgtatcgccgcttcgccaacagcatcatccgctccaaggcccgcctgacctacgaactggctgatcggatcctcaagggccacaccaaagacaccaagcccgaagtcatcacgttgcttggcaagatggaggcactcgcccgacggatcgagaaacgccgggtggacaacggcatgctccacctcgatttgcccgagcccgagctggacttcgacgagtcgggccaggtcgtcgatgcccatcccgccgacaacagctatccgcacacgatcatcgagatgttcatggttgaggccaacgacgccgtggcgtcgctgctggaccggctcgatgtgccgttcatgcgtcgcattcaccccgagcccgatgcgctgagcatcaggaatctctccaggctgctccgcacgatgggctttcccatgccccgcaacccggaccgccgggcgatccaggacctgctggattctgtcaaggacgccgaacgttcgttggcggtcaacctggtcgtcctgaggagcttcgagaaggcccagtacgcgccgctgcacatcggccattatgccctggcctcgacgcactactgccatttcaccagcccgatccggcggtatgccgacctgttggtgcatcggcaattgcagtactatcttgaggatcggatcgacgtcgccaagcaggtggccgccggtcaggaccttgcggctatcggcaagcaccttaccttcaccgagcaacgggctgaggatgccgagcgcgacctcgtcgccgtgctgaccctgcaaatgctcagcaagcggatcggtgaagagctcgattgtgtcgtgaccggtctggccggattcgggctgttcgtccagtcgcggaagttcggaattgaaggtctcatcaaattcgaggacctggggcctgacgagtggctgctcaacaaggccgcccagtgtgtcgtcggcgagcgcagtagccaggaaatccatttaggccagcccatgcacgtccgcatcatttcggtcaacgttcctggacgccagttgaacctcgcgcccgttgcgccgttgggcgaaggccgaggcaagtcgcggcgcgaatcggaccgcaagcctcgccgcaacgcccgcaagctcacgcgaaaactccaggcgaagaaaaagaggcacaagtgacgccgtttgcgaaagcttatccgccggccttcttttccatcgcggctatgagaatggctttgtttggtttcgtggggcaggccgcctcgcaggcgccgcaacctgtgcatttccggctatcgatctcggggatcagcgtgtattcggtttcggaccacgcatagcggatcgctgcgtgcggacaccacctgcggcactcggtgcactctcgaccctccgccagcaggcatgaactcatatccactctgggcagacctatcggtttcagacctttgtcttgaggggacagccgcacaagagcaccgctggggcagaccgccatgcacttggtgcaatcgaccaggcagtaattctctttgaagtgaaggacgggcgtcaagagagctgccagtccgtgatgaccgagagacggctcaatgatgtgggttgggcatgcccggatgcagttgccacagcggacgcagaggccgcgaaactccggctcgtcgatcgcgccgggcggacgaagcggacgcggtccggagctttggctggaccgcgtaatcgccgcgagcgtggcaccggcggctactcccagcaccgttcgccgggccagcgccggattccaccgttcgggcgaaggcccttcgcgctttgtgcgtgcgtacctggccagatggctcagtacgtcttgaaacgtccccagagggcaggccctgccgcaccagatttgcggccatacgaagctcgtcgtcagaaccagaaacaggggcagggccatcagccagcctgtccgcgatcctgtgatcccaaacgcccccgagaataccgccaaagggtccaaccatagcagaaggggatagccgaggcacgcgcctgccaaggtcagcagcacgatccaccggccgggtgagaaccgcttcgcaggatttcggccgcaccgccggcccaatcggcttgctgtgtcgacgcaaaggcccaggggacaaatccatcggcagaaccagcggggccgcagcatcgcgatgaagcccacccccaatccgaggcacgctgtggccactaccacgcgtgtcgccaagagcgaccccacagcgataaagggactcaacgccgggaccagcaccggccatcgggactgcctggctgccagcagaacaagaatggccgcaaccagggacaggcagcggaccagccatcggatgtggcgaagccctgcggtatccgtccggtctgattgcccgttgaggtccgcaaagtgactcacccgaggtaggcctcctgctgccggaggattttctggaccttcgcgatgtccacgtcgcggggccgacagttgtccttgacagctacggcggccgcgacgcctgcggcgtggccggtgacgaagcagttgggcaccagacgcaccaggtcggccatgcccatgtcgacgctgatgcagcggccggccgccagaatgttgtccaccttcgtcgggaccagggccccgtagggaatctgccattcgccgtgggtcgcggccgaagagccgcccacgccgaccacgtcggggaacttcgtcgcatttctcaggtcggacagccggacgcgattcaggccgttgaggacgcgggtgatgcgcacgccgagttgcggcgcggtctccaccagatagaccttttcgtatccgggcgtctggcgggtcctctggacgttgttccagatgaacttgcggtgattcatctccatccgtgtcagggtcgcgatgtccagcccgtccacttccggacccgtcaggttgacccagttgacgccgggcacaggggtggccgagcccaaatgcttcggtttcggagcctgcctggccttctcggcatcgacccggtcgaggttgccgatccgtgagacgagaccgacgttgtgagagcgatgctcaaactcggcgccggccgccgcgaacaggtcgccatcgcccgtggcgtcgaccacggtccgggccaggatcgcctggcggcccgatttgctttcgaagacgacgccacgcacggtgttctcggtgacgatggcatcgacgccccagcagtgaaggaacacgtcgatgcctgcctcctcgatcatctcgaccatcatgtacttggcagcctcggcatcgacggtggggttaacgccgggacggcggtcgatgatcgcgccgtccagcttgtccagccgtcgcatcatctcctcgccgattccctggcagacctgctttccgcctttgacgatgtgcccgatgatcagcacgacaagcccgccggtccagagccctccgaagtggccgtaacgctcgaccagtgtgacgctggcgccggcacgccgggcggcaatggcggccaccaccccggccgagcctcctccgactacaagcacgtcggtttgatggaggattggcagctctcgctgcggttggatcactttgccgtcgacgatcgtcgcggccgtgcgcgtgtcctgaacgttatgagcgtcgatgaccgaactctggaatccactcgattccccgacgccctgggcatgagacgccggcgcgccggtcaatccgagtcccgcggtcagtcccgacagcccgatcgccgtgagacattcccgtcgattcatatgcttgtccataaaggctctcctgtacatcgaggtggatcgaggtcggatcggccgagtgtcaattcatgacgctgtgataccttgggcggcacggattatcaaccgaaaacccctttggcagagagaggaggctatggcaggccggacgcttcgatgcgctcggcgatctgtgggatgccgtagcgcctgtagaagtgccgcaccgtgccccagagatcgtcggtcaactgtctcctgacctgccttaggaactcctctgggatttcgcgatagtgcgcttcggcgatagccccggcgatacaggcctgggtgtcgctgtcaccgcccagggaaatggcgttgcgcacggcgtcttcatacgagcaggagtcgagaaacgcgatgatcgcctcgggcacggagccctggcaggttacgtcgaacgcgtagtcgggtcggatcgcatcgaccgtgcgggaaagatcgtagccgaattgttcgctgacgtgcctgcgaatcgactccttgtcctcgcccatccgggcaaggtagaccgccagtgccactgcctgggcccccttgatgccctcgggatgattgtgcgtgcactcggcggtcctggccgcctcgcgcagcacgtcgtcctgcgaatcgaaggcccatgccaccggactgacgcgcatggccgagccgttgccaaagctgccgtatggttcgctgccctccgtcagcatccaccggaggaaacccggtccgtagccgcgtcgcggatgccggcgggcgtaagatctgatcgcgcgtccgtagtcgcggtcacccagaagggcatcggcgacggcgaccgtcaggaccgtgtcgtcggtaaaggtaaactgcggtccgaacaaccggacgtccttgtgtttggtccgcagattctcgtacaccgagcccgcaatgtcgcctgcgattgcaccgagcattgtgccaatcccacgcaaggaccgtcttgtctgcccgcggccgccacaaccgctcgctgagccgatagcatactcttccggcctgattctgtcatcccgctggcgtctggaagggcccaattcaggtttcttgacaggccccggcgattctggcatactgacccggctgtaagtgctttgcgttcgaagtcttgagaacatccacccgggtggctgttggagccgaatatgaaggcatcggaaatgcagaagggccagaccgtcaagatcgacggaaagctctacgcgatcgtcgatttcgatcacgtcaaattgggcaagggtggcgccgtctatcagaccaagctcaagagtctgacggacggttcgattcagaacgcgcggattcgcagcgaggaagtggtcgaggaggtcgagctcgacaaacgcaactacgaatacctgtattcctcgaacgaagggcatgtcctcatggatttgcagacgttcgatcagattactctcgacgacgatgcctttggcgacggcccgaagtacctcaagcccaatacgccgctccaggtcagcatgtacgagggcaaacccattatcatcacccttcccaatacggtggacctggaggtgaccgacaccccgcccgagatcaagggcgccacggctacgagccagacgaagccggccaccctggaaacggggctggtggtgacggtgcccccgttcatcaaggtgggcgagaccatccgcgtggacacccgcacgggtttgtacgtcacgagggtcaaaaactgaaccgcgtcggacggcggtaacggcgcctttgccgagaggatcgagttaacgaaatggctttcgagaaagtaagcaagattctcctgaagatcttcggctcgcggaacgagcgtctggtcaagtcgtacacgggtatggtggagcagacgggtgcgttcgaggagcggatgcggcagctcgacgacgcggcgctgagggccaaaacggctgagttcaaggccgccctggcggccggaaggagtccggaagagatcctgccggaggcgttcgccgtcgtgcgagaggtggcccgccggaccgtccagatgcgccactttgacgtccagctcatcggcggcaacgtgctgttcgagggcaagatcgccgaaatggctacgggagagggcaagaccctggtggcgacgctggcggcttatctcgtgcacctgacgggacgacacgtgcatatcgtcacggtcaacgactacctggccaaacgcgacgccgagtggatggggccggtctatcatgcgctgggtctgacggtcggtgcgatccaggccgacatggacaccgccggccgcgaacgcaaagaaatgtacctctgcgacatcacgtacggaaccaacaacgaattcggtttcgactacctccgcgacaacatgaagacctcgctggagcagatggtgcaggggcccctccagtacgccattatcgacgaagtggactccatcctgatcgatgaggcacggacacctctgatcatctcaggcccggccttcgacgatgtcacgcgctacaggaaggccgaccagattgcccggcagttgatctcgctccagagcggctacgaccggatcaagtcgcagatcgaggccgccgaacgaaggattgccaatgcacagggcgagctttccgaggccaagaaggataaggacagcaagcggatcgacaaggcccagcaggccatcgacaaggcccaggaggagatcgaggcggcccagtcccgcctggcgcaggcgacccagtactacgaggtcgaattcgaccgcaagcaggtgcgcctgaccgacgaaggcgagaaggcggcgcaggacatcgcgggcatggggtcgttctacacagggaccaacatcgactggccgcacctcttgcagcagagcctccgcgcgcacgtggtcttcgaaaaggagagggactacgtggtgatggacggcaaggtcgtcatcgttgacgagttcaccggccgattgatgcacggccgacagtggtccgacgggctgcaccaggcggtcgaggcgaaggagggggtcacggtcaaggaggagacgcagaccctcgcgacgatcacgcttcagaatttcttcaagttgtacgacgacattgccggcatgaccggtacggcggcgaccgaggccgacgagttcatgaagatctacaagctggacgtcgtggtgattccgacgaacaagccttgcatccgagacgaccgccaggacgtgatctacaagtcgatgccggagaagttcaacgcgatcgtcgaggagatcaacgagatcagcgcggccgggcgaccggtcttggtcggcacgatcagcatcgagaagagcgagttgctctcgacggcgctgacgaagcggcacgggctcgatcacgaggtcctcaacgccaagcagcacgcccgcgaggcacagattgttctgaaggcgggccagcagcaccaggcccgcaacggccagatgcgcggcaacgtgaccatcgcgacgaacatggccggccgagggaccgatatcaagctcggtccgggggtggccgatatcggcggtttgcacatcctcggcaccgagcggcatgaggcccggcggatcgacaaccagctccgcggacgcgccggccggcagggcgacgccgggtcgagccagttcttcctcagctttgacgacgacctgatgcgcatcttcgccccggagtggaccgtcaaggccctgagctggatcggatgggaagagggcgaacccatctaccacagccggatcagcaaggggatcgagaaagctcagaagaaggtggaggagcgcaacttcgagattcgcaagagcctgctcgaatacgacgaggtgatggaccaccagcggaagatcttctacgcgcgccggcgacaggtccttgaaggtcgcaatctccggacgatgatcgaggagatgatcgaccatacgatcaccagccactgcgaatccatgctcgataaggaatacgcgtacaggtgcatgctcgagtgggtgcggacgaacttcgatatcgagctgaagctctccgacgtgatcgaggtcgagccgaaagagatcgaagccctgatcaaggatcgtgccaaagatgcggcgcgaagcaacatcgcgttgtctctgggggagtatctggaagactactccgaccccggtacgtgggacgtggcgggcctgacgaagtgggcgatgtcggcattcaaggtcaatctcagcgccggcaaggtcaagaaccagtcgccggaggagatcgaggaacagcttgttgccgcggccggtgagcagatcgatcggagggattgctcgcccttggcggattttctccgtgccgatttcgctcttcggcgcctgaccgaatgggcgcgggccaagttcgatctcaagctggacatcgagcgtctgaagggtctaaacgccagggaggtccgcgaactgatgctcgccgaaacggcggagaagtaccgccgacgcgagattgaataccccgtcgaattcgcgatgagcatggcctacggtgcacaaggagccaacgtctacggcttcgagtcgctggcgcagtgggcgaacaagaagtacaacgcggatctgtccgtcgagtggttgcagagcgccaagccgcgagacgtacacgagcggttgatgcgtctcagtgccagctatagcgacggaaagctggaggaggaactgaccgacaaggtccgtggcctgacccgcgagcagttgatcgaatgggccaatgcccggttcgaggcctccttgacgcccgacgacctcgatgagggtgcggacgtgaagacgcgcctgactgaagtcgggcgccagtttatgcgtcgcgaactggcagacctggaacgatacgttctgttgcaggtgtatgacagcacctggaaggaccatctgtacgcgatggaccacctgaaagacagtatctggacgcgctctttcgcggagaaagatccgaaggtcgagtacaaacgcgaagggtaccggatgttcaacgagatgctcgagtcgatcgaggatcgggtgacggacatcgtattccgcgtccatctcgaagccggaacgcgggcgcgcagcgtctggaacgtcagccagacgacgcacgacgaagtggggcagtttgcgatggcggaaaggcagcgtgcggccgcccaggcgccgcagggcgagcagaaggtcaagcagattcgtttggagcaaccgaagatcggacgtaacgatccctgtccttgtggcagtggaaagaaatacaagaagtgccatggcaaagacgcctgatggcggaagcgaggtagatcgggaaggccgggcaaaatgacggaggtccgcaaaaagaaaacatcgagcagcaaggcgctacccgatgttttccggaggggagaaaaattgtagttctactttctcgtatcagcaaccatacaagccgattcgggcattgtacgggttttttgtcgcaacgtccaataaagattacgcgagacgttcaagatagttcgggatctggcgcgaaattctctcccgcgaatatgggtgggagcgggcaggctggaaattcctcagcgggccggttcaagtccgccggttttgtctcgacaataacagcgtggaggaggatactccagtcgccagaggaatgccttcggctgggcggtgagtgcatggacgggcctgggggcccacgagcaggttgtcttcagcatggatgagcggaggccgaacggggtcggggatgggcacggatggtaccggcctgtgcttgcgggcgtgggtctggccagcgcgtgcgtgcttgtctggtgcggtcgttgcctgccggtgggcgtcgttgacgggacccacgtgctctacgttcccgccgtgttggcgtgcctgtggttcggctggcgagggttcgccgtggcggcggtagcggcggcctgcgtggctactacgcattttaccggggggacggtggatgcggctatcccatcggacgtgcttcgctcactgatcctggtgctcgtcagtgcggtggtggcagggctcaaggaaggacaccttcgcgcgcagcgagatctccgacagcttcgctccagaccgagcagagactgtccgatggaacggccggatgcaggcgatgccgccggggcgagcaagtgcttccctgcgttccggcccacggacgcggtccgtatcgattccgagaacaacaccggatggaacctgctgcgcaccctcatcgacaacctgcccgatgcgatctacgtgaaagatcggcagggccgcttcgttctgggcaatccgccggcccttcgccagaagggtgtgaccagcgtcgaggggatcgtgggcaagacggattacgacttcgatccgaaggatgtggccgaacgggccgctcgggacgagcaggagctcatgtccggcagccgacccatcatgaaccacgaacgatgtgtgctcgacgcgagctgcgggacaaagagctggtacctgacgacgaaggtgccgctgaggaacgagcagggggaaatcatcggtttggtggggatcgggcgggacatcaccgatcgaagacgcgccgaggaggcctatcggaccctcgtggaccactcgctccagggactggtcgtcatccaggacgagcggatcgtgtttgccaaccgggccatgagccgaatcagcggctacaccgtcgaggagatcctggcgaaatcaccggcagaagtgtgggacttcatccaccccgaagaccgccagcgcgtggtggccaattatcacgcgcgtctggacggagaaccccttccggagaactacgagttccagatcgtccgtaaagacgggacggtccgttgggtggagctgcatgcctgccgcattgagtaccgaggccgtcccgcgatccatgccgcgtgcgccgatgtgaccgagcgtgtgctggctcagagagccctcatgcagagcgagtcgcagacacacgcgctgctggatgcaatccctgacctgatcttccggcttggccgagatggtgtggtgcgcgattgccgggcggcgaaacgtcaggttctgttcttcccgcccgacgaattagttggcaagaccgtcgccgaggtgcttccggagccggtctcgcggtcactgacggagctgatcgagcggaccctcgagaccgggcaaatccagacgctcgaataccagttgcagacgccgatggggatctgcgatgaagaatgcaggctggtggcatgcggcccgcacgaagtgattgcgatcgtacgcgatatcagtgtccgcaagcgggcagagcatctgtccagaatcacgcatgatctggccgtgcggttgaatacggtgggggaggtccgtaagggcgctcgtttgtgtctcgaagcggcgatcgaggcctcgcaggcagactgcggcggggtctacctcgtcgaggacacctccggcgcgatgaagctcctgacgcactgtggcacgtcggaccgcctgacgccgaacgtgctgagcataggctccagttcagcccagatgcgtctgctggcacaaggcaaaccggtctactacggggccgatgagcgacacatgccactcagtccggcccagaggaaggcggagctctcctcgtacgcggcgctgccgatccgcaacgaacatgctctggtcggtgttctggtggttgcctcgaaccgctgcgatgccgtgcctcgacaggcgcgtccggcactggagaccattgcagcgcagatgggtacgacccttgcccggctgcgcgccgaagaggcgttgatcgcctcagagcgcaactaccgggagatcttcaacgcggcgaacgaggcgatcttcgtccaggaccccgatgccggtaccatcctcgatgtgaaccgcagcgggctcgacatgttcggctattcctatgaggaattgcagcgcatgaacgtgggggacctgcgtgccgaaccgctgttcgaccgggcgggcacaacgcgaaaatggttcaccaaggcggtacaggaagggccccaggtggtggagtggttgtgccggaggaaggacagaagctgcttctgggccgaggtgaatctgaagcaggccagaatcggaggttgcgatcgcatcctggcggtggcgagggacatcagtgaacgcgtgcaggcggcccgtgcggccgaaaaccaccgcgtggaactgacccgtgcctggcacgccaatacgcttggcgaaatggcttcgggtctcgcgcacgaactcaatcagccgctctgtgcgatcgtcaactacgctggggggtgcctgcggctggccggacgggagccctttgacaggaagaccctgtgcgactccatcgcgcagatcgccgaacaggccgaacgggcggccggcatcatcaaacgcatccgcggcttggtggcgaaacgcgagccccggcgaaccagcctcgatctgcgcgatgcgttgaacgaggcgatgagcacggtggagaccgaaatcgcccggctcgggattacggttgtgcgcgatctggccgaggacttgcccatcgtgcgggcggacgcggtgggtgtgcagcaggtcgtgctcaaccttgtgcggaacgcgatggacgcgatgagcggcaaccgggttccgctgcggaggctgaccctctcggcacgcgccgtcaagaatggcgaggaagtcgaggtggcggtcgccgacaccggccaagggctttcgtcgcagttgattgagcgggtctttgattcctttttcaccacaaagaacaagggattgggtattggtttgtccttgagccgacggattatcgaagcccacggcggtcggctgtgggtccggtcggacccgggctcaggagccgttttccgatttacgttaccggcggaaggagttgagcatgagcagcgcgaagcccacggtgtttgtcgtcgatgatgacgaggcaatctgtcgatctctgtgccttctgatcgaggatatcggtctgaacgtccagacgttcagcggggcacgagaattcctggcccagtacgaaccatcgcagccgggctgcctggtcctggatgtgcggatgtcgggaatgagcggcctggaactgcaggcgaagctccgggagttgaacatggagattccgatcgtcatcatcaccggccacggcgacgtccccatggcagtggaagccatgaaggccggcgcgatggacttcatcgagaaacccttccgcgaccaggtattgctcgacagcattcagagggcggtggaactggatcggcgcatccgcgccgccaggcagcggtcggagagctttcagtcgcggatggaggatctgacccgtcgggagcgtcaggtgatggacctgttggtcctgggcaaatcgaacaaggcgatcgccttcgaactcggcatcagccccaagacggtcgattttcaccgaacgaatgtattatccaagaccgccgcctcctctgtggtggaactggtccgattggctcacgaggcgagcgggaccagggaaaaggctgggattgcccggaaaacggattggtagaaggcttggccgaccaggcaatctcagaacgctccggccgactttcccgttcattgggtctcggattgagccgattctgtacagtgatgggtgcaggcattgggtcacaagatgatggtgaggagttgtctgtatgagttccatgggggcgagagagacgttgcagtgtgccaagcccatactgctgatcgagagtcccgaggcccgctcgccgactgtgaaggaggcgatggacgagttgggaatgacccgtcaggtggtgcaggttcacgacacccaagaggcactgaagcgtctggccgcagggcaggctctggagccggcggtcattgttttcgacggccttgccgggggacgcgacgttctggagttcctccgggtgcttaagtccgaccagaatcttaagacgatccctgtgattgtggtggccccttcgggagatggacagatcgtcaacgagagttttgcactgggggtggcggggtatatggtcaaatcgccggcccgtgatcggttcgtggaagccgtccgagcgatcgggcagtactggacgctcagcgaggtcccgctgtgcgcatgagagagggacgagcgccgtggcgagcgaggcaaacctcagaaccgcctcttcagccaccgtaatcgaaatacgtcgcggatgcgctcactgaaacgcacgcccatccgttgcgtggctgtcgggaagtcgtacttcctgaggtcctccggtccgacgcgaggaggttcatgccgaaacagcgcagcaatagccgcagcaaggcggccgatccgccacgggcggacggaccgcttggcgggtctgccggttccgggtcgaaaccccagcacgttgggggccatcacctctgcaccgcccgctggagtgaaaggagcagctcatcgccggtgcggctgacagcctcactgacgccgaagagctggtgccgttcgagaacctccggcgcgtcacgatagtaccgctcgacggccccggttcccccttcggccgcgcccgcagtccggtaggcgcgcgccagcagccatgcgctgatctcttcttcatattccgccggatagatcagggccactgcgaatttgtcatcggcgtaccgagccatgtgcaccttggcccggcaggggggcgcggcggcaaccgccgcaccgaccagacgcttgaaatcgcttgtcgcctgctcctgcgtcgtggagaagaagagcattccagactccaactgaaacatctgggcggggacacctctgatctccagtcggccgtccgggtaagcccggtggatcttgtagaccttgccatcacgatagcgttcgctttcgagcagctcggccacttcctcggctgtaaacccgaccccggcctggtcgccgaaatcgaagatgtacagccctgtgtacctctcgggtttctcaagttctggcagtttcataatcagtgattatatgaggccacagagattcttgcacgaactttcctggccccaccacccggtcacggactgcggattgccgatttcggattcgcagccagaagcgaatctgctgtccgaaacctgagccccgggcgatcttcaacggtagcggatcggctttcgacttgcaggtttccggatttgctcgctgggcggcggcgggcccggttggagcgggtcctttcttgccggcccgacctgttcaggcgcggccggagaggattccgctacgcttcctggcacgacaggctcggattcgtttgctgccggtgtccgttcgcggatcgcgggacccggcgccgggtcgctctggggagcgggtgcgagcggggtttcggtctgcccaatctgatcctgctgcctgtaatagcgcgggatgtgcgggctgtaatactcctggtacgggttgggcgccacggctccaaccccgatatccgtcgggatcggcatctgaatgggccgacggtaggatggccgcgaacgcgtactgaccagcggtccatatacataggggtttgtctggacatacgtgtaggtgttcggaccgtagtacagccatcccccgggccgataccggtgaatcacaatcacgccgggcccatagtagttgtactgtgcctgggcggttgtagcgatcagcatcgaggcgagccataaacccagacccacacgctgcgacagtgttcttgacaccataacagacctccgtgcagagattaacgtttggcgccgactccagtttttacgtcgagcagacgggtacggtgcgatccattcacgttgtcctcgccagcagaagcatgctatatccgccgtctcggccggtcaagtctatccacggtccttgacgcgtcggttccggcgccggtaggatcggggcgtttcggatggacgcatgcgatgcgcattggacgcacatcacgggcgggggcggattcgcctcgacgcaaagggccagggaagggcgagcgctgggggttcacgctgaccgaactgctggtggtgatcgcgattctggcgctgctgctggcgattctgctgccgatgacgcaccgcgctcgcaagcaggcagcggccatgacctgccagtccaacctgcggcagtggggcatcctgctcaacacctacgtcacagcgaacgacgggaagttcttcaacgaactgacattcgtcgaccgatgggccaagccggagccggccaccgtctgggtcaagagctggtggtatatcttcctcacagagttcggcaactatcgggatatctggctgtgtccgatggccaggacgccctcgtccaatggcatgacgggcgcgagattccgagcgtggcggggtgtgcggggggccgaacgcctcccggaagggggctggggcgaggtggagcgggagtttctgggcagctatggcgtcaacagttgggtgggcctcggccggcagccggacgaagccaggcccaattccgcctgctggaccacgcccgacgtgaaggaggcctccaacgcgccgctcgtcttcgactgttgccgctcgatctacagcgggacgctggacgggccgccgccccatgaggatgcggacccgctcttgtatgagagcagcaacgtctgcatggaccggcaccggggcggaatccacgcggtgttcatggactggtcggtccgcaaggtggggctcaaacagctatgggcgctgaagtggcatcgagagtacgacacggccggaccctggacgaaggccggcggcgtgcggcccgacgactggccgcagtggatgaagagattcaaggacgactgaccatttgcgggggcgaacgattattcgcccttacggtctttgtcaccactcgccgaaaaactggtcggggcggatcatcccgccgatgcccaccagccaggaatcacccgtgaactggccttcgatccaggcgatgaagttcttattcacctcgcaattggcgccaaggctcaggccgaactgcgagtcctcctcgacatcgccggagcaacagatccgaccttgggtcacgccgtcgaagacaaaccgcgcgtccatatcgaggtcgccgtcgatgatctggaggaaggggccggcccatacgctccaggcgtcgcctcgatagacggcggtcagtccgatctgggtctgaagatagtcgagcttcgcggtacctgtggcgatttcgccggggtcctcgggattggcaatccggaaatcgctgtcgtccgggtccagccacgtcacctgggccaggccgtcgacgcgccaggacccgcaccgatagagtgtcgcgcgggtgcccacgccggcgccgaagccgaaactgccgtcgaagccgacttggccaccccgacccccaaggacgacgccggggccggacgccttgatgtctgcatcggcatcggacgcacccagacggacgaacacgtcccagtcccggcacagagcgtattcgatgcgtgcgaacagcatgttggtcttcatgccatcgatcatgaattcctggtgatacttctcggacagtccgccgatgatgctttcggtgcagcttccgtcggcttcggcgtcgatcttctcgtacgcgtactcgattccgaaggcccattgtcccttctgcatgacgggcaacgccggtcccagcggggcgcccgccagagccgacggaaccccgacggccaggcagatgcagaggctaacgaatgtcgttctcggtctcattccaagctcctttcattacgaagcgggatttctgcggacgccgtactagaaaggcctctcggccaccacgagcactgtcccttgtccgacgaaggggagtccggactgcaacgtgccgccgacgtacaaggtcgtgattccgttgtcgggaatcgcatcgaggacttcgatcagatcaaaggtggcacggatctgcacctttcccttggccaccgtcacggatcgcgcaccggcggcgatgttgccgggatcaagcgacagcgtttccagtcggatatcgctctgcttgatgtcggccgggaacacgagcagggcagtgaggcagtccgaggggttgtagccggtgcggccgaggatcagcgggctgaacgtcagcgcgaccggcaacggcgcgtcacccacgcagacttccacgctcgcggtcacgaccggagtctccgccgcgtcgagactcacggagttgaccacgatctggccgggtgtgaggtcatagtccagccggaccgtcaaccgcacgcactgcaccgccccgggccgcagcaccgggtacgcccatgtgaaggtgtgagacggcgggtcgtagtatccggagccaccgtcgccttcgacgcggacgaacgtcacgccgtcgggaaggtggtcgaccacgaacacgccggtgaggacagcgtcgtttgtgttctcgatacagatttcgtacgtgacttcgccgccgggatggacgcaccccgcggagactttgccgtccgcagacgccattaccgtcttggtcacgatgggcggctccaactccactgtgacttccgtgtccgtctcggccggtaggacctcatcgcatgccgctcggacgtggttggtgaccgtcgatcccggacgtgcgtcgtcgttgactcggacgactatgtccgcacagaccttctctccggcttccagtgtggcataccgccacgtgtaggtgtgattggcgcggtcatacgatccggagtccccgtccccgccggccgtgacgaaggtcacctcagccggaagcgtgtccacgatggtcacgttgctgacgcgctgatggttgtcgttttgtacgcacaccgtgtaggtgacctcctggcccgctgcgacgtacatcgtcccttgatcgttcatcccctggacgccgccggtaacggttttggtcaacagcaacggcttgggcttcgcctgcgtggcaatggccgtcacgcgggcggtttgcggctcggcttcgtcactgtcgatcgtcaccgagttctcaatgaccgtacccggcttggtttcttcgcgaactcccacgacgatctccacacaggccgaggaatcgggtagcagggagggatacgaccacgtgtaggtatgcttatcccgatcgtaggacccgtaaatgccgtccccgtctgcggaaacgaacgtgacttcgggcggcaggacgtccaccagagacagaccctgtatgcgatggctgctgccgttgctgtcgaagcagatttcgtaggtgatctcggttccgattcccacgtattgcgttttgctgtcgtccatggtcgccccgtcgctgatccgcttggcgacgttgaggactcgatcgatcggtttgaccgtcacctcaatctggtccgtggtcgcttcgatctgatcgttgtcgacggtggctcggttgacgattacggttccggccggcgtcccggccttgacctgggtcacgatctccagacagatgctctcgcccgccgccagagaggcgatggaccaggcatacgtgtgggtctgggcgtcgtagtggccgaactgaccgtctccttcggcgctgacaaatgccaattggggcggcaggaaatcgaggatcgtgatatcctccacgggcaccgtgttgtcccggttgtcacagcagatgcggaacgtgatgttctccccgatcccgacgtagcgcgtgccatcttctttcggctcggtccccccggcagtgatggttttggtcaggccgagcggctgcaaccggctcggccatacggtgacgtcggcggtggcggtggtcggttgggtctcgttcgtagtgaggaccaccgagttggtcaggacggttccggccggaacatcgtcccggatttgcgccgtcagggtgatctgtcccgttgcgccggccgccagagaggcataagagcacgtgtaagtgtgattcaccggatcatacgaagcggtacccgaggtgctttcggcgtttacaaacgtcatctccggcggcagggtgtcgacgatcgagaccttggtcacaggatagttgttgttctcgttcgagaaagcgatggcataggaaacggtttcgcccgcgttggcgtaggcgaccccatcttctcgccggctgtctccgatcacactcttgctcagtgtcaggggcttccagtcaccgccccgaaccagtgcgtcgacgctgacggacgtaggcgggatgacccgcgttcgtatcgtggcccggttgcgaatccgcgttccggccggaacacgcgggtcaacctttgcccggagttcaaggcaggtttgagaccccgcttccaccgacggcagcagccatgtgtaggtgtgcgtcgccgcgtcgtagcgtccggtatcaccatcaccgtcggcctctacaaaagtcacttcgctcggcagcgtgtcgacgatggacacttcccgtatgaggctcaggtttgcgaaactgagctggtacgtgatcgtctcgcccgcactgacgtagatttcttcctcctcgtccggctcggcgtccgtggcgatgcgcttgacgaaaccgagtggattgtagccgatgtccctggccggaatgacgatgtccgtcggattaccgatgtcaaggatcgacgagaccagaaccagattcgggtcgtagcagagcaaatcgtcccccccgggcaggttgctcaggcccgtggtcacgtaaaccagattgctgaccgggtcgacggcaatgcccatgactccggcggtctcatccaccgaaaccgccttgctcttgcccgtaatcatgttgtactggttcaacgaggtgtcgccgaagtatcccgcgcccgtatagatcagctcgttgtacaagtccagggcgatgctgaccgccgatcgattgagctcgtactctcgaacaagggaccatgtggaggtttcgtagacgcgaatcgtccggttgccgctggcggtgtagagcagacctctggcctcgtcgagatcgattccgtatgcggtggatccctccagggcaaacggcgcgcccgggaacagggcgagtcttcctgtgctggcgttccacgtgtagacatagagtttgttggtggctcggtcgacggtatacaggagatttcttgtctcgtcgtagaccaccccggcgaggttttccgcgcccggcgcgacgaccgtgcccacgtccgccatggttcgcgcatccaggatctcgagggcgttggaaaactcatacgtgatgaagatgtaccccgattcccagtcgatcgccatgccgacggcgccgccggctcgaaacggaatcgtctggcgggcctgaaatgtcagcgaaccgtccggaccgatgtcatacgccagaacaggcagcggttcggcggagttcgtgatctccgcgatcacgtaagccgagcgggcttgcaccatcgtcgggccggctgcggccatcgccagaaacagactgctcagaataatgccgtatcggttgattgtggcttttcttttttcgcttcgcataccccactccttgcacatcgggcgaccgccttccagtcgcgggggaccgacgaactgtcgccatcactaccacatccatgggaaaactgaggaaaggaagcactcgccgcacgggtgcggtagaatgccgcagaaacctcccttctctgcgggcatccagtatacggcttgccgcgtcgaatgtcaaactgtattccgcgcacgatggccgcacggtctcacccaatcggcgggggtttggtggcggcatgggagccgggtgcccttgtctgccatcggtttggggccttgggctgccgctacggctggacttcgaggagcgcctcgcaccagtggcgaaggtcccagcggtcgaacgcgacgtcggcggtgaccacgtacaccgacgggaccaatgaggtgggaacggcaattcgtatggtgatggcaccttccgtccggggctcgaccgttagatgggcggattccggttcggcggtaaacccatcgggcaagtgtggcgtcacggtgtacttgtgggcgcgatccgagtggttcaacaggcgtatctcggcctccgccgtctgaccggggcgagcggtttgtccataggggtaaatccgggcccactgctcatcgatgccgtagttggcgtcgtcccagggaaacagactggccaggagagccttgcgttcgaccagcgtctgacgcatgaacgccaattgtggcccgtcgaattgaaagaccggcgcaacgtgctcgttgacgagcatgcagttgtctggaagggtacccaggatgtccaggcagcgcagatacccgtctccttcgtgcatgaggttgcggttcaggagacaataatcgtcaattccggatggcgtgaacgaatcaccgagaaagaaaagcttctcgccgttgtcatgctctacaagcagggcgctgtggtagagggtctgccccggatagtcgtagaaggtcaactgaaactcgcgccaacgtctcgtgtgccggtcggggaccacggtcacgtccgcgattgattccgtcgtcaggcagggcaggcgataggcctgggggcggcgcgcgatgtcggcgaccagtggcgtgacgaacaccggacaggaaaaggtcttcaggagggtgttgatcttctcggtgtggtcgtcgtggtaatgggtgaggaacacgccttccagggatgtcagttgtccggcatcgcgccgcctgccgatctcatcgatgatggcctgcgagccgcagtcgatcagccagccggcgccgctctgcgagagcagaagccgggagttgccgatgcacaacatccagccgggtgggtcctcgtcgatggtcgccagtcgcatccatggcacaccgtgcggcgtcccgagaacgcgctccgcaagaccgtcatagctacggctgaaatagtatcgcccggcgctgatagccaggtagttgcgatagaccgcctgaagccgatcgatcagatgcgcgatggccgcctggggggctcgaacgaccggtccgcgggccggaacgagcacgtccggcttctccgaggcgattgcccgcaagctcgcgatcagttgaaccacgcgggctgcgtacccatgatagccgccgatccgcaggtcggggacctcgtcctgaaggctgtagagatccaggacttgcccatcgccgtagatcaggtcgccgacgaaggcgtagcggatgccatcgacgtccaacaggtagctgacggcgccccgcgtgtagcccggcgtgcccatcacgcgcacggagaggtcctgccacgccagggcttcgccgtcacccaccgtacggtccactcgtaacgggactacgggaaccttggttgtctgctgacggtagtcatggaatcgcccgcgtgcaaaggtgttccagaactcctccggtcctgcgaatgcggccgcttcggcggcaggcacgatagccttggcaccgcgctggacgaggtcccgtcctgcccagaccacgtcgcgccggctatgtgtgaacaggaccatgtccgcctgctgaagcgtcccggatgggtcgccatagatgaccagggtgtgtccattgcgttcgatgcagacgccgttgaccggcccgggcagcagacgcacggatggactgaggcgagacgctgccagttcctgggcagtggcacgtgaacaggcggccagaacagcgagcagtatgagagcaactctgcgcatcgcgatctcccggacaggactcggttgacggtctccggacattggtcacggtcataggataccttgtgtgggtcttgctggcaacgcgtctttgctcgacgaagaccggacgatccgcccgcagcggaaacagcagggggcccgcgccccagcggcgcaggccccttgatgatccacgttgtcgcgtcctcgacacggacgcgaatgtctaccgatccccgaccaggtagcggacttcgccggccgagagggcccggttgtagatgcggaattcatcgagcgaaccggagaagtacgcgtcggcggtgtactgcgagcggcccaaccagttctgcgtcgtgttgccgaggtccttcggcagagtcgccgtcgggccgctggcggccacgtcgccgtccaggtagagttgcacctgcatattggcaccgtcgatgacgaccgccagatgatgccagccggtttgcagcaaggtggtcgtctggatgaccgactcgctgccgccggcccgcgcgatggcaaaccggatcgggccggccggaatacgcgggcacaggaacatatagccggccgtgctgctggtgccgaagtcaaagatccgctgccaatcgcctccggtattggagaagttcacccacgtggcgaacgtcgaatcggtcagcgcactcagaaccggaccaatgggcaatgcgacgtaatcggcaaatccgtcgaactgcagcgcctggccctgcccggccagcgacggcccgtaggtggggtcgttgaacgccgtgccgtggtagccgttgccggaactgtcctggacgttattctccatcgcatacagcgccaccagcgatgcagcgcccgggtcctggggcgtcaccgccgccggagccacgcggtacaggcggatgtcatcgatgtacaccacccctgagccggcgccgtcgatgccgatgctcagttctgtgacatttcgcaggttaacgcccgtcgaggccaaatcgatgttccactgcttccacaacgcggttgcgaggctgccggcggcgccgtcgtacccgatcttggtcccgttgattgtcacgtagagctgagcgggggcgttggccatgtcgccacggaagtacagcacgaacgttgtgataccgcctgcggtccagtcctgtgcgccgtcgatcgtgaagtcggcccgcgaattgccctcatagaatagcggcatcgattgccgcccgctgtgaacgaggtcctgttcggcgaacggggcgtcgaagtagccgaccgtcgagccggtcccgttggtgtagccgtcgatccatgcatcgtagatggtcgtgtgtgcctcgacgtcgtctgtgtagctctcgaaatcgtccaccacgaggaattcctgggtggagaagctccagaccgcgccttcccacgaacggatggcttcggcctcgttgacttcgacgaccttccagaagtactcggtggccaggtccaacgtgccgggatcgtagctgctctggcttgtggtgccggccagggccgttccgtcaacgacggcggcttgatcggtgccgaggtaaacctcgtgcaatactgcttcgcggccaccgcgccaatccaggaccgtgtcgatggcgacatccgttgccccggaagcgggttgcggctctctcggctgcacgggcaggtagtagaagcggacctcgctgagcccgaactggccggtgaggccatagccgctcttggctgtcagtcggacgtatttggccgggactccctggaggtccaccgtggtgttgtgtgtgtaggtcgtcttgcccgtcgcctgggcaaaccgaacgtcggtgagcacggtccagtccgtcccgttggtggagtactccactgtgacgtccttgaagccgaagcccagcatcatctcgaagacgacgttgtagttccacacccaaagctcgtagagcttgtagacctgatcaaattcgtactgaatccacacgggctcggcgccaccggtggtggcggcccacatgtcggtgttgagggcggagtgctggtcggcggcgttgaggccggatccgtcgatggtcttctctggaccggaatccggttccgaggtgccgttgctggttgcgacgatgttcgtgatcgcgtaggcgaacggctcggtggtgaagctccagacctcgcctttgaagattgtattgtcgggtgcggcgttgacctcatcgacgcgccaaaagtacgtctgcccgaaggcgagcggtccagcggggtcatacgtggcgcccgactgcccctgactggccagtacgcccatcggattggtccggctggcgctctcgacgtcggccggtgaagtgccgaagtagacatcgtgcgatgccgcgagtgcccctggcgtccagcccagcacgacgtcgcggggcacatcgacagcgccgttcttcggccgaggattgcctgcggtctccgcctgaggcatgccgttttcgaagatgtccgcgatctcctccgccgacaactcgcggctgtacatcgcgacctcgtcgatcgtgccgaagaattgctggccgccgttcgagctggtttccgcgccgatcatgatcggccagtcgttcggattgatgtccacctgcccgacggactgggcctggccctccatctcgccatcgacgtagacgcgaatcgtcttgttgccgaaggttcctgcgatgaagtgccattcattgtcgatcaccacggtccgcccatccgccaacgaggtggtgttgttgacgaaaaactccaggcgggccaggccgacattctgagtcaggaccaagtcgaagccggtggtctgccactgcgacttgtcgatcacacggccccagttcggcaccgtggtggccttgacccaggccagcagactgacctcggcggttacgtcgtactccgggatctccggcaccgtcacgtgcgagccgctgacgaactccagggccgtgcccttctggccggcgacccatgcggcattgcctacgacggtgccggggttgttgtaactggaggcgtccttggcggtggtgccggcgccgtcgtcgaagggcaggtacaagaccagggatttgtccacagcccaagcctgtgcggccaccaggcccacggtcaacagaatgatcaatcgcgacgtactcatggtgggacctccttccaactctgcttgtgtcagtgtgccgaagacctatggagtcccgtcgccgatgtggttcgggccacccggcggtgccggaccatcttacctccattccatctaccccattatagagcacgaacggcggaagcccataaggaaaatgcctggacgcgatcagatcccacgccgatgccgctatcgagcggtgggagcctctttgttcacgttcgcctcggccatccaatccgaccacatgatgtggccgtacagagggccccagcttccatcggagttccgatcgttggccagatgtacgccgtgcaggtagaccttaccatcggccccctcagtggctgcctgggcggtcatgaatcgcgtgatgcggtaccgcaactccgtgcgcgtggtatccgtccattcgagcacgctttcctcctgccagttttccgccggcagggtgatgcggagggcctttcccgaggcggatttctccttgacgatgtcctcggccttccgatgcagttcgtcgattccctcgccttgggaacggtcggcgttcatataggtccgctcggctcgcacggcacggttcttctggtcctgctctttgatctggccgagtttctgcttgagggtggaaagcttggcgtcgtcgggtccgacggtgccggcatagcggtcgatcgcctgttgcagaggcgttacgtcgcgctccatcacgagattgggcttcttggtcggatcgctttgccagccggtgtcctggttcagccaggcgaggatgcggtcgaattccttctccatatcggccgaaagcagggcccggcttcgccggagcacttcgggcatgtcccgcagacgctgcttcatcgtctcttcgagggacagcagttccgctgtcttgccgtgtgggaattcggccttctcgtactcgggccaaagcgcctgcgcctcggcgagcagggtggttcgctcctggatgtcggattcgctgagcgtgacgccgtcgatcaggtacttcggactgcccgcgccgacgtcgacataaggacgcagcctctcgacccacggtcggcaggcctgttcctggcgggcgcgagcggcgccctcgttgtagataacgagctttccggccagtgactgctcctggtaaagcagttcctgcgtcttgccgtgggggaactcggtcttcttgtaggcggccatcagctcgttggccttggcgtaggcttgacggcacttttcctgatcggcctgcgaggcggtgttgaaggacgacccgatgagcagatactggtcgcctttgggatcgaagaagggagcgaacttggccagccattccttggattgagtctccttctgctgcgcggcttcggccgccgccgcggccgcggcatccgccgtcgatttggcttggtcgtactgcgtcccgacggcgatcagccggtcggtggcggccttgaactccgcgttgccggctgggatcttctgcccatatcggctctggatctcgtccattagcttctgcgcctggccgagtttcgtgccggcggtctgcaactggttcttctccagggccgcgaccactgcattgagcgtgtcttcgagtctcttgagttgtgagacgaccgcattgggcaggtctgatggcaccggatttggcgtttcggccggcttggcctcttccttcttctccgcactgccgccgacgggccgtccgagccgcctttccagtttcgtcgtcagatcttcggcctgtttgaccagggcagcgagtttggcatggtccggtgccgcctccttcagttgggccagcaggttgcgggcttcgagcagttccttctccgcccgagccggctcggttgtgatccttcgctgaacgccggagagcgtttgctcaatcgtcttggccagatcgtccggcccggccgcttccacacgcgcggcgcccgcgatcaggaccagggccaacgcgcacatcaagccacccacaaacctgccggaatctctaccgcaccgcattctccacctccttctcgtcctcttttctgtcatgggccaggctgtcgcgcaggctccaaacctgcccggcgtccttccgttgtggtccatattctaccatgcccccatccggtgtcccaaagggaatccatcgcaggccgtccggcgggacagtgccatgtgacaacttccctggtggacacagggatcgcgacaccggcggacccttactgcggctggatagcggtaccttggtcggcggaggcgcgatgtgcctgtgacgaaggttcttctttgacgggggcggcaggcggggctatgatccgggcagatgccggaacttctggcggaaagctcggatggcgatacccaagctacaactgcatacgaagatcctgctggcgattgtcgtcggggccgcattcggcctgttggcgaaccgtctggcttggggtttattcgtcgcgacgtatatcgaaccgctgggaacggccttcgtgcggctgatcggcatggtgatcgtcccgctggtgtttgcctcgcttctggtcgggaccacgagcctgggtgatatccgcagtctgggacgcatcggcgccaagaccatcggtttctatctctgcacgaccgtcgttgccatcaccatcgggctgctgctggccaacgtcgtgcagccgggctcgggcctggcggagaacgccaagagcaggctgatcgaaggtgctgcacagcagaacgccaccggcgaggcgcctcgtgaatcggcctcgatcaaggacgttctgctgaacatcatcccgacgaatccgatccgggcctttgcagaaggacagatgctccagatcatcttcttctcgctgctgaccggtgtctgcctgacgctgatcggtgccgagcggggcgggccggcgattcgcttcttcgaggccgtcaatgacgccatggtgatgatggtgcacctgatcatgaaggccgcgccactcggcgtcttcgccctgctcgcggcagtcgtcgccgacttcggcctgcacatcctggcggtgctcgccaggtacagcgctgtggtcctggccgggcttctggtgcacatgctgctggtgtactccctggccctgaggttgttcagcaaggtgggggcgggccggttctttcgaggcattcgtccggctcagttgatcgcctttagctccgcttccagctcggccacgctgcccgtgaccatcgagtgcgccgtggagaacctcggggtctcccggcacatttgcagcttcaccctgcctctgggggcgacggtcaacatggacggcacctccctctaccagggcgtcgcggccgtctttctggcccaactctacgggatggacctgagtctggcccagcagttgacgatcgtgctgacggccacgttggcgtcgatcggcacggcgggcacccccggcgccggtatcgtgaccctggcggtcgtgctgggcagtatcggcgtgcctttggaggggatcgggatcatcctgggcgtggatcgcatcctggatatgtgccgtaccgtggtgaacgtcaccggggatgctgtctgtgccgttgtggtggcctcgacggagaatccggttcgccgtgcgccggcaggagagtgaatcctatcggtcccatgaacaacgggaggttgtgaacatggtcgagaagagcagaggccttatcctgatcgccttggcgctgctgatattgtgggcggccccgtgcggcgcgtgtttttccatcgtcgtaggcaaggacgcttcgaccgacggctgcgttctggtaggtcacaatgaggacgactacccgccgcaggtggtcaaccactacaaggtgcccaggcagacgcatggaccgggggccacggtggtgctccgcaacggtggtgtgttggagcaggtcgagcggacctgggcctatctctggtcggagatgcccggcatgctctactccgacacttgtgtcaacgaatggggcctgaccgtcacttcggacggctgcccctcgcgcgaggaccggcccgagatcaccgccggcggcatcggctggatgctgcgaaggctgatcgcgcagcgggcgagaacggcgcgcgaaggcgtgttgctggcaggccggctggtggagcggttcggttatgtcgcttcaggacggacatacgtcattgccgaccccaacgagggctggctgttctgcgtcgtccagggcaagcactggctggcccggcgggtcgccgatgacgaggtggcgatggtcgctaacacgtacacgatccgccaggttgatctttcggacgaagacaacgttctggcttcgacggacatcgttacgtacgccgtcgaacgcgggtggtacgacccgcagagcgacgggccatttgactttgccgcggtctatgccgatcccgcctcggcctctcatccgaacaatgcgggccggcagtgggccggactgaggtatgtcgccagccaggagattgcaccgggtttcgacctgccgttctccgtggtcccgaagcgcaagctcggcgtgacggacatcatggagatccttcgccacgatgagggaaaccagccggaatcatcgccggcctcgggcttcggctgtgcgctgtgcagcggcgcgacgcagaccagcttcgtcgcgcaattacgccgtgaaccgccccgcgatattggcctcgtgtattgggtatgtctcgcggagcctcgaacctcgatctatctgccgtttcacttcggcatcacggacttcccggccggctttcgcacccagccggaacagccgaccagcgatgtttacgaccgcaaggtcggcgcgtcgttcgtccccgatccgcgcgaagccttctgggtgttcttgaacttccgcgagaaggcagagcggcaggggcgggccgtcgtcgccgctgccagaatgcaggcccgacgcatcgaaagccgggcggttgcgatgcagaagcctctggaggacgcggtgcggtggctctacgagaccgacccgatcggcgcacgtgaactgctcaccaatttctcctatgggctctatctttcggccctggaagggatggacgcagcgctcaagcaaccaatgactgacgagcagattgtcacccgggccagggcgatccacgagaccgcgattaccctggattcgcacgtggacatcgccgacgagtcctacgcgacggctgatctcgacccgggcgtcgaccatcctcagctcagatgtgatttggtcaagatggccaagggaggcgtcgacggcgtcttcctggcggtttacgtccggcaagcacccgaatggagcgcccagacgtatgctgaagcgcagcggatggccgagagcaagttcgaggcgatcgagcgactgacgcagcgcatgtatccggaccgctgcgccctggcgctgtgtcccgacgacgtggagcgggtcattcacaccagcaagaaggctgtgatgatcggcgtcgagaacggcttccccatcggcgaagaccttgacctgctgaaccagtactacgcacggggcgctcggtacgttaccctatgccatacggagcacaaccagatctgcgattcgtcgagcgaaccgaaccccgttcacaacggcctgtcggcgttcggcaaacgcgtggtccgacgcatgaatgagctgggcatgatgtgcgatgcctcgcatgtctccgagaaggccttcttcgatctgctggcagcgacgcgagccccgatcctggtgtcgcactcgggctgttcggcggtccatccgcacgatcgcaatctgaccgatgagcagcttcgggccttgcgtgacaacggcggcgtgattcagatcgtggctctcgacgcctacctgaagccggagacgcctgaacgcaaagaagccgttcgccgactccgcgacgagttgggcatcccctcttatgccgaacgacagaagtggtccacggaacgccgtgcaatgatgaggccccggctgaaggagtactaccgtcgctacgaggagttggccgagacggttccgatcgcgaccgttcaggactacgtcgatcacatcgaccatgcggttcgcatcgccggcatcgaccacgtcggcatcggcacggatttcgacggcggcggcgccgtcagcggattcgccaaccacgccgaggcgctgaacgtcacggtggaactggtccgccgcggatactcggacgacgacatccgcaaaatctggggcggcaatctgctgcgtctgtggcgctgtgtcgaggccgtcgccaagtcgctgcaacgatgatcccagaggatgcgtttgaggcaagtctatgaaaaaagtcgctgtcttattgctgttggtcgcatggatatgcgtccccggctgtcagagcccgcgtacccaagtctcgggcaagccgttgatcggtatcacgacggcctatgacgagaagcgccaggtcagcgaggtcgacatatcctatgtggaagcggtgcttcgcaatgggggcatcccgctggtcctgccgccgatcgacagcgaagaggcggtggatcgttacgtgcaggagctggacggcctggtgctggtcggcgggcgcgacattccaccttcgatgtacggccagacgccccacgagaccaccgaggtgctgcccgagcgacggacccggttcgacagcacgctgattgcccgctggatggccagcggcaagccggtcctgggagtctgtttgggcatgcaattcaccaacgtcgttctgggcggcagcatgattcaggatatcccctcgctggtcgggaccgatgtgaaccacaagaaggtctatcatcgtgtgacgatcgcgccggatagcacgctggcgcgactcctcggcgccgagaccgcgatggtctactcttcgcaccaccaggcggtcgaccggatcggtgaagggctcaagcccgtcgccctcgccgacgatggtgtggtcgaggccctcgaacggaccgacggcggtctgggtctgttcgtccagtggcatccggaagccatgatggagaaagacccgaaccacaccaatgcgatctacggctacctcgttcaactggcccgcacgccttcccggaagcgcaactcttgtccagactgatttcgatgacgagagcaaacccgcgcaggcgaaacgtgcacctacggggatgtgccggccttcttcgcggaactccacagattggcttcgatcctcgcttgcagcgatctctggaagcccgggtgctgggctacccaatcaggctcttcgtacagcccgagattcgggcggatgtgccagaagtagaaatagtccacggtatagaggccggcgaaaagccccacgacgaggacggctcggcacaggactcgtcttattcgtccgctcgccttgccgaatgcagcagacgccgcccagaccaggccgacgagcaagagcagctgcagcagcagacccaccaactcctcgctactctcgcgccagtggacggaccactggcagagggcctcaaacatcagcaggtggattaccccgacgatcgtgatgcgcacaatagctctgttcatcatagttgttccgctgcttcacctttggcctccaactgctcccattatccagtccgtcccgctgagaagcaagccgaaacggcacaagtccacaagtaatctgcgtctggcctgaggccaccaggatgagacaggattgactctcgggcatacgatgcctgccgaacttcgatgtgatcctgcttcgattcctgggctgtctgaggggagcgttgcttgggcgggccagagcgatgaagccgatcgaggtcgcagacaaaacacccatcaagcagttgctctatccccaacgcgtcttcggtatcaagggggaccagttttgcggtttcggcgggttccaactctggtggtatgaccggcagcgcggccagtgcgactgcggcgattcgcaccggtccgacccgcgtaaactcgtgacgcatcacagcctggacgaggccgcccgaatcctgtggcaccacccaaaagggcagtacatccgcgtcaagcgtgttgacgaagaccgtgggattcaggccttagagcacctggaagacgcccgacattgaatcgcagcgttggccggggctgatgcctggcttcgaggcaccggcgcggtcgatcactgcaggaacgggaagtcggaccggtggtattcctgtcggcggaactggcggtgccatcgctgattccagagttcccacagagggattttgcgcgcggagccgtcgaggaagcaggcctgtgtggcgtgattgtggcgttcgaggaaggtgcgccagatctgagtgccgttctggccattctcggggaaatcactgaagaccaccagcggctggctcggcagccggtcggtatcctggggccgcaggtgccagtggatgcagtcgacaaagaccggaatcccctcggtgttccgctcaaaggcgtatttccagtaccgctggtccttctccaccggatcggtgatccagcggttcatgccgtaactgccccagaaatcggccttggagatgaagtcacgcgaacttggctcggacgcctggcggggccggccccaagcatgatggatgcccccgcgcatctccgtgctctgatagtcgacggaaggccggttggccgaggggcaaacgcgggccttgtccacatccttataataggggcgcaacatcgccatccagtcgccggggatggtctgcacgtcgccaccgagcggataggattccagccacaggatgccgtcgaattcggtagcgtattgcgaggtggccaggccccactggcgcaggttgtgcaggcagatgacggcccgggcttgttctttggccctgtgcagagccggcaggagaatggcgatcagcagggcgatgatcgcgacgacgaccagcagctcgatcaacgtgaagccacgtttcctgggaacgtccatgtaccaacccccacgggcagtcatgcccttggtccatacgcttggaccgttgagggggtttgctcaaggattgcaccgctggtcgaaggcgggtctaacccaccgacgcttcgaccggttcggcattgtccttctgcccggcgggttcttcgcctcgcgtgcaggcgttgatacggaagatttcttccatcgtggtgattccggaggcgactttggccagtccgtcccgggtcatcgaccggatgcctttggcgcggagtctttcgacgagttcacgatgtcgagcacccgcgctaatcacggcgcccagctcatcgtcaatcggtgcgacttcgaagattccggtccgtcccttgtagccataccagccgcattcggcgcaacttcccgggtgcagcagttgcttcggagcatccatgccgaaccgcgcgaagacgtctgtctcggtttcgtccagctctcgcggctgggcgcattggccgcagacctgccgcaggaggttctgggcgatcaccagccgcagagaactgcctatgatgtgatgaggaacgcccaggtagtgcagggcatcgaccgctccggccgcatcgcgggcgtgaattgtcgccagcacgagccggcccgacaatgccgcccgggccgccacgatcgccgagtccttatcgcgaatctcgccgatcaggatcaggtcggggtccatgcgcaggatcgtgcgcagacccccgtgcatggtcaggccatgttgctcgtccacctcgatctgctgggcgtagggcagcttgaattctaccgggtcctcgatggagtaggtggtcgtggtttgcaggtccatcagcgacgccaggccgtacatggtggtggtcttgccggatccggtcgggccggtcaccaggaccaggccactgagcgaacggacggtcgaggcaatcctgtcgcggtcggcgacgcagaaacccaggccggagaggtcccagttgtctttgggcaggctcagcagtcgcaggtgggccgattcgcgttcccgaacgggcgtcagcgtcacgcgaatctcccaggtcgtatcctcgtcgtgccagtcgatctggccttcgagaggtgtgaacgaacgtacgacggtcaaacccgcggcgctcttgagctggttgagcaggcgtcggccttccgtcggcggcagtaccgccttgggaacgatgactccgtcgacccggtggatcacacgcacgccttcgtccacgcagtgcaggtgcacgtcggtggcattgtccatgatggcgttccacacgagggtgtgcagaaggtcggggcaggacgtctcgctggtcttgctgaggtccgttgcgctgctgattccacatgcctgggccatgccggatgctccttccactgggccttgatctgttgtcgatccatcggccattccgttcccgggccggacccgtacgggacatccggcccgcacgctatgtcggcctctgtgcagggtgtcttaaccggcattctccatacagtcgtcaaatcgtctccaacgcgtttcgaatcgaggcggaggtcgctcgttgcctgagaaaggacatgaaaacgtccgatatcatcaagaacccggcacactgcgccgtcctgttcttgcccgataatacgggccagccccccacgccatgccatttatactgaacaatccatcgcaagtgtcagaaatctttctatttgaattaaacaccccatattcacgctggcgataatgccctgtgttggattagccactcagaaaggagacacagacaatggagacgtcagtggaacaacgcagggagactcggaccgacctgtcgtggccggtcagtgtgtggcttcccgatgcgggccgattcttcaacggccgcagtgccaacatcagtaaagtgggagtctttatcacggttccgatgaccacgccgattcggcggggctctgtggtggaattgaacttcccgcggacggatgagctggccgaaaagaaggggcagtatgcccggatcaagagaggtcgtgtcgttcgagtcgaccgcaagggcacgctcgaagacgcagtcatcggtctgggtattgccttcgaatagagccggccggacgttgccggcaggatgtcggtgatccggatcggctgattcgtcgtcacggggcaatgaaaaaacacgaggcggacgcttctcgcggagagtctgcctcttccgtttcaggcaatcggcgctcgccataccctccatcgagatgagaatgccggtccgccggactaaagagcgaccgccacgaacatcagcagcatgcccagagcgccggcggctatggtcattctgagccagcgagagtatctggcgtatccggggtcctcgtcctcgaactcgtagtagatctcgtccagctcggagtcgttgcgggggcgcagccatatccgggcgtagagatgggcagccagcgatccgaggatgaggaatccgccgaggatgtacatggtccgtgccacaatcagcatgccaccatcctacgccgtgtccggcccggcccaaagcaaaaaaagggccattgcccggtccggcgcctccggccggaggtgcggattgacagggtgactggcgactgctatcgtccgtgttcccaggaaggcatagtgctttccacctgatgacgggcagccgggatatgaagacaatcgacctgcgaagcgacactgtgacactgccgtcgccccagatgaggcaggcaatctatgaggccgaactgggggacgatgtgttcggcgaagacccgacggtgcagcgattggaacgaagattggcggatctcgtcggcaaggaggccgctctgctggtcgccagcggaacgatgggcaacctcgtttgcgttctgacgcactgcggccggggcgacgaagtgatcctcggggaccagtcgcacacgttctattacgaagccggggggatcagcgcccttgggggcatccacccgcacacggttcccaatcagcgggatggaacgttgcgtctggaagacatggcagcggcgatccgcccggacaacgtgcactttccgcgaacgcgtctggtttgcctggagaacactcacaatcgatgcggcggggcggtcctgtcggtggaatacaccaaagctgttgcgggctttgcgcatgaacatggcctggcggttcatctcgatggggcgcggatcttcaacgcggctgttgcgctgggcgttgatgtcaaagcccttacgcagcccgtggattccgtgagcgtctgcctgtcaaaaggactggctgcgccggtcggctcggtcgtctgtggctcgaagcggttcatcgaggaggcgcggcgcacccgcaagatcctcggcggcggcatgcgccaggcgggaatcattgcagcggcgggcattgtggcgctggatacgatgatcgacagaattcgggacgaccacgataacgctgcctgcctggctcggggtatcgctgggctgagcggcctgaacgtggatctcaccgctgtgcagaccaatattgtgtacttcgacgtggtgcgtgaagggctgtcggccgaggtgctcgtatcgcggctggcggaacgaggagtcaagatgctctgctcggcgccgggccggattcgagctgtcacgcactacggcatcgagcggagcgacatcgacgaggcgcttgcggcgctggccgacgtcgtcgttacaccctgaagttcaatcgctgtcccgccggtagacgatccgcccgcccacgactgtcgcgtagaccgacaggtcctcttcgaggagcaccaggtccgcatcgtatcccgtctggatcgatccggtctttctggcaagccccaggatggatgccgggttctcggttgccgtacggatcgccgttgccaccgaacatccagtgatactcacgaggcgggccagcatctgattgagccccacggcggtcccgatcaacgtgccgtctttgtatcgggccgccccgttgcgggtctcgtagggaattccgttgtacgtgtatcgcccatcgggcaggccgagcgcctgcatgccgtccgtgatggtgacgaaccggcttggtcccaatgctgcaaaggccagccgcaggaccgacgggtggatgtgcacgccgtcggtgatcgcctgaaccgtcacgtccgaccgctcgaagatcgcccccaagggcccggggtcccggtgatgcagagagggcatcgcattgaacagatgggtaacgtggttgatccctgcgtcgaaaccggcaagcgtctcgtcgtaggtcgcgtgggtgtgacccagcgaagcgatgacgccgcgatcggccagggccctggccatttcgagcccaccgggcagctccggggcgaccgtcatcatggcaaggccgtcgccggttttggccagaatcgcctccagggccgaggggcttgggtctgtcagacagtcgggctggatcatgcccctcttgcgttgggagatgaaaggcccttcgaggtggatgccgagcaggcgggcgccgccaaggtcgcggccgatgcactcggcggcgacctccaggtggcgattcttctgccccggcttgtagatcgtcgtcgccaggtaggaggtaacgccgcaacgggcgcacgccttggcgatcgttgccagtgcctcgggcgtggcgtccaggacgtcggcgccgccggcaccctggatgtgcacgtcgatgaatccgggcgccagaagccggccgccggcgtcgagcacctgttcggccgcggcagggggctcgccggcgccgatccaggcgatgcagccgtcctgtatgaggatattgctgcgcccatcggcccgggcgtcgtcgtatcgcttgcagcctcttatcagaagtgatgccatgactgcctcgtctattctcttctggcctgcgcgactgccgctcgcagcccgcgagcggaacgccagaatacgacgaagaacacctgtctgcaaccccataacagccgccggctccgccggagggcggttttgtttgaccgtgtcgcctgtttccgctatcgtgacgcgcgcaaagtccggcggtgacgtgcgcgtgcacgggtcgcgcgatgacgacggcaaatccgtgttctttagactggaggcaatgccgtgcgacacggaatacccattgcagacggcgtctactgggtcggcatgaacgaccggaagacgaacctgttcgaatccatctggcccctcccacggggggtctcgtacaattcctatctcctgatggacgaaaagaccctgctggtcgataccgtcaaggacctctcggtgaacgagtatctggtgcgactgaagagtcttctgggtccggaccggcggatcgattatctggcgatcaaccatatggagcctgaccactccggcagcgtgcctgtgctgcggcggatcttccccgccatgacgatcctcggcagcaagaagaccgccgaattcctccaggacctttacgggatcaaggacaacgtccggatcgtcaacgacggcgacgagctgagcctggggcggcgcaagctgcggttctacatgacgccgatggtgcactggccggagaccatgatgacctacgagatcaccggcgcgattctgttctcgggagacgccttcggcggcttcggttgtctggagggcggcatcttcgacgaccaggttcacctggagtacttcgaggacgagatcctccgttacttctcgaacatcgtcggcaaatactcgcccatggtgcagaaggccatccaaagactgagcagtctgaatgtgaaggtgattgcggccacgcacggcccgatctggcggagccggcccggccacatcatcagcctctacgaccggtggagccgttacgaggccgagccgggcgtcgtgctggtcttcggttcgatgtacggcaacacgcagatcatggccgaggcagtggcccgcggcctgtccgacgcggggctcaagtcggtccggatgcacaacgtctcgacgacccacgtttcctatctcatccaggacatctggcgttaccgaggtctgctcctcggctgtccgacgtacgatgcgagcgtcttcccgccgatggatgcgttgctgaggctgctgagcaccaagcggatcgccaaacgcatcgtcggtctgttcggcagtcacggatgggccgggggcgcggttcaggcgatggctggttttgtcaaggacaacggcctcgatctgatcgagccgactgtggacgttaaattcgcaggaacgcccgagcaaatcgagcaatgtcacgaactgggtcggagaatggtcgagcgtctcggcacaacgagggcatgagacgcggccggcaagagcctctcgtgctggagtggttacgatgacagacaggcaacgaagctgggaaaagcggctggccgccaagcccgatgagctgacgatcaactatgtcgagtcgctgtcgtacgacacgcggctctacaaatacgacatcgtcggctcgatcgcgcacgccacgatgctggccgagcgaaggctgatcacaccgaccgagctgaaggccatcaagagcggcctgatcgagatcagcgaggagatcgaagcagggcgattccggttcgacaagaccaccgaagacatccacatggcgatcgaggccgccctgatcgagcgaatcggcgagccgggcaagaagctccacaccgcgcgcagccgcaacgatcaggtggccaccgacattcggctgtggctgcgcgacgagatcgagggccagcaggcggcgattgtgcagcttcagcaggcgttcgtccagttggccgccaagcatgacaacgacctgatgcccgcctacacccacctgcaacgggcacaaccgattgtcatcggcgcctatctgctcagtttcgtcgagcagctcgaacgggatttcactcgcctgaccaactgccgcaacctgctgaacgtctcgccgctcggcagcggggccatcgccggctcgacgctggccatcgaccgggtcagcaccgcccggcagttgggcttcgccgacatcgcctacagcagcattgacgggatcagcgaccgcgacttctgcgccgagttcattttcgattgtgctctgatcggcgcgcatctgtcccgattcgcggaggattggatcctgttttcctcgaacgagtttgatttcatccggatcgacgatgccttctgcacgtcgtcgagcatgatgccgcagaagcgcaatcccgacgtgctcgaactgatgcgaggcaagaccggctcgctgtacggcgcgctgatcggtatgctcacgatcctcaaaggccagccatcgggctacaaccgcgatttgcaggaggacaagattcacctgttcgccgccgccgatacggtccgtgcctcgctggagatggcccgggcggtggtggcgcacacgcagttcaagaccgcccggatcgccgccggcctggacgccgggttcctcgacgccacggcgctggccgagtatctggtgggcaagggggtcccgttccgccaggcgcacggcatcgtcggggcgctggtgtcgctgtgcgagaaagacgggcgctccttgtcggatgtgccgttggagacgttccaggaacactgcccgcaagtcggctgcgatgtgtacgagtatctcggggcgcggcatgtggtccagcgttatgcgtcggcgggtgcggccgggcccgaacaagtcaagggccggatcgcctactggaagaaacatcttgctgaacgatgagacctcgcgaagacgatatcacggcatggttccggcagcagagccgcatcgatccggccgcgtttcccatcgggatcggggacgacatggcggaggtgcgcctcaatgagaccgcgtcggtgctgatcaccaccgacatgctcctcgacggctcgcatttcgatctgaagaccgcgacgctcgaacaggtgggctacaaggccatggccgccagtttgagcgactgcgcggcgatggcgaccgtgccgctggcggcggtcgtggcggtggcgctgccgccgccgttcggggcgcgccagctcaaggagcttcacgccgggattacgcgggcggccgagaaatacgactgtccgctcatcggaggggacatcacgtcgtggcgccacgatcatcccttcgcggtcaatgtcgccatgctgagcaggcggtcgacgaacgccccggtgcggcgaaacggcgccagagtcggcgataccgtctgcgtgaccggctcgctcggcggctcgctcctgcgaaagcatctggagtttgaacctcgggtccgtgaggccctgcgcatggcgcagacggtgactctgcactcgatgatggacatcagcgacggcctgagcacggacctcaatcgcatctgcgagcagagcggcgtcggggcgatcattgacgtggcgagcattccgatttccgaggatgccaggaccctggccgatccgctccgggcggcgctgcacgatggggaggatttcgaactgcttttcactctggcgcccgacgatttcacccggctgttgcagacgtgggacgacccgacgccgcttgtccgaatcggccggatcgtcgaaggcacggggatgcagcttcgcatgccggatgggaagctcatcgagctgttgcccggtggatacgaccatttgagcgggcccgaatgagggcgcagaatggaaagaccaatatgaagcacgcacaaggaacgcatcgagcggttgtcgcggcacccattgtcctgttgttgtgccttgtttgcggcggggcggaacatctggatcgggggctggtggccgtaccgcgcgcggatggatcggtttttctcagttggcggatgctggcgacggacaccgaccagacgtgctttgcgctcattcgcacggacgactcggcgtccgaagtccgactcaccgggacgccgcagcgattgacgaatttcatcgacaagggtgcgtgggatccggcggcgtccgagcgacgctacgagcttcgcgtccacgcgcaggaaggcttgcctgtcaaggagaccgcgcacgtcacgatcggcaaggacgcgccgtcgtacatccgcattccgctggcgggcgattacgacttccagaaggtggggatcggtgacctcgatggggacggctcgctcgaattcctcatcaagcagccgaatttcaataccgacccctatcagcggcccggctactggaagcccagcacgactacctataagatcgaggcctaccgtcgggatggcacgctcctgtggcggcatgacatgggctggtcgatcgaggcgggcatctggtactcgccctgggtggtctatgacgtggacggggacggcagggcggaggtgtactgcaaggcgggcgaaggcgacccgcgtgacgagaaaggcctcgtgcagaccggtcctgaatacttggtcaagctcgatggccagaccggacgcatcgtggcccggaccgactggctcagccgggacgggtaccccgactataactattactgtcgcaacttcctggccgtcgcgtatctggacggacggacggcctcgctggttatgcagcggggcacgtataacctgatcaaggttcaagccctggacaaggacctccagcggctgtggtattgggactcgacgcaggagcagacgaagtattccgggcagggttcgcacggcctgattgcggccgacgtggatcgggatgggcgggatgagctggtccttggcgccgctgttctcgacgacaacggcaaagggctttggtcgctggcgatgggccatcctgatgtctgttacgtcgcggatattcatccgtccaatcccggcctggagatcttctatggcttcgagacgcgccagcagaccgatgggatgtgcgtggtggacgcccggacggggcgcaaactctgggcgcacaaggagccgacgttccatctgcacggccagggcatggccgctgacgtgctcgccgagcatcccgggatggaggtgctcgcgggggaacgcgactatccgaagcgctggctctacagcgcctcgggcgagttgatcgaagcgaacggcgagcggcccctgacgccgcggccgctctggtgggacgccgacccgcagaaagaggtcatcttcggccgcgcgatcgggaagtggaatggtcccaccatccagccgattgaaggacaggtgatcgtcgtgatggactgcctgggcgaccaccgcgaggaggtcgtcacgagcgttccgggcgagctgcgcatctatacgacgacgattccgacgcacgagaggcgtccctgtctgctgaccgatcatcagtatcgcatgggtgtcgtcgcgcagacgatggggtattactatcccgcacaactggcgaccgaattctgaaatccgaaatccgaagcacgaaatccgagacaaatccgaatgtccaggacggaaaatccgaaacgaacgtctgaccgccgccggcgtttggggccttcgtgctttgggtttcgaatttgtctcggatttcgagtttcgtgcttcggactttcgccacgacgggcgagcttgtactcatgagggaagtcaccatcacatcgaattcgccggaacagacgatcgcgctgggccgggccctgggtcgccagctcgccggaggcgaggtgatcgcgatcgtcggtccgctcggcagcggcaagacgcatctgatcaagggcattgccgagggcgccggcgccgccgaccgccgggaggtgagcagcccgacgttcgtcctggtcaaccactatgccggccgcctggacctctatcacatcgacgcctatcgcctggattcgatcgccgagttcgagaggctcgggtttgacgacctgtgctatccggaatcggtcgtgctgattgaatgggcggaccgggtcgagccggcgattgccgctacaaaccctgtgcgcatcaccctggcgcacgccggaccgcgcgcccgcaccatccacatcaccgatgcccccgagtatctccacgtctgttaatgccatgctgtgacaccgcagggtggggcgtgcccaccatttgcctgtagattgtgcctgggcctggtctatggacggatttctccgctccgcttcgctccggtcgaaatgacaaagaggggggatgctgcggtcgaaatgacaaaaggagaggcatcgcggtcgaaatgacaaagaggggggatgctccggtcgaaacggcaagggaaagggaccctgcggccacggctctctttgtcaccccgagcgcagtcgaggggtctggccatgaacgcggtgtacgctgggtctcttgagggccactttgacgcggcctgttcctcctcgtgcaggcgccgcagttcagaaccatccctcgctcaggtcgtgccagtcgggattctcggtggcgacgagcgccagtttcttctcccgtcgccagtgtttgatctgtttctcgcgtcggatggccgcgtgaacgtcgccgaacggctcgaagtacacaagcgtgccgatgtggtaccgacgggtgaagccctcgatttcgcctgccttgtgctcggcgatccgccgtcggatattgttcgtcacgcccacatacagcgtccgagattggttcgatgcgatatagacgtagtagactttccccatcggcatgacaccatcgtactgcatgtggccatgcgatgccagatttctccactgcggtcgaaatgacaaggagaggggacgttgcggcgggaaagacaagaagggggccgagggtctcggttggcatgacaagtcgggagaaggcgagtggggacgctcgccctacgctttttttttcgtctgtagttttgcacgtgcggggggtgttttctatggtttggatggactgagaggggccgcagataacgccgcccgacctgttttcgggcgacaaagttaaaggctccgaaatccataaggaaacggaacaggggttggatgtaattcggagacagggaattcacacggtcatgttttttgaaagggtctgcggctcaaaagaaaagtggcaaatcaagtgaccttgcgattcggtcgataaggttcacggaacaagcgacgaacaacgtcgaatcaacccatcgttttccatgtttctttttcttacgcacaacgaggaggacaacaaaatgaaggcaaacagaggctttacgttggtggaaatcctgatcgtcgtggtcattctgggcattctggccgcgatcgtggttcctcagttcacccaggccagcaccgaggccaaagagaacagtctgtgcagcaacctccagtcgctgcgttcgcagatcgagttgtacaaggttcagcacaacgataatgcaccggccttggccacctttgagcagcagatgacgttctgcaccgacatcgatgggaacatccagggcgcaggcagcaaggtgcgtgatgccaccaacggctttatctatggcccgtatctggaaagagttcctgccaatccgttcaacgacctgaacacccttgcggcgatggctgcctccggaacgcctgctgcggtcggagacaataccaccggttggcagtattttgaggataccggcgagatctaccccaacgacgatggatccaccgcgagcggcacgccgcacgcctcgctgtaacaccgccagaatatctgtgtcatcgccagcaacaatctgatagctggttgacatagaggtttgatgaatcaggctgaccgggccaaggccgttgccgaaagccggtcagccttcttcgtaccaccgatgccgaagggctgcatgcctgcggccacatgaggaaagaggagggacgggatggtttgccgaagggcgttcacgctgatcgaagcgacgatcgtggtgatggtgctggcggtcgtagcggcggttgtcgtaccccggttcagccgggcgggcatcgccgagaatcggatggacgatctgtgcaaccacctccagttgctgcgttcgcagatcgaactttacaaggtgcagcacggcgacaggccgccgatgcgatcggccgacggctcgatcgtttgcgatctgggattcgatcagatgctctattgcaccgacgccgacgggaccgtgaagacagaccggccacggacccggcgggacgaggtgttccgctatggtccgtatctcgaagaggttcccgccaatccgttcaacggcagcgggaccatcgttgtggtgcgtgaccggaaggacgttcccgttccgggaaacgccggctgggcctatgtgcccgagaccggcgagatctttgccaacgacagcgttcaccatgcgggcttgtgatgcgtcgaaacgaagaacattctccgaagggctccgtgcccattcggtttacccatacacggcggtgtgctgtgtgaatcgaaaggaagaccatgtgtagagggagagccttcacgctggtggagattctggtcgtggtcgttctgctgggtatcgtggcggccgtggtcattccggcggttgcgaacagcggcacctcggcgcgggccacgacgctggcaaccagcctcaacatgctgcggcggttcgtgttggtgtacaccagccatcatctggaggtggcgccgggctatacggccggtcccggctcggcggtggatgccgcggtctttgccgatcaggcgctgctgtcgagcaacgccgagggacagaccgccccgcgagggaccatcggcttcaaatacggaccgtatctgtcgaagattccgacaaacccgttcaacggcctggcgacgatccagatgctggccgatggacaggatttcccggccgccgccgacaacagccatggctggatctacaaggcgcagacgggcgaaatccgacccgacaactccggtacggacgacgcgggaagagcatactatgactattgatcccaatcgacgaggcatcgcggttcggcgcggttttacgctggccgaggcgacgttcgcgatcgtgctgctggggatcgccgccacgggtgtgctgctgccgtttgcgggcggtgcgaccgtccaggcggaaggcgtgcgccgcacgctcggcacgaggctggccaacgacctgatcgagcggatcgtgagtaccccgttcgacgacatcctgggcctgtacgccacccacctcgaatccgaggggcaggtaggcgacggcaccgatccgatgtatgccgagtacagccggcaggcctcgtgcaaatccgtccgtgtgcccggccagagcgacgacgctgcgccgagattcatcctcgccagggtctgcgtggcgtatcgggggcgaaatgtggcgacgatctatcgtctgatcagtaagtgagtccagtgatttgaattgaggcggactcctatccgattgcgggcggcgattcacggggggagcggattgacatccgcgccctcttgtcatgtcgaggcccggcagggcggccaaggcgtccgagggtagaacggcacgtgccggacaaagatcgcatgaaccgaaacgggaacatcaaggcgtttacgctcgtcgagttgctggtgaccctagtcatcaccgggatcatcctgtcggccgtcgcgacgctggcctacgcgatgagcagtgcggccagggccggcggcgatgcggcgctgtcgcagggccagcttcgcctggcgacgttgcgcattctcgacgtggttcaaaactgccggatggtcctgaccgcatccgacaccgaactggcgatctggcgcagcgactacaacgccgacgggcgcatcaacgtcaacgagctggtcttcctcgactgcgccgcgacgcacgatgcgctttgcctggtgcgttcttcttccgccagcaatccggaggtgaccttcagtggaggtgtcctttcggtcagtcaggccgatgtgatgaacagttatgcgggcgtttcccagccgctcctgtctgagtgcaacagcgtgcagtttggctgggatgttgctcctccgtcgacccggcgggtgacgatcgcgtttgagctgacccagaacgacggcgttcacaagtacgagatcgaggcggccctgcgggcctgggccggccacctgctgaacaacacggccgacgggctggtaaccgaggacgatgatgagtaagcgaccccggacaactcgatcttcccgcaaaggcgtggcgctgctgctggtcctgggcatcatcatggcgatcaccctgttgtcgctggggttcatcgcccgctgtgacatggagttggcctccgggcacaacatggccgttcgcaccgagttggatcaggtggcggtctcagccctggaacacgcccgcggattgctcctgaatccacaggacgccgaaggtccgttctggaccgggggcacgatgcgccaactcgacccgaacacgaacgatttctatgacgtgaccgttgccgccgatccgagcgacgaatgtaccttcgatgtcacgtgtgaggcgtatcggctctgcggaggcgagaaggtggccacccgcgccctggccgccgtcgttcgcctggaccccgccatcggcatctggagcggaaccgatctgtcctttcgcgcaacctggagcatgatcggcgacgtgtacacgcctgggacgttcaccaatctgggtgctgccggggccgtagacggtgacctcttcgccggcgccctgagcggaggcattgtcggaacgtataagggtgccgggagtctggcactgacgtggccccccgtgacggcgagctacagccatccggactacgtgacctcctccattggacccggcacggtcagcgccggaagctacagctcgccaaagatctggcggtgcgacggggatttgaccctcagcggggcggttgtcgtcaacggcatgttgctggtagagggcgatctcgtcatcaaaggcagtggagcaaggctcaccgccgccaagaacctgccggcggtgtatgtgaccgggaacctcatccttcacggcgccaccagccttcagatcgagggccttgtctgtgtggacggcgacgttctcgtgggacatggcaccaaggctcagatccgcggcgcgctattcgccgctggcgagatctccgaggccgcgattgattccgccgggttccccaacgaggctattttgcggaacataccgacgtggcccggcaacggcttgctggaactcgatggcgaggaccagtacgttcagacgctggacgatgaaacgactctgcaactgaccggcgactacacactgatggtgtggctcaagcccgagctcgttcagaatccgtgggccggagtcctctgcaagactgatccaaccggaagcgtgaaccactgggtgcttcagttcgacgaatctgcttccagactcattgtcctgcacgggacaaccgcaaccaggtgggacacgggaatcacgttggctgattttgccgacggggggcacggtgtcagtgtgatccgccggggaaacgatatgaagtcttatctcgattgggtcgaacgtgcctcgggcaccctgtcgacgtcgcctgggattggaaaggggcacctgaacatcggcgccgaccgcacgggtgataatgtcttcaagggacaattggacgacgtaagtgtgtacaacggtgcgtccctgatcgggcgctggaccttctattcgagcggctccgagctgaatgtggttgcatcgcccacaagggcagcaatcagcacgtgggcttcggggaagcgggaagactggagcccggcgggaggggcttttttccgaagcatcgattcccggcaagagtgaaatggcacagcggatgatcaggtcccagaacacaaaacggtttatcggtccactggaggccgacgggaaaaaagcccgagttgcagcagcctgcggcggacgcgcgtgcgtcaaaggctttgcccaggccgcctgtttgacgcgacaacacgtagcggttgagagggcttttttcaggacgttgaccgcgtcgcaaggcgcttctgacgcctgtagggactgcctgggatctcgccgccggatagcagacggcggtcgcgccggtgatcttgcggcggccgtgcgaatcctcgcatatctcggcggaccggtccgatcgcaggttaagccgacttgccggcaggtcgaaagagaaacggaggtaaagttgaccatgggtaggaatacgacagcacaatctgttgggcaggccgcagggtcttgtgccggattcacgctgatcgagctgttgatcgtcatcgtgattctgggaatctctgcggcgatcgcggtgcccatgatgtcttccgcggcgagcatgcagatacgcgccgccgccggcattgtggcggccgacctcgaatacgccaagagtctggccatcaccacgggccagcggcacaaggtggtgttcaacgtgggcaacgacagctacgaaatccgcaaggttgtggacgcggtcgatgaggcggtcaagcacccgatcacgaagaagagccagtacgtggtcaatttcgccaccgatggaaggctggatcgggtggagatcgacagtacgacgttcaccggcgatgccgtgacgttcgatccgctcggcagcccggtaggtttgcttgctgaaggtgtggtgactctacatgccggggatttcacccggaccgtgacggtcgaacctgtgacgggattcatctccgtttccgaatgagtgattttgatatgcgactgtcccactggataaacaggaaagagaagatcctgcccatcgggctggacatcggacacagtgtcgtcaagatgatccagttggcggtgtccgacgatggggttcgggtgcttgctgccggcagagcggtcgtcggtctgaatgatatgagcgacgataacgcatggcgacagcgggtggcgccggccattcggcgtctgctggccgagggcgccttcaagggaagggatgtcgtcacagccttgccggcagacaagctgagaatcacctcggtgaggctgcccgagatgccgaatgaggaggtggagcagacgcttcgcaaagaggcggcccatcgattcgcgctgaacccgaagatcgacgccatcagctatgtgctggcggggaacgtgcgacagggtgacgaactcaagaacgaatacatcctgttcgccagcgacgatgaggcgatccgcggtcatattgcccttctggaagaggtcggcctgcaaccgacgggcatcgacgcatcgccctgcgcgctgtttcgttgttttgagcgggtgatgcggcgccaggaggacaaggaacgcaccatcatgttcctggatgtcgggcatcggtacaccacgatcgtcctggggcgggccggcgagatttgcttcgtcaagcagatggcgttcggggccgcccggttcgcagaagacatcgcggccaagctgtcgatctcggtgaccgatgcggaggccttgcgccgccagatgatgtccgacgactcggtcgatgcggcgacgcgccggctcgtcgttgacacgctgcacggcaccgcggagcaactggccggagagatctcgttgtgtcttcggtattacacggtgacgttccggggcaaacgagtcgagcgggctctgatggcgggaggtggtgtccacgaggaggccttgctcagcgtgatgaggcaccacctggccattgaaacggacatcgccgaaccgctgcgcgggtttgatctgacgtcggtcggggtcgcgatggaagacctgtatccggcggcggacttctcgctggcggtcgggctgtgcctcaagggatggggcgcttccaccgtgtccctggtgaaatcggatgtcggactggaatccatactggaaggtgcatcctagtgaaagagatcgattttcttccagaatggcatagagaaggcagacgtcgccgccttcacatgaggcggcaatatgccgcgctgatcgtcttgtttctggccttggtgacatacaacgcggtagccacgcacaggatcgcgcgcgccaacgcggatctggccaggctggaggaccgacgattctgggcggaaggtctggtgcatgagtacaacatggtcacacagcagttggccgcccgccaggccaaggtcgcgttgatggagcaggtcgatgcgcgcatcgacctggcggcggtgctggcagagatcagttacatcatcggcgaccgggtgctcttgagccgtctggagttcacgtcggagcccctggccgctgcggaaaagacctcggaacgggacaagaccgcggtgcgtagcgccagcccctcgcgtgcgaccgccaagacggcctctctggggagggtgcggtttcgggtggccctggcgggaatcgcggtcgattcggccgaagtgggggcgctggtccgtcggttcgaagagtccccgtacttccaactggtccatccgctgtatcgcgacaacacgattcagattggtactggcgaatcgtcgggttcgcgtacgagtgagaacgaggcccgacgtgtggagacgcgctcgatcagtgtcacggagtttgagatcacgtgctatctggccaactatgaggagcgggacacgtgatgagcgagagacgatccaattcctggctgagtcggcagcagttgtgggtgttcgccatcggcggcctgttcctggcggacttcgtcctgtacgggtatctgccgttacgcgaaaggctccagtctctggggcaagcgaaaacgcgtcacctgcagttgatctccaccgccgaggcgcacagccacgtgctgccgtccctgaccgcgcgactgagagagaccgatcggtatgcccggaactatgaggattggattcccaatgaaagtgccctggggcaattcctgggacagatcgcccggatcatgacggaaaacaacctgtcggaccaggatgtggtgctcggtcaggaacaggtctcgggtgacctgatctgtataccggtccacatgaagtgtgtggggaacctgaacggaatcttcggattcttccaggaccttcagaacctcggtcggctggtccgcatggagaagaccaccctggccaacacgaaggccttcaacggcagcgtcgccatggaggcggacgcggttatcttctatcgggcgcggaagacgcaggacgcgagcctgtccgcgaaccagaaatgaacggacgccgtgaacgatgaagcgtaatgccgccaatccattgggctcggtttcccggatgacgagccacctgatccgaggtggcaggaagacgggcctggcgatggcgctggtggtcgtgatggccgggatgtggttccgcgtcctgaccggccagagaccgcgcggggtggaagccggtccgaatcccgcgtcgcagacggaccaaccgtcgaaacaggagccgcaggtgcgcctcgtccacttgcccgtggagcccgggcggcatgaccgcattcacagagacttcttcacgacacaagactggagcggctttgccacggtatcccattcacagagcacgggtcctgttccagaagtacagccagtgacacccactcgaaccaatgacgtgatcgacaaattggccaagaccctcaggctggaggccgtgttatggagtgcggacccgcaggcgttcgtcgacgatcgattggtacgcctcggggataccatcactcttcgagacggctccgagacctacgcattcgaagtagtacagattcaagaaaatgccgtgcttgtgacctgccgcgaccgacagtggacgctgaagctgtcgtcgcccaccgacgtaagaaagtgacgcattggtcttagaacgataatgaaatcagtacaaccaagcaggatgtggaagaacaggagtaaggttatgcattacgacagaacaactgtgaaatcttgccaggcccggtggggccgacggctttgcgtgctggcggtgctggccctgttggccggacccctgacggccgccgagagcgatccggtggcaccgacgtccgaaacgacgctcgatacgctggccattgaacccgatcaggcccaggtggacttctccggcgacggagtcgtcatcaagttcatcgcgttcaagaaggacggcgatgtgcgggacgggctgcgtctgctggccaagctgtgccggaaaaacatcgtcccttcggccagtgtgacagggcccttgaattgtccggaactgcgggatgtgacgtttgaacaggcgctggcggccatgctgggcgacaagttcgtcccggtgcaggacggcaacctgattcatattcgcaccaaggaggaacacaagaagatcaaggaagaccccgaacggatgatccacaaggtgatcacgctgtactacacgacggcggaagaggccgagaagctgatccgcccggtgctcagcgccagcgcgcagatcaccaagacacaggccgccgaagagaagatctcctccgccagcagcacgggttcgggtggagggtctctcagtggcggcggcggcggtgacaacacggccaccaacgacatgatcgtgatcttcgacttcccggagaacatcgagaaggccgagtcggtcattgcgcagatcgacattcggccgaagcaggtcctggtcgaagcgaccattctggccgcccggctgaccgaacagacacagttcggtgtggactggaaccttctgagcggcgtggctgtcaccggttttccggcgaacattgtcggaggccagggtacgccctgggaaaccagcggtttccgggttcccaacgcggccggcggtctgcgtgtcggattctcgtccgacaacgtccaggccatcatcacggccctggaagaagtcacggatacgacgctgctggccaacccgaagatcctggcggtcaacaagcaggaaggctcggtgctgatcggtaagaagctgggctatctggatcagacgacccagacccagacctcgaccacgcagtcggtggccttcttgaataccggtacccagttgatcttccggccgtacatcggcagcgacggctacatccggatggacatctatccgaaagacagcgacggcagtctgaacgcccaggggattccggacgaaaccaccacggagttgcggaccaacgtcatcgtcaaagacggggaaaccgtgattctgggcggtctgttccgtgacagcatcacggctacgcgcgcgcaggttcccttgctggggagtctgccgatcatcggagccgttttccggggcaccgacgacacctcgctgcgggaagaagtgatcatcctgctgacgcctcacatcatcgaagagccttcggaggtcggcggcgcggaccgtgccgacgatatccggctgaagatggacggcgccaagcacaacctgcagggcctcgatcgcgcccgcatggcggaggatgcctacgcccgagcggccaagtactatctcgaaggtgatgtcgacagcgccgtgtacaacgtcaaggtcgcgctgatgatgcgtccgacgtatctggaggcgctgcggctgagggaacggattatcgtagaaaccgatcccgaggaactcgagcggatcgacagcatcgtccaacaggcgattgatcagcaagaggcccggaactggaagagacgctgacgcgtcttccctgatcgaaggtcatgcccgtagtctacgggttcggaggagttgttgtgagacgccaaagacgcttagtctgggccgcgattgccatggtgatggcctcgctgtgcatcgcggccctgaccgggcctttccattctggcatcggagtagggtggcgcaaccatctcgttgcgtggcgtcttatcgcctgctgcagcggggctgtgggcgtgatcatcctgggtctggcctaccatcggctggccggggcgattgcgtccatagcccggcagctttcctgcgacgcggccggctcgatggatctccaagccgtcgagcgggcggccgcgacggttcagacacgcctccaggaaggccagaaagcccttcgcacgctggaagccgaactgggcgacctccgcattcgatctcaacttgccgatcgacagaagcagcacaccgaggcgatcatttatagcctgcgcgacgccgtgctcgtggtggatgagtccgaccggctgctgatggcaaacgcggccgccgcccagctcttcgggttcgacccggagcaggcgcgctaccagccgcttgagcagagcatcgagccggcgcacaaggatttcgttcagttgattcagcgttgccgggaaagcgccacggaggcgacgcgtcgcgagatgcagttcgtccggcccgatggtccccatacgttcgacacgatcgtctcatgcgttctcgagcgggaccgggtcttgggggtggtcgcggtgctgcatgatatcacgcgagaaaaggaagtctctcagatgaagaacgacttcgtcagtcacgtctcgcacgaattgaagacgccgctggcttccatcatggcgtattcggagatgctggccgacggggaggccgacgatgagcggacgcgcaaggagttctaccaggttattcagactcaggcgcagcggctcaaccggctgatcgaggatattctcaatgtctcacgaatcgagtcgggactgatcaaggtccagaaagaaccggtcagtctgacgattctgattgaacagcagatgcagatgatcaagggattcgccgaggagaagggaatcacagtcacggggcagaaacccatcgtgtacgaccaggttctggctgacaaggatatgatctcgcaggtgatcgtgaacctgctgagcaacgcggtcaagtacactccccccggcgggaccgtgcggatccagacggaggtgaacgagatcgaggaggtggtccgcgtcaccgttacggataccggcgtcggcattcccgccgacgagatcgctcacgtgttcgacaagttctatcgggtgagcgccaacaacaagcaggccaaagggaccggtctcggcctgaacctcgtcaagcagatcgtcgagaaagtacacgacggtcgtgtgttcgtcaccagccaggtgggtgttggaagcaccttcggattcgagctgcctctggcggccgccgaactggccggcacgacccgataacggcggagtttacgcctcttcacggagaggggattcccgaaacccagttttggagtggatgaaaatgacaggcaagaaggtgctgattgcggatgatgagatccacattattcatgtcgtggcgatcaagttacgcaacaacggatacgaggtgattgcggccaacaacggagccgaggcgtatgaactcgcatgccgcgagaaccctgacatcgtggtgacggattaccagatgccgttcgtcacagggctcgaactgatcgagaagctgcggaagaacgaggccacgacgcacattccggtgatcctgttaaccgcacgcagcttcgcgatcagtcaggagatgcaggaggcgctcggcgtgcaggagtgcctgagcaagccgttcagccccaaggaactgcttaagacaatcgaggacattctctatcagcgtgcggttgcggtgaagaactgattccacggccgcgacgatggacgacgcacggcatacggtgaggaaccctgagagggccatgctgaccagaacgacaccaggactgacctgtctgcaacgacgcgatctggagcggttcggagagcgcattgtgcagtttggtgtgaatgtctccgtggttgacccggacggccgcatggtggtcctgcgcaatggggggcaattcgacagcgatccggaggcgatggaggaggcggcgcgcgccgtctcgcaagccatggccagacatccggccgaacgttgtgagggccgcgtctgggagttctgcgaccgtcggaagctgctggcggttccgttgtgcctgccttgtgcggcgaccgccgaccatatcctggcgggcgtgatcgtcgccgatgagggcccgccggaggccggcgcgtggccaggcgacgggatgcgagagagccggacgagcgattcgttccggttctcggcctgcctgcgcgaaatgctccagctcatggcgcagaatttccagctctccgcgcgcagcgacgggcagatggaaaagatgggtacggaactggcccaggtgtacgaggaactggtgctgctgcacaagatcagcacgcacatgaaagtcaccgagtcggacagcaccttccttcaactggcctgcgacagcctgacggacatcgttctggtcgagggaatcgccgtcgtgctggagcgggtcatcgacggagagaagcggttcatggtggccgccgggtcggggctcatcgatctggacacccgcacggccgctctgctgcacagtcgcctcacggaagagattcgtcgaggccaggaggctctgctggacagcgcgatcgacaggccattccggtatgaatggcctgcgagcatccggaacatcattgcggtgccgctgtgcgcgaaggagccgcagcattcgcgtcgaacggttcgtgcctcgaatgcggtggcgatcatcggatacatggtcgccgtcaaccgcatcgacaagcccgatttcgacagcacggacatgaagctcttcggctccgttgccagtggctgcgccgtgttcatcgagaacggacgcctgttcaacgatctcaaggaactgttcctcggttcgttgaaggccctgacggacagcatcgatgccaaggaccagtatacccgggggcattccgagcgcgtcgcggtcatctcacggtggctggcggaacgcgtcgcggaacaggagcctctggaggacgagcagattcaccggatctacctggcgggtctcctgcacgatatcggcaagatcggcgtggacgagaacgtgctccgcaagaacggcagactgacgtccgaagagcgcgagatcatccagcgtcatccgtccatcggggccgggatccttcgcggcatcaagcagatgcgcgacatcgttcccggggtgctccagcaccacgaacgcgtggatggaaagggctatccggacggcttggtgggcgaccagatttcgctgaccgccaagatcctcggactggcggacagcttcgacgcgatgacgtccaaacgggtctaccgcgatgccatgaccctggatcgggcgctcgaggagattcggaagggcctgggaacacagttcgacgagaggatcggccgcatcttcctggagagcgatatctaccatctgtgggacatgttacaggaaaacggcccggcgatgtacggtgcgggccattttgctgattatgggacgacggcgatagggactttgttgcgatgaagatcaacctgcagaactacaacgacgtcacggtcatcgagttgcagggtgaactcgatggagacatcgaggaatcgatgaaggacacgatgacccagaccgtggccgcgggccgcaaacggatcgtggtcgatatgagcaacgtcagcgccgtggatagtcagggactggagctgttgctgtgggtgcggcaatactgccggcagaaccgcgtgcagctccggctggccggactcgatgagaccatcgagaagatcctcgagattaccggcctccagaccgaattcgaccgtcacgtcgagttggccgaggccgtccgcagctttgcctgatcgccgagggcatggggaccgtagggtatgagtcagattctgcttgagaacaagatgcagctcggccagcttctgctggcacgaggcgtcgtcagtcaggagcagatcgaccgggctctggccgaacagcaggagaagggccatcacaaactgctgggcgaattgctcgtcgagatgggctattgcagcgagaaccagatcgcggcggccctggccgaggcctatggggttccctacgcgcaggtcagcccgaagttgtgcgatcccaaggcggtggagctgctgccgcgtgagtttctcgaggcacacgtcgttttgccgctgttcaaggtccacgatgttctgactgtggccgtcaacgagccgaccaatgtctttctgatcgacgagatcgagcggatcagcgggtgccgcgtccgggtcgtctgctcgaccaccaaagacatccgggcgacgcttcagtcctacctgccggccgccaacgtgtttgtgatcgacgatattattgacgacgaggggctcgaagagtttacgctcatcgagagcatcacgcaggacatcagcaatctcgaagaggtggccggccaatcccccgtggtcaaactggtcaactacctgctgtacaacgcggtgcgcgagaatgccagcgacatccacattgagtgcgatgagaagcggctgcgcgtccggtatcgcgtcgacggcaagctctacgagaagatgcgtccgccgtatcagatgcacgccgcgatcgtctcccgaatcaagatcatggccgaactggacatcgcgcagcgccgtcttccccaggacggaggcattcacgtcctggtcgaaggtcgtccgatcgatctgcgcgtctccgtcatgccgggcaatcacggggagaaggtcgtcattcgtgtcatcgatcctcagaagatcctctacaacctggaatcgctcggtttcacctacgacaatctcctgcgttttcgccaggtcattcaggtgcccaacggcatcgttctcgttaccggcccgacgggctccggcaagaacacgacgttgtatgccgcgttgtccgagctgaacagcgaagaggtgaacatctgcacggtggaagaccccgtggaatgcaacatctccggcatcaatcagttccaggtcaatgccgcggtcggtttcgagttctcgacggctttgcgaagcctgttgcgacaggaccccgacattatcatggtcggcgaaatccgcgatcaggccacggccaatatcgccgtccaggccgcgctgaccggacaccttgtgctctcgacactgcatacgaatgatgccccgggtgcggtgacccgtctgctcgatctgggagtagccccctatctggtcagcgcttcgctcaagggcgttctggcgcagcgactggtccgcaaaatctgctcgaactgcaagaccgaatacgacccgccgcccagtctgaagaaggccgtacaggcccagggtggcgaaacctgcaagttctatcgaggggtggggtgcaagaagtgccggaacaccgggtatgccgggcgcatcgccatccacgaactgctggtgccggacgacgaaatcatggagatgatcaatgaacgcgtcagcgccaagaagctccgggccgcggccttggccaagggcatgacgccgctgcactttgacggcatcgaaaaggtcaaggcggggatcgtgtcgattgaagagatattgcgaatcacggctctggatacgacggggatgggcgaatcctgagaccgatggaatagcgaagtgggcctatggcgaccttgatgacagagatgcgaaagaccggccccgacggcgatacgtcggcggcgggggccccggaaccgaagccgggctccggcggtgccgcgccgggtgcggcggacccgggaccgatgggaaaggtgcgcgccaagagcggcgacctgattctcttcacgacgcagttggcggtcatgctcgacagcggtgtcattctcagtgacgccctcgacgcgatcggggaacaggccgcggacccgcgattcaaagccgttattctggacctctcggatcgtgtcaagggcggcgagacgttttcccgcgccctgacctgctacccgaacacgttcaacaagatgttcgtcagcatggtgaaagcctcggaggcttcggggcgaatggtcgagatgctgtcggtcctgaccggatacctcaacttcgaggccgacacacgcaaacgcatcctcggcgcgctgacctatcctctgatcatggtactgatggcaatcgccgccaccggcacgctgatgttcttcgtgctgccgcgtttcatgcggatctatgagacccgggaagcggcgctgcccaagctcacccaggtactcgttcatatcagtcatgttctgggcaacggcgagatgatggccgtgctggtgaccaccgccatcctgctgggcacgggcctgtacggctggtcgcacaccgtttcgggacggcgcgtcctggacgggatgaaaatccggaccccggtcattgggaccatgttcgtggacatggtcgtcacgcggagcatgcggatcatggccacgatggtcaacacgggggttcgcctgctggacgcgatccgcgtgatccagggctgtgtggacaattactacttccagcaactctgggaggaagtggacgacaagattcaggatgggtaccagctttccgaggccattctcatctccgagcgtgccaagctgattgcgcccggcatcatccagatgctgcgggctggcgagaaggccggtcggctgggcgaggtgtgcgacaagatctccgtcttctacgagaagaggctggcggcctccattcagagcgtgatgacagtgatcgagccgctgatgatcacccttctcggggcgatcattggaaccatcgccattgcgcttctgctgccggtcttccgcgtctccagcgtgattgctcactgatcgggcatggccacggaggcaagcaccttgcggcacgtgcagtggttgcccaggtggcaaagcgccaactgtggtgcgacaaaatcgatcgggaatgtcatgggctcggtcaccacgccgtacccgatcgtgatgtgcgggaagaacgcctcaaacgcggccttgcggcggtagtcccgaatccacgccagcgtactcggcgctgcctcgtcgtcgccgcagagcatctcggcggttacgttgccgctcagggggggctcccggatctccaggatctgctcgtgcagcctctggagggccgcagttttggccacggcaaagagcgagttcggctcgttccgcgcattcagcaccgtcacgacccccgtgaccgtgagcttgccaacggggcaggccttcgcgatcccatcgagcctcttctggatcgcatcgacctgatcggactcgatgcaacccatcgccagcgagatgtgcggcaggcacgtggtctcggcgagcacgatctcgcgacaatggctgccgatcagcttgcggttcgtctcgatcgccaattgcgcgatcttcgcctcaggcaagagcacgatatcgacggcgatctggctcatcgtgtcctttcttgcatctgtgcaacgacctcatcgaattgccgcaacaccatctcatcggtctgttcgatgaatcgagtgacgatggcgatggccacacagttggcgacaaaccccgggacgatctcgtacatccgttcgctcatacccacctgcttccagaggaccagcgtgacggtgccgcagaccatgcccgccagcgccgccggccagcttgttcgctttgagaagagcgcaaacagcacgaggggtccgaaggctgcgccgaatccgccccaggcgtaggcgacgatctccaggatagtctccgtcttcacgcccagggccaggatcagagccatcagcgagatgacgaggacgcacaggcgccccacgaggacgacttcgcgcggagtggcgtcgcggtggatcgcccggcggtagaagtcctcggtcaacgccgatgacgagacgagcagttgcgaatcgatcgtggacatgatcgccgagaggatcgcggccagcatgatgccgcccagccacggacgggtgacttcggcgatcatgtagatgaacaccttctcggggtctccgcccggcacggtccgaaacagcccgatgccgatcaagccgatcgcgacggccccggccagcgagatgaatacccagaccatcgcgatcaccatcgaccgggagagtctggcgagcgatttgacgctcatgaaccgcacgaggatgtggggttggccgaaatagccgagtccccaggccatcgccgagacgaccgcgagagaggcggccggtccgccggcggggctgaggctccgtgcgatgtccttcaccgccatgccgtcctggatgccggcggagcccccggcccgcccgtaggccagcaccggcacgacgaccagcgcgatgaccatcagtgaaccctggaacacgtccgtccagcaaacggccaggaaccctcccatgaacgtgtacgcgatgatgacggcgccgccgatgacgaccgcgaccggatacgagacgccgaaggtggactcgaagagcttgcccgccgcaaccaggccgctggaggcgtagatcgtgaagaagatcaggatgacgatcgccgagacggtccgcagcaggccggtagggtcaccgaagcgcgcctcgaagaaacaaggcagcgtgatggaattggtcttctgagtatagagccgcagccgccgcgagaccagcagccagttcaagcctgtgccgatgaacaggccgaccgcgatccacgcgttcgtcaggccgccgacgtagattgccccgggcaggcccatcagcagccagccgctcatgtcgctggcctgggccgacaacgccgtgacccacgcacccatcccgcgcccgcccagcaggtactcctcgatgctctcgttgcgccggtagaagtagaacccgatcgccagcaggacgacgaagtaaacaacaaacgtgaccatcgtctcggtcgtcatcatatagtccaccatccgccgctcataccgcatgaccgcgcccacaacgcagccagcatcgcggcacaagggactccctctttatccgtccgagagccgcctctcttctcttgtcatgctgagcggagcgcagcgaagtcgaagcatctggccaaaggccatgcgcgcctcttgtcctcgggtagacccctcggcaggctcggggtgacacattgatcgttgccaagtacttcatttcattttctttcgcgtgagcaacttcttcacccatccgcacatgcgctccatgaaccctttctcatgggcgacgccggaccgccggccgtgaacagcaccgcgaatcgcgtcaccagcgcccccagcagtacatatccgagaatcacctgcaacatcagaagcacctgcccgcacgtgctgtccggattggcggcgatgtcaccgaaccccagcgtcgtcatcgtcacgaccgagaagtacagcgcgtgcacgaagccacgaatgtcaccggcctccccatcgaccgcaagacagcccggccacaaccggtagacaatcacaaagactgatgcgagaagcccgaaactgacaatgacgcgccacgtggacaaaccgtaatcagatgccagccagaacagtcgcaccggccatcgcaggcatcggtgttccttgtaccattgctcccaattcatccggcggatgttgtattccaggagttggcttgtgtctgggtagattcgcgttacagcaagagcgacaccctcaaacttcgtgttcctgttcacttcacagcggtagagcaaggttgtcccgtccacgacaaaccgggagaaatcggcatcttggaggcatgcataccgcaaatccgctccgccgaggaatgcagcgataagcttcgaatgctccagatgagaacaactcaaatcggcctgctcgaggtaagttccgtgaagcttgactccttcgagatgaaccttgccgctgaacccagaattcggaaaggcaccaagcatggcccctctcatgaagccgttctgtagtgtgatgttttccagaaggacatcctgttcggggtgctgtcttcgccagtcgttccactcggtcatgtcctgtctgtcggagcagcgtttgagcatgtcgtactgcccctggctgaagcggggttgccgctggttctctccctcgtctggccttgccatcgcatcatccctcaatacggcgtttcgggttcatagtcggtctggcctcggctgagattggctttgttcttgggcggtaaaccgcgtttttgggccaaaaacgcggaaattggctttgtttggcgcattgtggtccctccgatctgtcggacgatgcatccctcgggcctgcggccggtggtctggagcctggctcagattgggttcgatcgggttcgtttcctcggtcgaatcgctgttcttgggctgaaacggccgataattgggtttgttttgcacgttggggggccggtggaggggcgatcccggcccacagccacccgagacggtggtctcgattgcttggaactggtgtttggatggccatgagtgcgtccctggtgctgacggtcaccgatggactattgagttatgtggatatcatacaactggtggctttcggcgtcaacaaaaaaaaccggaatccgggccatattcttcagtccgcgacgattttttcgtcctgctctcgccaggcgggatcgacgatacagaggaagacgagatcatcatcgccggtgttttcgatgaactgggtggcattcggcgggatgtagacggcgcagccggcgccgacaacctgcgattcgttgccgataaacatccggccgcagccgccgatgacgtaatagacctccgaggaggccaggcgatgcggcctcgtcgcctctcccgcgccactctcgcgtgtgccaggctgtagcgaatctccgcttccatcttgtccggatgcaacaactcacgcagcagcgagccgtccccggcaacaaactcctcgcaatcgctcaacgaccgtacgagcattacgatcctcccaacagaatcgacccttccgtgaagaacgttccggcgacgcaggcggtcatcaggcaggccagcgttgcagcgatcaaggctcgaaccgcgaccggcccgatgttccgcgtctgctgcggcgccagggcgcagaggctgccgacgaagatcgccatcgacgcaatgtgggcgaatccgcacagggcgtacgtggcgatgaccgccgagcgagagtgctgcaagaggccgttcttcattgcggccgccagatcgttgtaggcggccacctcggtgacgatcaggcgttctccaacgattcgcgaaatctctcgaacgtccgccagcggcacgcccaggatcagcgttagggggtagaacaggtatccgaacagggcccggagcgaccactgtccctgccagccgaacgcggggttgatccatgctccgagcccgccgaggagcaggtccgccagcgccacgaggcccaggacggcgatcagcagggcggcgatgccgacgatcatgcgcactccggcgttggcgccgttgacgatcgcctcgaacagtccgctgtctttctcgtagtaaggctcgacgcgaacaccgagcgtctggggctgctcgctttccggcaggaggattttcgacatgaccaaggccgccggcgccgagagcagggacgccgagaccaggtgtccggcgatcatcggaaactgctcccgcaggctgaagacgtacaacgccagtacattggatgagaccgtggccattcccgcagtcaggatcgtgcaggtctccgaccgcgtcaggcgggcaagatgtggcttgacggtgagcatggactcgacgcccacgaagatgttgctggcggccaccagcgattcggcgccggagatccgcatcaggcgggtaaagacccgggcgaaggccttgatcaacagcggcatgacccgcaggtaataaaggatcgcgatcagcgcggagaagaagatgatcgtcggaaagccctggaacgccaggatgaagccgagcgaggtttcgccatcgtctccagtctggccgggtccgagggccaggcggccgaagacgaagcgtgcgccggcgccggccgagtcaatcacgcggacgaccccgtcgttgacgagcaggaagaccttcgctccggccggcaccaggaagatgaacgccgcgacggccagttgcagcacgacgccccaggcgatcagccgccggttcatgttgcgtcgctcggccgaaaagacccacgcgacgcccatcgggacgaagatacccgtgaagctgacgagattgtagatgtccatgacgacggattgtacagacaaccggggagcgttggaataccggactgatgggtagactggggtgtgccgaagcagtggagtgcggtacgcaccctactttgtcagctcgctgacgtctttgaggatgtggtgcggccggtaggcgtagcggtccaggtcggactccttggtgatcccgctgaggaccagaaccgtgtcgatgcccgactcgatgccggcgatgatgtccgtgtccatccggtcgccgatgatgaccgtctcgtcgcgttcgcactggagcagggtccgggcgtgtcgcatgatgagcggattgggcttgccgatgaaatacgcctgccgtccggtggccatctcgatcggcgcgatcagggcccggcacgccggagcgatccccttctcggtgggccctgtcacgtcaggattggtccccaccagccgcgcgccgcccagcaccagttggatggcggtctcgatcttctcgtagctgtagcttcgcgtctcgcccaccacgacataatccgggctgttctcatcgacggagagcccggcctcgtacagggcctggtagagtcccgagtcgccgatggcgaagacccgtccgccgggacattgcgaggcgataaaatgggccgtcgccatcccggaggtgatgaaatggtcttcgcccacctcgatgcccatgtgcagcagcttctggtgaagctctcggggcgagcgagcggaactgttggtcaggaagaggaaccgcttgccctcggccttgagccagtccacgaaggccttcgagccttccagcagacgcgaaccgtggtaaatgaccccgtccatgtcgcagacgaaaccgcgtttgcttctcaactgttccatcgattctccagaaaccaccaggagtgccccagccgacatatgcctgtctgagattaccggatcagtctggaggcgtcaaggcgggccttggaacggttgcgctcggtcgagggttgacagggccggatcgggtctctacgattggggtactgggcaggtcggttctacgggcagaaggtcggggtcgcagccatggcatcgctcattgtcacatcaggcaggcaggaaggggactactatccactcgggcatcggaccagcgtgatcggtcgggacgaagccctgctgattcagatcctggacaacatggtgtcccgcaaacacctgcaaatccgcttcgacgagaagacgggccgatactacgcctacgacatgaagagccgcaacggggtgtacatcaacaaccagcggatctccggcgagacacctctggtcgacggagacgtaatcctgatcggactgacgacgctgctgttcatcgacaaggacttcaaggacagagacagcgcgctgttgcactacaagaaggtgggcgagcggatgcgtgtcacggtgtacggcccgcagaagatcgacgaggtcgatcgcggccagggcgagaccggccatcccatccgctggtagttggggcccggcaggcagacgaatcaggacaaggaggtacggatggaccgacgggagatgctgggggctcttggatttggcgctgcggggctgctcggactggcgggccggcggcaggacgcctcggccgcagagtacgccagagcgacaaagggcttgcccccgctgaagatcaccgacgtccgggcgatcctcaccgcgccgcagggaattcgcctgtgcgtggtgaaggtcgagacgagcgaaccgggcctgtacggacttggctgtgccacgttcaaccagcggccgctgacggtcgtgacggcggtcgacgagtacctccgaccgttcgcaaagggacgtgacgctgagaacatcgaggacctttggcagaatgcctacaccagctcgtactggcggaacggcccggtgctcaacaatgcgctgagtgggctcgatcaggccctgtgggacatcaagggcaagcgggcgaacatgcccgtgtatcagttgctgggtggcaagtgccggttcgcggtcgattgctacacgcattgcggcgggggcacgctggcccagatcgaggagagcgtccgtcgggcgatggagcgggggttccgtcacatccgcatccagcgcggcggctacggctcgccgcatctgtcgaagcaggccgatttcaaggaggccggtttcggcgcgccggtcgattcgaacatggaggtccggccctacgtcaagggcacgctggagatgttcgaacatatccgcaagacgtgcggcgacgacgtcgagctgctgcacgacatccatgagcgcatccctccgatcgaggcgatcaatctggtcaagcggctggaagcgtatcggccgttcttcatcgaggacccgttcgcgccggaggacatcggctatttcagactgctgcgtcagcagacctgtgttcccatcgcgatgggcgaactgtacaacaacccacacgagtgggtcgggctgatgagcgagcggctgatcgacttcatccgcgtccacatctcgcagatcggcggtttcagcgtggcgcgcaaaatcgcggcgctgggcgagtggttcaacgtccgcagtgcctggcacgggcccggcgacgtctcgccggtcgggcacgccgccaacgcgcatctcgacctggcgatctggaacttcggaattcaggaagcggtcagcttcaacgacaagacgcgcgaggtttttcccggcgctcccacggtcgagaagggctacatgtacatcaacgatgctcccggatggggcgtggacatcgacgagaccctcgccgccaagttccccttgcccgagcatcccggctactgggaacccgtccgccgccccgacggcaccgccgtccgaccgtagttggccggcgttctctgcgtttacggcttggcgtatttgtcgcggttgcaggtgatcgtgccgtcgtggtattcgagctcggccgcttgcagcacggtgcggttggtgcggtagagcggatgatccggcgggtagtgcacgtggtaaaggataatgggtcggtcgccgagcaggatcacgccggggtggcctcccttggcatcgtccttgacacgtttgcccggatcgaagagcagaccgttgtcgaactgccaatcggtcaggccgtcctgcgagcgataggcccgtatgccgcgctgccccgcatccaccaccagccagtaggcgtcctgccacggccagacgaacggtgcttcgtggctgacgtcggtgaccgccggtcccacgaccgtccaatggtaaaggtcgtcgctttgggcgaggtaggaataggatccgtggacctcatccttgtagagcatgcaccaattgtcacccgcccgatagacgcaggcgtcgatgcaccggtccgaggacaggtcgagcgtggactgaaaggtccaggctctgccgtcagcgctggtgaagtgcttgatgaaccgcttgccgatccagtccttgtagatgccgtcgacccaggagacgtacatgtggtatagaccgttgtaatacaggatgccgggcgcccaccagctgcagttgttggcgatagggtcgccaaggccctgatcgccctgacacgtgccgaggtagcgccactgccgcccatccttcgacgccgcaatcccaatggccgagccgtggcagaactcgacgccctcgttcggttgaagggtcgcgcgccgctgggtgtagtagacccaccattcgcccgcctgctggttccagacgggagcgggatcggcggccccatcccagatcgggtcgctgaacagcggggctggggcattggccaggtcgaacattcgctcggttgcggcgtcgcacacgccgcacagtagagccgacagacaccaaccaacgagcactctgtttctcatgtgaaggtcctttcatcgatggtggcggcgccaggcagcccactgggcctccagaaagccccagccaatccctatgacggcgccgaccgcgtggcccacattcgcgacgctgccgagcaggcccgtcaggcacaggaagaaccagacgatcatcagcgtgacggtctgggggtgcagttcgagattggaggcgggatcgaatttgccctgcatccagatgtagccgagcagtccgtagaccacgcccgacatgccgccgaacgtcggtccgctgtagaggtattgcccgacattggacagcgcggaaacgaccagcaccagcgcgagcagccgccacgtgcccttgcgggtctcaaccatgctgccgaggtcccagagccacagcatgttgaagaagatgtgcagcaggtcgaagtggacgaatatgggagtgaacagccgccagacctgaccgtgccggacctcggacaggctggagtcccattgcacgtaatctccatccgcggagtagtgcgcgatggacaaatacgcaacgaggcggtcgttgtggcccagattggtcgccagcgtcacggccacactgacagcggccagcgtcatcgtcagaatcccgtagccgacgggaggtctgtagaaggcggttcggccttccacaaggcgcgcccgcctcggggcgctcgcctgcctgtcacggtgttgctgccgcgcgccctcgccggctccgaggacaaacatcgagtcatctggttgctggacgaaacgctcgaacagcgccgccgcctcttcgaggcgggattcgtcgaggacccagatgtcccagccgccgtcggaggccgggtcgacctgattctcgatccggcggctgtagaggaagtccccgaactgccttgcctgcgtctcgctttccagccggccgatctgtcgcattccgtgtccttgatcctgttgacatcgcaactgtgtgaacgattcacccgcgccgaccgctgtccgcccggtcccaggatggtatcgtctcgtctgccccgattccagccagaaccgaaggcggggactgcccgccgagtccagtctatttcggcagttctttgccgcagtgaggacagcatcgcggttgtttgcggcgttccatctcttcgacgaagccggccccgaggatgccggtgggaagggcgaacatgccgatcccgaggacggcgatgatcgcggccatgagtcgaccgatgacggttacgggaaggacatcgccgtagccgacggtggtcagcgtagtgacggcccaccacatggccatagggatgctcgagaagtggtcgggctgcgtctcgttctccgcgtaatacatcaggcacgaagaaatgaccagcaggatcagcaggatgaacacggtgctgatgagctgttccttcttggtcgcgacgacgcggccgagggtctgtagcgaatccgagtagcgtccgagcttcgccagccgcgcgatccgcatgatgcgcaggattctcagcatccgcagatcgatgttgacgaacggaagatagaagggcaggaccgccaacaggtcgaccaacgccagcggactgcgcgcgaaccgaagccgcccgaataccggatgagcataccgtggctcctcgacgcacgaccagatccggagcaggtactccaacgagaagacgatcacagagacgtactcgaacgccgtgaaagcgccatccatcgcttcgcggatcgaggcgacagactcgaagaccattgccgcgacgttcagcaggatcaacacgacgatcgcgacatcgaacacccggctgacggtgtcgcccggccgggcgaccgccacgatctcctgcacgcgtctgcgaacactcctgtacgaccaggctgccatatcgggcggatcatacctttgccttcgatacttcgtcaatacgatcagtgtcgtgctggaccgaatgggcctggtcgggtaacgtggatcagctcagatccgaagagcagaaaggcaagaggcatgaaggcgatgacccgacgcgatttcgtcaaggccgccggtctggcgggcgtggcagcacggacgtctccattcgcatgtgcccggacgatgggattggccgcgagcaggccgaacatcatcctggttatgaccgacgaccagggctatggcgagctggcctgccacggaaacccgatcatccaaacgcccaacctggaccgactgcacgcccagagcgttcgattcaccgatttccaggtcagcccgagaaacgcggcttcgacgaggtcttcatccacgggtccggcgggatcggccagacctaccccggcagttgcggtgacgctccgggcaacacgtacttcgacccggcgatcctgcacaacggcacgttcgtcaagaccgggggcttctgcgccgacgtctttttgagcgcgcgttcgactggatccgtcggcagtcgcaggcgctcgagcccttcttcgcctacattgtggaacgctccacacagtccctacgtttgtccggagtcataccagaagccatatctcgatgtgggtctggctgcggcctatgcggcgtattatggaatgatcaccaacattgacgataacttcggtcgcctgcttgccagactcgacgagtggaggctcagcgagcgaacgctgctgatcttcatgaccgacaacggccacgcgcggggcaatctctacaacgccggcatgcgatcgatgaagggcagtccgttcaaggaacgctactggcggcagttcggcggtggccccgacgagacgctcctcaaacaaatggacccgatgcgcacgatctgaacagcgcacgaggaccccgcgtccttgttgtcaaagacgacctttcccttgccgaggaccggtggtcgttgatttcggccggggcattccttatagtgggtccgctgccggcaaacgcaattcctgggaattggccatggaaaaggaaggcaaactgaaggaagccgtgctgtgggaacctgtcgaggacaggaaggttcgctgccatctctgcgcatttcggtgcctgatcggcgacggccggttggggcactgctgtgtacggcggaatgtgggcggcacgctgtattccctgaactacgacaaggtctgtgcggccaatcccgacccgatcgagaagaagcctctgttccatttccagccgggctcgaggagctattccatcgccacgatggggtgcaacttccagtgcgagttctgtcagaactggcagatcagccaggcggcgctcggaggcggcgaaattgacggccagcccctgaccgcccagcagatcgtcgccggggcactccgcagcggttgcaggagcattgcctacacatacaccgagccgaccgtgttcatggaactgtgcgccgattgcggccggctcgccaaggaaaagggtctggcgaacgtcttcgtcagcaatggctatatgacgcgcgaggcaatcgacttcgcgcgggattggctcgatgcgatcaacgtcgatctaaaggccttcagcgacgattactatcgccggctgtgcaaggcccggttgcagccggtgctggacacgatcgcctatatcgcgcgggacaccgatatttggattgaggttacgaccctgctgatcccgggcgcgaacgactcggaggaggaactgaagcagctggcggatttcctggttcgccaggcgggcccggatgtcccctggcacatcagccggttctacccccagtacaagtacaccgaggcgaacgtcacaccgatggaaagccttcagcgggcggagcgcatcggcaaagacgcggggcttcgctatgtttacctgggcaacgttccgggaacgcgttcggagagcaccttctgctacaggtgcggacgcctgctgatcgaacgcatgggctatcggatcgtggccaatgagattcaggattccaggtgtccgcagtgcggcacggagatagcaggttttgagctttgaggtttcatgaagatcgttgcagatgggaatatccctttcgttcgagagtgtttttcgtcggtgggtgacgtagaggtcctggggggccgtgacatgacgccggagacggttgcggacgccgatgcgttgctcgtgcggagcattacgcaggtcaacgagcgacttctctccggcagttcggtcaagttcgtcgccaccgcgacgatcggcttcgatcacgtcgatctcggctaccttgatgcgcacaacatcggctttgcctcggcgccgggctccaatgccaattccgctgccgagtacatcgtcgcggcgttgctcgagatcgcccgccggcacgcgatccggctcgatggccggtccatcggcgtcatcggcgtcggcaacgtcggcgggcgcgtcgccgccaagtgcgaggccctgggcatgcatgtgcggcgcaacgatccgcccctccagcgacgaaccggcgatccgaagtatgttcccatcgaggcgatcagcgactgcgatttcgtcacgttgcacacgcccctgacgcgggagggtcccgataagacctaccatctggccgacggcaggttcttctcccggctcaagcagggggcggtcttcctgaacgcctcacgcggcgcggtggtggattcacaggccctggcgacggcgatcgactcgcagcgtctgacggcggtcgccttggacgtctgggagaacgagccgaatatcgacgtgcgcctgcttgaaaaggtggatctgggctcgccacacatcgccgggtattccctggacgggaagatcgccggtctgatcatgatctatcaggctctttgcgagcacttcggcctcccgacgagattcgatgcgggcgatttcctgccggctcccgaggtccccacgatcgagctgcctggcgatgtcaccgacgaccaggcggccattgcgcttgctgtggagaaggtctacagcatcgtgcgggacgacgccaacctccgccagatcgccaacgaaccacccgaggcccgaggacggtttttcgatgccctgcgcaagaactacccggtgcgccgcgagttccacaacaccacggtcgttgtgccggagccggccggcgtgctgattcgcaagctgctggggatcggttttaaggtgaaagggcggcggcgtgaaggcgacgactgacggtctgcttcggtggccgggcggctctttggatttctccggtggctgtttgatcatgggcgtgctcaatgtcacccccgattcgttcagcgacggcggacagtttctggatgccgagagggcggttgcgcatggcctggagatggcctcccaaggagcggctatcatcgacgtcggtggcgaatcgacccggccgggcgccgcgtcggtgccgtcggccgagcagattcgtcgcgtaatcccggtgattgaatctctggtgcgtcagaccaaggtcccgatcagcatcgatacctgcgatgtggaagtggcgcgggcgtccctggcggccggagccaccattctcaacgatatcacggccctcgcggatgacaatatggcccggctggcggacgagtcgcaggtccttgtggtgctgatgcatatgcagggaacccccagaacgatgcagaccaacccgcagtacgaagaggtggtgggggaggtcctggatttcctggtcggtcgggcgaggcgggccgaggcgttcggcatcccgagcgagcggatctggatcgatccgggaatcggattcggcaagactctggagcacaacctgctcttgctcaagcagattggacgttttgtggcgacgggctaccgtgtgctggtgggtccgagccgcaagcgattcatcgggacaatcacgggtcgggagaagcccgccgatcgtgttttgggcacagcggcgacggtggccctttgtgccgcggcaggggtgtcaatcgttcgagtacacgatgttgcggcgatgcaggacgtgctcagggtcgtgcgagcggttcaggaatgcggagcggcaggctccaagcagggggcgatcaaacacgcagggtgaaagcatgcgcggggaagccggtcttcagacaggttgatcgtggacagagcaagcaaacctcagcacagggcgatatagctggcaatggccagaatgaggatgcgtctcttgctgatgatgaacggaagccaagtttcgtaataaaacctgctcatggttcgtttctgccccccaagaatccatcaatctcaacgaccgtattatagccgaaaccggggtaccagggcaagaaaaaaaggccgagatcgttcttaagtctttagagaaaatggttttgcgttctatcctttctccgcaacggttacgatgcgtagatgtgctgaaccgtctcgaaacgtcccatatcacgccgagcgggagactgccgatatgatccgaaaactcgcccccaggctgttcgcagggcagaccccggcagtccccagaaccgtgtgtagacggctgtcgtatattttgtttgacccgatgctgccatgcgattagagtggcaactatggcgttgtcgcctcccctaggtacgcgaagtaccgaaactgctgcggagggcaaagaatgactcaagaaccaacgttaggatgctatgccctatttcacacataggagcacgcagcaacgcacttaggagatgaccatgattgattcgacggaaaacgtcttggcttggatgcccggccagtgggagtggctggtcattctcgtcgttgcacttctgatcttcggcaggcgcctgccggaaatcgcacgcagcgtcggaaagagtctcaccgagttcaagaagggcatcaacgaagcgaaggagtcctccgacgatctggtcgatgacgtccgcaaggtcaaagacgatgttgtgaaggacgccaagaacgcttcgggcctgaacgacgccgacctgaaaagctgaccgccgcccgaccgggccccctcctgctctcgaccgagatgggcgctgccatgaagaaccaggatcccctaagctgcacaatgagtttaggcgatcacctcgaagagctccgcgcgcggctgatcctggcccttctcggcctggtgatcggctcggttattgccctgatcttcggcacgcatatcctgcggttcatcgagaggccctattatgacgccatgcgtggtcggctcaaggaaacggaagtgcctcgggtgcagtcggaaagcctcgccttgcttgatcagttcttcgcgacgctgacggagcgcctggcgtcggacccgaatgcgcccccgatcgatccgaaccgcgttgctttcatccgggacgtctctgtgaaggctgtcaaggcctggacggagcagaagtgcagcgccgccgagggcaaagcgcttccgctggatgcgcgcctccgggtcttggggatcccggaagccttcacggcctacatgaagatcgcattcatttcggggctgatcctgacctgcccatgggtgttctaccagctctggatgtttgtcgcggcggggctctatgaacacgagcggcggtacgtgcgccaggcggtgcctttctccgccgcgctgttcatcatcggagcgttgttcttcctgtttgttgtcgcgccgctgacgctgcgattcttcctggcgttcaacgatatcgtcggggtggcggccaactggaccctggagaagtacatttcctttgtgacgattctgatgcttgtcttcgggctggcttttcagacgcccattgcaatcttcatcctggtgcgtacgggcctggtcgcgctgaagactcttcgcgaggtgcgcaagtacgtcattctggtgacagtcatcgttgcggcggtggtcactcctccggacgtgatttcccagatcgcgctggccattccgctgtacgctctctacgaattgggcattgtgctgtcatacgtctcgcttcggaaggccgaaaagaagaaggacgccggcgccgcaccgccacaccgcgattagtcctcacgccagtggattcccaccgaaacgctgaccttgtcgattgggcatgagtacgccacctcgcgcccgtcaacagaaccgattccgaatcggcactgtatcttgtccggcagcgttggccggagatgtccgacagagaaacctccgatcgccggcagcgagtcgacagaatcgtgtcggattgcccgcagaccacgggctcgtttttctgcttcttttcctgtaacaaagtgcgttcgattgcgtcttataccatagacgcccacggcgaggtgtgggatgtgacacgcgtgtagtctcagacgagattccattgacacggggaagccagcgggagtacgaccatgtacaggcggagaatctgcgcatccatcgggacggtcctggcgttggcggcaggcgcctttgcgcaaatccaggtaaacggctacggcttacaacaccagacgcatccggcggtggccatgaacgacaacggccagtttgtggtggtttggcgcagtcacgcctccgacggccgaggagggggggtattcggtcggcggttcggcgccgacggggacgccctggacgacgagttcaggataaacctctccgaggtggacgtggacaactggacgccggcggtggcgatggccccttcgggtgagttcgtcgtcgcatgggtcgcggcacgggaaggcgaccgcaacgtggtgctgcgccgattcgatgccgagggagaggccctgacggaggaggtggcggtggcggatgctgcggatgtcgctgaatccgacccccagatcgcgatgaattcggcagggaccttcgtcgttgtttggaccaactggtacggggattcgtacaccggcaggagctatgcgacggtccgtctttacggacccgacgggttacctctggtcgaaccgtttagggtcagcgacgagccacagcagaaatggcctgatgtggcgattgacgaggcgggacgattcgttgtcacctggattcggatgggcgacacgtacaatcgcccctacggcgagtacatccggattcgccggttcgacgcggatgggacaccgttgggaccggagaagtcgttgacagacgacctgaacagccggtggtacggtccagcggtcgccaccggccgcgatggcgggttcgttgtgacctgggctatcggtcccttcccctacgacatctgcgcgcagccgttcgacgcggacgccgaaccggtgacgccgccttatctcgtcaacacctgcgtcgaaggcaaccagggacgtccctgcgtcgtgtcggacgggagcgaccggtttctgattctctgggactgccatgatccaagcggcaacggctgcactatacgcagccagctctgcaccggcgcgggcgaactggtgaatggcgaatcgactctgaaggttgaggacgcctctcgcaactggtatcccgatgcggcgatggcggctgacggtcgctacgtggtggtctggatcgcagagactgccgacggcgaaggctacgacgtctttgctcaggtgggggccctgcgatgatagagcaggatccgctcggcggcgcagacgtcggtcagttatggcaggcgagttgcttctgggacgctcgcgacaggtcgttgagcaggtacttgcggaccaccacgtcccagctcatgttataggccagacggtagccctcgcggatcatcgcgtcgagttcggcttcattccggggcaagcgctccaatatctccctcgcgagccgggccccttcggtggcttcaatgcgatcgcgcacctgccggttgatctggagcaggtcttcgatgtcatgatacgggtggttgcccaaggcggtgtagtcggccaggaggacatttctgacgggttgtccgccggttacgtcgcggacgaagccggcacagccgcagacgcctgtgagcacgcagagactgccgtaggtgagcggttcgagctgggcgatgccgaagggctcgtagatgctctggccgaactcgacgtcgctgccttttcggatgtcgaggaactccatgtcggccggcatgcggctgccgcaggatctgggatcgaagccgaattggttgatgaagatcgccttgacgtttctgctgcgggcattgaactgctggatcgccgtatgaaagtcggcttccccgccggacaggtccggccagccttcacgatgggcgacgggccacccgtaggttgattccatgcggtggatgtcacaactgcgccgtcgtgacacgtccgtgcccagcaggagatagacggctgtctgcccctgctgcctcagcgctgcatccatctcggacagcacgcgcaggtcgcgccagagccccttgctgcggaccagacgtgtcacgtgcgtgaaaacgtagtccggccggtaccccagaaggttctcgcagtaccgctggagcttgtctttggaggccagcttctcgcccacgcggatctcgtgggcgggaatgccgttgtagacgatgtcgatgtcggctgtctcgaactccggtgccaggaaacgcagttcgtcggccacgtagtccccgaccgcgtagatatggtcgcagtacttcgaggcctcgaccagcgagtgcttgaaatacgtggcctgattgccgaagacatcgctgacgtaaagccggtcacgatgggcgcgctccatgacgttgtagaacatcgtgtcgtgaccgggatgctcttccacgatgcggcgcatcgtggcgacctcgtgggcgtagaacaccgttcggaagttacagtacggctccagacgggccgcaagcacggtcggcattcccatgaactcatgcgagatgatggtggtccggccgtctgcggctcccagcgctttgagcaccgcgatggccggcagcgccagacgcacgtactgctcatactcccatagatgctcgtgcagatgactctggatgccgaattcctcgaagagacgtcgcttgaattcgttgagcatgccgcgatccatgtaccgcacgtcgatcaacaatacctcgggggtgctccgaaccccggtttgcttgtcgataaaggtgcgacgtccgtatacgatacccacgttgtaaagactctcaatccgaccgaaggcatggctgtagctggggtggatcaggccgtcgatcgaggagtacagcacctctccgtcctcccccaaccggtcctggaccgagccgtccgtggtaaacagcgggctgatgagcatggaacgaccgatggcgttcagataggaaggacaggtgaaaaagccctgcaggacggcgccgattccgccgatctttcccacggcttcgtgcgtgacatgcaccgcgatgctctcttcggccacgtgaggtctccccaagcgttagcgtacgtcgatccgagtgtacgaatccacatttaaaatgtacgccacggtcggggacgtgccaaacggcaccgtccgtgcgaggcaggcaggaacagggcccggaaaaaggcgaggggttctccggtcggcagacctcttttccggacgtatgagagggtcccagggtagcctaactgaggcgggtccgcaggttgcgaatcaagccggagaggacctgtggcgggatcccctgaaggcccgggtcggggggatcgctggtggacatctgatccaggatttccttggccttgcgacggttgctggcgatggtctcggcggtccgctgcgcgctgtccaggtcgccgtcggccatctgacgcagatagcggacgatagcttccgtcatcttctcgctggtgacgttctgcgtcggctgggcatgtatggcggcgtcgggaatctccttttcctggagaatgctctgggtgagctggaacgtctcggccagaagccgccgcttacgctcctcttccgtctcatcgatcggcgccagcttcagctcctcctcgtcgctttccaactgggggacgtagaccttgttgtggcaggcgggacacttgccccacttgccgccggcggtgtccggggcatcgatcttctttccgcagtgctcgcagtggaatttgatggacatgttcagacctcacacgaagcgattaaccctgcgcgcggtactcggccacgacatcggtggtgatgccgccccgcggcgtgaagcgggccgtcaccttcatccatcgcggtttgcacgcgccgctcagatcgtccaggatgtcgtttgtcaaagactcgtagaagatgccacggttccggtagccctgcaagtagaacttgagactcttcaattcgatgcagtaccggtcagggcagtattccacgacgatctccccgaagtccggctggcccgtctttgggcagacgctggtaaactccgggcagcgaatggtaatccggtactcgcgtccgggacgcggattgtcgaacatctcgattgtgccgggttcacccatgtcctgatccttgtcgcatgtctgccagtcagtatagcgcatcggtgcgaatgtgacaagcgggaatcggcccggatacgggaaaacggcctctcgacggcacgcgcggcaccctttgacagggccggtccgacgcgataccatgaccggtcgattgatcggagcaagacgtctgagtcgtgttctcaggagtgcaggtcgtgggaaaggacaaggctgttgtactgttgagcgggggattggattcggccacgacgctggcgatcgcccggcacgaggggtacgcctgctacgccctgacgttcctgtacggacagcgtcaccgacgagagaccgaggcggccaggaaggtctgcggcttgctcggagtcgttgagcatcgcatcgtgagaatcgacctggcggcctttggcggctcggctctgaccgacagcggcattgaggtgcccaaggatcgaggctctcttggggaagccacggacatccccgtgacatatgtgccggcgagaaacacgatcttcctcagctacgctctggcctgggcggaagtgctcggcgcgttcgacctgttcatcggagtcaactcgaccgattacagcggatatcccgactgccgggccgcgttcgtggccgcctacgaagcgatggccaacctggccaccgccgcagcggttgaaggaaagggccggtaccgaattcatacgcccatcatcgagatgaccaaggcccagatcatccgcacgggaatgcggctgggtgtggattacgccctgacgcatagttgctacgatccggacgcccaggggcgaagctgtggtcgatgcgacgcctgccggctgcggctgaaaggcttcgccgaggcggggctgagcgatccggccgtttacgtttctcctgaccggcaacagagtctctgatgcgcgtgaccgagacattccattcgttgcagggcgaagggatcctctgcgggacgccgagtgtgttcatccggctggccggctgtcccttgcgatgtcgctggtgcgatacaaagtatgcgtgggacttctcaaccggccaggagtgtgctccgaccgatctggtcgagacgatccggcggcattcctgcggccacgtggtgatcacaggaggtgagccgatggtcggcgctgacctcgccgccagggaaggactggcggagttgacgcagcgcctgcgaagcgaggggatgcatgtgaccatcgagacggcgggggggctgttcgtgcccgacctggcatgtgacttgatgagcatcagccccaagatggccaattcggtgccgtcgcagttggctgacgccgcgtctcatgaaagccagcgactggacgttgaagccctgaccgctctaatccaggcgtatcccagccaactcaaattcgtggtcgagaccgccgacgatgtccgggaggctcgcttgctggtggatcggctgccgtccgttccgtcggatcgtattctgctgatgcctcaggctcgaaccaggcaggagtttctggcaagggccccggcgattgccgcttggtgtgtggagacggggtatcgcttcggacaccgcctgcaggtgctgctgtggagtgaccgtcgcggcgtatagcgcgttgctgacgtggaccgtagcccctttttcccattctgcgcgaatcgcagttgacaagcgatcggccgtcgatgataatccggtttgtgttgcccgggtggcggaatttggcagacgcgccagcttgaggggctggtgggcttcggctcgtgctggttcgaatccagtcccgggcacttcctcctggaagtgttccctgtgagcaagatcagaccggatgtgttccggatgaggatgcggctttactcgaccgcgaactccttcttgcgggtgttcatctgggccttgagcctggcaacgatcgacgagtgcatctgcgagacacgagactcggacaggtccagcgtcgcaccgatctccttcatcgtcatctcttcgtagtaatacaggacgatgatgagtctttcggcacgagtcagtcccttcgtcaggaggttcttcaggtcgcgcttctgcgcttcgagcagagggtcttcgctgcggttgtccttgatgacgtcgatttcgtagacgtccttctccccgtccccgtcgccgcacttcgtgctcagggatacgagactggcggcattggcatcccgctggagacgaatgaactcatccatgtccatgttcagctcctctgccaactcgttctcgtcgggtttccgccccaggtgcatctccagcgtgtgcgtggcccgagccaattgatgggccctggcgcgcaccaggcgaggcacccagtccatgctgcgcaactcgtcgagaatcgatcccttgatgcgcggggcgcaataggtctcgaattttacgccccgggcgggatcgtaggcgtcgatggcgtccatcaggccgaagatgccggcgctgatgagatcatcgagctcgactttgtccgggagtttgctgtggagccgctcggcggcgtatttgaccagatctcggtaatgctccatgaggaggttgcgatagcaatcctgacgagtctcgtggaacagctcccacaccttgtcgatgtcgagcttcttctcgggcttcgtcgctgagtgtgtcttcacaggttgtctccgttacatgtcgcagccgcaatccgttttcgtcgtgctcacaagcctgtgggccgacatcgggtccggacggtccgccggctccgacaacgcccacactcacacctgtcattatcggccttggaggccgggactttaggtcagccactgaaagactctccggaaaaacgtcccgccatcggctcggcggcaatcgatgcccccgaggcgagccgccagcatgttgaacgagcaggcgatttgggacttcggataggccagtacgacgggctgacgggaccgtacggccgcacacagacgttcgtctttgagaaggaccccggcgtaatagaggtcggccttgaggaaccgggccgccacgtcggccagacgctggtaaatctgtcggccttcggcgatactctgggccatattgaccaccacacttatcggaccgtcgaaatgttttcggaccaggaccttgatcatgccgtaggcgtccgtcatggcggtcacctccggtgtggtcaccaccagcacgtgatcggccgccaggcagaaactgacgacggaattcgagattcccgcggcggtgtcgatcacgatcgtatcactggtatgttgcagtccggacagatgctgaagcaggcggcgctgttccgactcgctgatatcggcgagctggtccagacccgatgcgccgcagatgatctgcagaccttgggggccggcctggatgatgtcttccacgcgtttggatccgttgatcacatgggagatgttgtacttgctgcgaatgttcagcaggaggtccagattgcccagcgagatgtccgcatccagaagaaggacgcgcttctcggaggcggccatgcagagagcaaggttggtggcgatgtttgtcttgccgacgccgccctttccgctggtgaccgcgaggacacgggccaccggccgatcactgaccggcgtctgctgcagattgacggcttgattcgccatgattgcgggcattgccttcgagtcaatcggtggtttcacggggcgtcgaggagtcttcgagagggctgtcgggagccacgatctccacgatgggcagtcctgtcgggctccaaggggtgccacacttgagggccagcagttctctggcgatcttccgattcagggagttttccagaagcttgccgacctggagctcaatgtactcgtcgcggttctgttcgagcagcgctttggcgtgcagatccggctgcggacgaatctccatggtgctgttcgggccgaatcggatgttctccgtatcacagaacagcagacgctgattctgaaggtgctcggcaatcgcgccgttgagggcatgcacgaattccagcacgggcatatcctgtggtacgaatcccggcgtccgcgtattgtgcatgttctggtacaaaacggcacgacgaagctccgtgaagcggagaatcttcaggagcaactccgtcaggttgtcggggatgggaaactgcatatccatgagcactccttcgggaaggcggtctcaggcggtccgcaccgcgtggtgttgtaaagaagaggtgcactgggatggacaagtctggtgagggtcgacctcgtctggcgccgattggggggtactcacggagataaacccgtgtgcacggagcggacgcacacggaatggtattactcgcactgaagccggatgtctcatccttgatcctttcggtcttccttggacctccatgaagcggcgaacctccatggggtgttgacacgtgcttggaacgcggcgatctatgacaagcccctatgttgcttcgggcgacataaagtttcctcccgaggacgaggcattgcccggcggggcggcctcaatctgcccggaccggtgactgtcgtcgaagtgtatcgctctctgcgtccgctcctcttcgttcagcgtgcgacggatctcgctgagactcatgttctccctcagttccatgattcgcgaaagacggtcgaataccgattcatcgtagaggcggtgtccgccttcggtccattccgcttcgcgaatcagccccatgatggtgtagttgtgaatcgtctgtcgggagaagggactggatcggaccacttcgccgatccgatagcgtttggcgggaatctgcagccttcgactcactttctgccaactcatggttgcgatccgggattgaactgatgccggcacgggagccggagcgattcgacaaagtccgacaatggcgaggcgaccgcccatcgtgcggcagggatgatacaggtatcttgttcagcacaactacgcatgacaccacacccgaaagaaacaagagcattacgaaccgggcaaaccatccttccgaggtggcctcccgctccggagcatcgtcagatataccagccacggtatcgcgccacctgccgccacagacgacttcacgcctgacaacctgcccatgtcacagccgaacgccttgcgcccgtctgtggcgaccacagagaacgcattttacattttgcaaaatgtaaaagtcccttatcggcctgtcaactggttttgggatttttcaggaaaaatcttcggatggctcgatcccggcgtgatgggcctttgcggataccgggcccgctgccatcctaaggccctataacatgaggaaatgcggactcttagactgcgacgacgggctccgtttcacctccgaagcctgccacgagccctttcatagttttctgcaaacaggccgtggagaattggacgataagaggcggtgtaagtccaaagccataatctctactgaatcggggtgctattgtctgcccatgaccgaacgaatcgaccaatcgaacgaccacaaagacgatccctcggctcaccactcgctgctggagcgggtcacaccgctggcgcgacagatcaacagcctggacatggaccggatcgccaatgtctgtgtcacgaagatccccgcgatcgtcggatcgacctttgcgtctttgtatatcctggatgagtcgaaccatattctgcatctggtccgctgcaaccatccgtttcccatcaacaagatcgtgtccctcaatcagacgccaccgtcccccatggtcgtggcggtcaagagcaaggaactgatcctgaccggtgacatcgacacgtacaacagaccgatcatcaagcggtcgcaacgggcctttgcggagaactacacgacgaccaactgcgcgatcgtgcctttgatctgtcacgacggcgtcgtcggcgtcctgaatctggcggacaaagcaccacctgtcgccttcacgcgggaagacatcgcgttgatcgagttgctggggcagttgatcggcgcttcgatcggcaacatcaagctgttcgagaagatgcagcgacaagccatgttggacggtctgacgggcttgatgaaccaccggaccttctatgaggctctggaacgggagctgtggcgttcgcgccgctacggcggtacaatctcgatgatcatggcggacatcgacaatctcaaagctatcaacgatacctacggccaccgtgcaggcgacaaggtcatacgcgaaatcagccgcaggatcaaggagtgcatccgccagattgatctggcagcccgatatgggggcgacgagtttggggtcatcctgccgaatacgtcgctggaagaggccaccctggtctcacagcgcatcgtcgatgccgtcgcttcctcttgtgtgttctggcaaagtgttcgcatcccgctatcgatcagcgttggtgtcggccagtatgacgccgacgccaatccggaggatatcaccagtcgatccgaccgagctctctacagagccaagcaatcgggcaagaacaccgtctgggtgttcggatctggcgagaaggagtgattgtctggggtgtcggcgcgcgattgcctccgtcagcacgggtcccggagccagccaagcggccggctccggcggcgggtgtactcgatagtggtccgccgccgggccggatgcgattctgacggttgccgaccggtaccggcccttgtcatgcatgccagaaggctacggcgcccaacagttgggataactccccgcgccgcaactgtagtgatagtaggacacgcagccgcagttattccagtgccatgaccagtaccagttcaggttaagacacggattggggcagggattcggacacgggttcgggcatgggtccggacacgggttcggacatggattcaggttcggacatggattcaggttcggacatggattcaggttcggacatggattcgggttcggacatggattcgggttcggacatggattcggctgtgggcacggacacgggtcaggattagggcacgggtttggacacaggtcccagttcgaccagtggcagacgctcatgtaggagctcgagtaatacatgccgacatgatatccccacgccggcgtgctggatgccagaacgagcaggagcaacagggcatacttcttcataggaaacctccttgtgacaatacggtgttcctggccgcgcgaatctctccgtagaccggcgcgggtgagtgcgattcctgcgcactcgatcagtccgatcggaacgcaagctccgaacgggagacatttcgtgcatgtggtggcggttcatggatcgccagcgccgaccagtcgccgaacagcatgcccgtcccgacaacgatacgccgccggcctgatcgagcgaaggaagaatggtggccagtccacaccatgacagtccaacggattgggtcgcggcccgagcaggttaccagagacgccgctcagacggcggatcccagccgtgggctatgcgacgggcccacggctgggccgaatctgcatgccatgctctcgccaatgcccatatcccttgcgtaaagcgtctcgacgatcacctcggtgtgtaggtgacaatgccccataccgggccgccatagacgtggtggtcgccgaaacttccaaagcaactccaatcgatgcagccgacttggccttgcctggaccaggccccttggtagctgtcgacacccatgacgcggaccggggtcatcgggctgctgtagagcaggccggcctgacccgcgaagttgccgatgacgacggcccctggactgggacagggcgtcggacacggactgggggacgggcagcacagcggtgtgccgttggcactgccgctccagtttccaatgccaaatccccacgcactggtgctcatcgcgagcaccgccagtaccaatacgcacttcttcatcctttacctccttgtaaactgactttccttttcatcagagcacgaccctctccggaaggtcgctccgtccggacgcacctgaaccatccatgcgggtgcgcatagaatgcgattcgttcctgactacccttttgcgtggagacaaaacgcgtacgaaaacaggagtggtggagaaatgtggcccattcagcatccctgcctccgtgcccacgtatcgactccaaccgatactggtcctgtttctacaccggcggcgggcggttgtcaagagaaatctggatgttctatgcgacaattcgcttgtatagggcggcacgtgcaggccggcggtctttatgtggctttccgatcggtgtggattgtgataatctgggcgaggtccaatctctcgtgccgcagttgacaggacggcgcaaggccagtctgcatggggcatgcgagtagggggatggcagaggaactacacatcgcagacgcggcgatgaggcggttcggctgccggcggagaacaaggaactgggaatggaatgaacgataacacgatccatgaggattgcacacgaggtggtcagaaccgtcctgacttgcggcagacggcccatcggccccggcggcttctggtgttcggggggatcgctctgctactcggtctggcaggcctgagagtgcttcgtcaattggcttacgcacccccgtccgtcgacggtacctacgagtggaccctccgttttccgggtccctcgccgggagccacgttcaagaccgctccgggtgacgatgtccgcaagatgcttgacaccctgctggtcgatgccggggcggattgggccggcgctctggagcagaccgggacggtgcggatcgagttgtcccacctcagcgcgactccgcttggcgttcgcctgctgtggcgattctggggaccgaaaggatcgcccccgcccgaccggatcgggcgttcgctgctgacgatggaggtgcggcaaacgtcaaaggcacccctccgatatgagttggtgcaccttggcacgggcggaaccgagacggtgaccggtgcattcgacggctacccgcatgttgaggatgcgatcctcgacgatctggccagagtgatggagtccattcaggcgggtcatgcggcggggtgaaccgggccgtcgtcacaagacgatgcctgcgagtgtacggccacgcatgtttcttcagaaaggagtgatccatgagagatgccggggatgtgaaggccagccgtgcggcggtcgcggttctgctggtggcgatgctcatgtccgcgagcgctgcttcgcagcgtctgcgcgttgccgaaggggggcgctacatcgagtacgacgacggccggccgttcttctatcttggcgataccgcgtgggagttgttccatcgtctcaaccgggaagaggcggatcgctacctggccaaccgcgccgccaagggcttcacagtcattcaggcggtagtcgtcgcccagttgggtggtctgacggacccgaatccgtatggcgatctgccgctggtggagaaagacccgacacggcccaacgaggcctacttcgagcacgtcgactacatcgtcaacaaggcgaacgaggcgggtctggtcgtcgggatgctgccgacgtggggcagctattggaaagtgggatcgggcatcttcaacgccgagaacgcgaaggtctatggacgcttcctcgggcggcgatacaaagacaagtcgatcatctggattctcggtggcgacgagaacattcgcaacgacaccgagcgagccaccgtcgaggcgatggcgctgggccttcgcgagggggacgggggagcccatctgatcacgtaccacccgcgcgggccgggtctgtcttcggactacttccaccgagccgactggctggacttcaacatgttccaatcgtcccacgcggcacgggaccacgacaacggcctgttcacggatcacgattacctgctggagccggtcaagcccaccctcgacggtgagcctcgatacgagatgctatcggtgggattctacaacgccaatgaggcgcgcaacgttcgtttcgatgcatacgatgtgcggcaggcggcctattggtcactgctggccggcgcgtgcgggcacacgtacggacacagcagtatctggcagatgtggcagcccggacgcgcgcccgtcctctgggccaacgtcccatggttcgaatcactggaccatcccggtgcctttcagatgggcctgattcgcaagctgttcgaatcgcgtccgttccgcaagctccggccggcgccgtcgatcctcgtcaatgctccggatacgggaggcgccaaggtccgcgcggcactcgcctgcgacgggtcattcgccttcatctattcgccacggggcgagccgttcatggtgcacctgagcgccatccgcgccacccgtgtgaaggcgacgtggttcgatccccgctatgggatcgccgagccgttgcacaccagcgacaacgtgggctttcagacgttcgtgccgccgacttccggacgcggctgcgattgggtcctggttctcgacgacgaagccgcgaaggtcccgccgccgggccggccggagtgaggaacgatgcctgcgatggactatgagcgggtcgcccgcttctacgacagctacgtccagacggacatggatgtcccatttttcctgcgggaagcgaagagggccggcggtgcagtcctggagttgacggctggcaccggacgtgtctcgattcccttgctgttggccgggaccgacctgacgtgtgtggaggactacgatcccgtgtccaaatcggtgagcggcagccagttctacgacgttcggtgctgggatggctctcttccggccgccatgactgtggacctccattcctgtctgcactcgcactacgacttccaatcgctggcggaagcagcgggtttcgtcccggtccatctatacggggactactctatggtcccttcgagccccagacgagtcccttcatggtctgggtcctgcgcaaggcacgagcggagacggtttgatatggccgagcagcgatatccggaaccgacggtcggggcgttgatcttcaacgcccagcgccagctctttctgatgcgctcgcacaagtggcggggcaagtgggtcgttcccggcgggcacatcgagctgggcgagacaatggaacaggccctgcgccgcgagatccgcgaggagaccaacctggagattcgcgacatcgagttcgtctgcttccaggagttcattcacgatgaccggttctggcgacgccggcactttatcttcttcgatttcgcctgcaggaccgattcggcggaggtgattctcaacgacgaggcgcaggacttcatctggatcgacctcgaccggatcggcgaattgccggtggagcactatacccgcgtcgccatcgacaagtaccgcgagcgaaaccgccggtgaccaggctggtcatggacttgccggggccgtgactcccacatcgcaaaggagtggacgattctgaccgtgggtgctataaagacggtcggcgtcaccgtgtggcccactggaagcgcttgcaggccgcctgtgacggcggaatgtttcgcggggacgcactttgcgagagggagtgtgaacgatggaaccagcttctgggaatcgatggcgacgccagcgtcgcaatgcgctcgtgtttctgtatgcggcctttcttctcatgggtgcactgagcggactgctctgtttctcggccgacgagggtgcttcccttcgtgtccagttactgtttgccattgcggtctcgctcgggttcatgtggtactgcacggccgatgcaaggctcctgggtaagccactcctgccattggccagggtcggcatcttcgcgttctggccggccggcgtacccatctacctgctctgggcgcgccggctcagagggctgggcatcctgctcctgcacggcatctcgttgctgttgaccttcgtggctgcattcctggcgacggcgtacctggtctacggcgaaaggcttctcggctgagtcttcgccggcagatgctgtacatgtggtgtgtgccgcctgtatgatacaggcgtgatcgagcacgaaggagtggcctatggatcgggtgcggcggtgtcttatctggattctgttcggctgtggaatcgtggcggcttctcccgtgccgggtgacgtgggctatgccggccggcagggtgtgactctctatgtctcggaggtgggggacaactccgatggactgatctgggcgcgtgcgttccgcacgatccaggcggcgttgaacgccgtgcccgacgacggcgggggccatcgggtgatcgtccggccggaccactacatggagcccaacctcgagacgccgcacaagggcgcgccgggcgcctacaatctcctgattggcgatgtcgatgggcgtctcggttcgggcgcgcagggttgggttgtgatcgacgcgggcctgttctgggacctgacgcacgagagcggcgcgggcttcaccgtcctggtcgaggactgccggatgatcgtactgaacttctctcagccgatgatcagtccttcgacgggaatcatctgctccgagcggaatccgcaattactgcacgtcgatctgaaggactgcattctggccggctatcaggtcttcggcaccggcggccatgacgagaagatttcctacaagacggagggtcgcgtacaggcctatttgcagttcgagcagaccgctcccgccggcttcgagcgtctgggcgcctggccgatagagctgttcttccgcatcgcaccgccgcaggtgagaaacggtgttatcgactggcccgcatggcgttagaagtgtgcactcgtgaagtccggaggattgcaaccgcaagtatggatcaggatatggcgtgaaagcgaggtgtgaggatgtcaagccgttgccgtaacagacaggctcgtattctgagtcgatacagggccgtgacgtgcgtgtgcgtctttgtgatgagtgttgcacccgtggcggtggtgcgcgcggcagacctggtgttcacgcatttcacgattgccgatccgttgcccggctcggcgtgggggacgggcggcagcccgctggccgactatgacggcgacggcgatctggacgtggtcatctcgcggcgcgagccgaagaccgcctactggttcgagcggaaggacgacgcgaactgggtccgccacgtcatgggttcggccgagggcctggccaataccctgggcgcggcggcgctggacatcaatgacgacggttggctcgatgtggtcctgacaaacgtatggtttgagaaccccggtggtctgctggagaaccctgacacgccttggccggcccacgacttcgccggcgggggacacgatatcgtcgccgccgacatcaacggcgacggccggctcgacatcgtcacgtatcacggcacggtcgtctcgtggtacgacccggccgacggcatgaagcagaccgacgtaggacagggcgaggagaaccacggtggtatcgcccccaacggcatcggcgatctcgacggcgacggcgacctcgatatcgtcatcccggcctactggttcgagaatcccggcaacacgtcccgcccctggcggcgatacgaatggccccatctggcggtgcccaacgcgtcctacgggaccagcatgcgctcctggatcgtcgatctcaacggcgacgggcgcaacgacatcgtgtacagcgactgcgacaccggctggtcgcacgtctactgggtcgaggacaccggcaaacgaccccgctggcaacgccatcttctcgatgacccgcccacgcagccgggcgatgtgccggggaccggctcgtttcactcgctcggcgtcgcggacttcgacggcgacggcgatctcgacgtcttcgccggcgagcaggaagatcccgacacctatatggaatccagcggcaagctggccatgaagcccaagggtctgaaggaacgcggcgtgatctggctcagttccggcggatggagtccgacgtttacgcctgtcgtgctgcacgtcgacaatcccggctggcacgacgccacgctgggcgacgttgaccgcgatggggacatcgacatcgtcacgaagatatggaacaaggacggcgcgacctatcacgccgactactggcgcaacgacacgccgagatagaccatcgccgtctgttcgtcacgtggacgacgtgagcttgggcctgcgcgccagaagccacatctgacgcagcttgctgcgcagaacacgacacagggagaaacggatcggagccagcgtcggcagctcgaaatccgagcatggttcgcccggtggatcgcccaccagttcgatccggtcgagatccagaccgtcaaactgcatccggctcgcggcgcggaggagggggacctgcccgggattgatgccgagcagccgacagcacacggtctcgcacgagagcggatcggtgcctccgatcagccagccgaggggcttgctgacgcccctcgacggacctgttcgctccatcgcgacgatgccatcgatgagcgtcagtgccggccggaggaagtagcagatatcgatcagcagtctgcagaatctcgcagagtcgcctccgtatcggtaatgccacagtgccttgcgcttgccgctgacgcatccgaacatgttcttgactgccagggtcacgaggagctgaccgtgggccttgagcttcggcaggttgataatgacatcggcctccagcgccaccgcgctgagcccgactcgcggaccgccttcgcggacacgccgcatagtcggccggtccagttgtcgcagaggcacacccagtctcttcaacggctcgaccaactgcagcgcctcggcgcaactctgcacgtctccccatccgggtgaatcccccacaaagggcctggccccgaagtccttcagaaaccgtgcggcagccagaatcaccgcgggatgggtctgtgtcgcgtcttgtcgatgcgaccgtggggcgatgaagttcggcttgagtagaaccctgtcaccgggcttaacgaatcgttcaatgcccccgagcagccggaaatgacgctcgatggcttcggcaaccctttcgggttcatagtcccggcatcgaaccagcgaaacgacagtcctgtcggccatggtcaatcagtcattgatgcgcgtacagaccagaacgaatacgcgaaaggccggacggcgtttcggtggctctttcgcctccgcgtggaagaacagcaccggttccggtcgattgaagaaccgcccgcccagagtgagggtctcgcccgaatagctgtcgggcgccagcacgagcaggtcgcccggtgtcatctgggcggcgaatgccgccgagtcgaagtagaactcccgtcggcgattctgttcttccagctccggaatcgcgctggtcaaggcgagcgtatatacgggatacgcgatgattttccgcacgccgcgtgcgccgggaatcgcctgctcgcgaagccgcagcaccagcagaccggggccagcttccaccgtctgagcggacaaatccgttccgacgaagtgaatccggctgttcggggaaacaccggccacgggaaggtcggcgggttcgtcgttgccgatcaccagtgaggtggttccggcatcctgggccccggctgccgccagcagatcccgaacctgctcccacatcgtcgtgcgtcccatgcgcacacggaaggagttgcccgcaaaggcactgtagctgttggtctggatcggcttggccgagagtgtctgccagagatcgtcgagcttgcggatgttctcggccggcatgtccagggcatagatgtcgaggttgaccgtcgccaggaattgcgcccggcgcgacggatcgggcgactggggtgccagttcgccgatcttgacctgctcccagattggcaccaccggctcggacgactccttgcagccgcccagactcagccaggatagaatcgccagcaggatgatccgcagggcacgcatggcgggtagcctacccgtgcggccaccccttgtcaacgtccctggatttcgattgaccctccatgctgccgattgataggatactatgcgagcacagggcagacgtcacggccagatgtacgcagcagattccaacgcgccatgaggaggttcggtcatgtccagacagacacatcatgtgaacagcagcagtcttggtggcacctcgcggtttgtggtatgggtcggcgcatcgcttctgctcctgccgctcgcggcggtccgggcgcaagacccgacccgcttcgaagccgacatccaggcgttcgagcggatggacgcgaccacgcctcctccgaagaagccggtgctgttcgtcggttcctcgagcattcggatgtggaccacgctgacggcggacttccccgactacccggtgatgaatcgcggcttcggcggttcgtacatgagcgatctattgtactatttcgaccgcgtcgtcgctgtctacgacccggctctgatcctggtctatgagggcgacaatgacctgtccggcggaaagtccgtggaccaggtctacggtgagtatctgcagtttgtcgcgcgggtcgaggcgcagttgccgcaggcggatgtcgccttcatcgccaccaagccgagcccgagccgggcccagtatgtggaggtcacgcggcagttgaacgagcgtctggaggctctggccgcgaccgatgcgcgcctgtggttcatcgatgtgttcaccccgatgctcaacgaaaagggccagcctcgtccggaactgttcggcagcgacatgctccacatgaacgccgccggctacgagctgtggcggtcgatcatagagccggtgctggcggcgtgggccatgcccaaggtacaggtcctgctcatcgatttcggtgcgtcgggcacgcccacacagaacggtccgtcgccggacgatccgctgagtttctggaacaatgtgaccgaagccgtcggcggtgtggcgggtgggcatctttccggcctggtcaataccctgaacatgccgacgtcgatcggtctggagattctcagtccgttcaacggcagcggcccgaacaccaacgggaccctcgaatcgaccgtcttcccggcgaacgccacatgcgattcgctctatggcaacaccgagacctggggcgggctggccaacgtgacgccccgcttcaagttgacgggcctcaatcccgaacgggtgtacaacttcaccttctacgggtcgcgtctgggtgtcaccgacgtccgtgagacgagctatacggtcgcaggcgaaggaaccacgttcgtgacgctcgatcccgccaacaacgtcgacaaggtcgcgacggcgctgggcattgtgccggacgcgatgcatgagatcaccatccatctggccccgacggcgaacaacaataacggatatcactttgtctatctcggcgtaatgaaggtcgaggaaatccccgagcagcagccgatcgttttcatccggcagcctgccagccagacggtggtggcctaccagtccgccacgttccaggtggaagtccagagcacgccgccctatgtcgtccagtggtacaagaacggcggcgcgatcgccgacgccaacgagttcacgtacacgatcgacattgtgacgccggacatggacggcgccgtgttcacggtgggcgtcagcaacatggtctacagcgccctgagcgaaggcgcggttcttcgcgtgatccccgacgtcaacgcaccggttctgctgtcggcccagagcaccaacggctacacgattacactgtccttcgacgaacggattgacccggaaacggccgccgtggcgcagaactacagcgtcaacgagggggccgttgcggtccttgccgccgaacaggctgccgatggccgcaccgtcatcctgacgctggagcagcgcgttctgggccgcttcacggtgagtgtcggcggcttgcgggatctggcgggcaatgagatcgccggcggggccacggtggcagggcaggtgcgtccggaggttcttctggtcgatttcggcgcctcggatactcccacgaacgacgatccgaccaacgcgtggaacaacgtgacgcagagcgtcgggtgcgtggacggcggtcgcctggccgctctggtgactgtcgagcacattccgacaaaggtcgatctggtcatcatccggcggttcaacggggccaacaccaacgggacgctcgcctcagcggtctttcccgcgaacgcgacgcgcgattcattgttcggcaacaccgagacgttcagcggcctggccgatgtgttcccgagcttcaaactgacgggactcgaccggttgctgacgtatgatttcacgttctatgcctcacgcatgggcgttcgggacaaccgcgaaaccggctacacggtcgccggcgccaacgcgggctttgtcgccctggacccgtcgggcaacgagaatgcgttcgtgatggtgaccgggatcgctccggatgacgccggcgaaattcgaatcgatctggccccgacggccaacaacgtcaactccaaccactttacctacctcggcgtcatgaaggtcgagccgacgccggccaagtaacggcagaatcccgtggcccctctcgaccccagccgggaggggccgttccttccatcggaccggcagggcgggttcgcaacctgcgcgtccttttttcgcctccttacgccaaccgtattggctctgcggcagccaatcaccgggtcgggaattcgcttgactcagggatggttttgggtctaatgagccgccgattattcagaatgaaactccatcagaaagggtgctttgacgatgaagatcagccagagagccaggagcgttcccccttcggcgacgatcgccgtgacggcccgggccaaggaactgaaggcccagggggtcgatgtggtcggttttggggcgggcgagccggatttcgatacgccggagtatatcaaagaagccgcgatcaaggccctgaaagaaggcaagaccaagtacacgcccgccgcgggcatcattgagctgcggactacgatcgccaagaagctcgaacgggaaaacgggctcaagtacactcccgagcagatcgtggtcaacatcggcggcaagcactcggtctacgaggcgatgcaggcggtgctcgatccgggcgacgaggtgctgctgccccggccctactgggtgacgtatccggaggcgatcaagctggccggcgcggtgacgaagatcatcgagacggacaaagccaacggctacaaaatcacgccgcagcaactccggaaggccatcacgcccaagaccgcgatgctgatcctcaactcgcccagcaaccccggcgggttcatgtacacgcccgatgagctgcgggcgttggccaaggtgctcgaaggcaccaacatctgcgtgatgtccgacgaaatctacgagaagctcgtctacggcgactcgaagttcgtcagtttcgcggccctgagcgacgacgcgttccaaaggacgctgaccctcaacggcctgagcaaggcgttctccatgaccggctggcgtctgggctacaccgccggaccgctggacgtcatcaaggcgatgtcccgcctccaggaccacatgacctcgaacccggtgacgttcgcccagtatgcggccattgctgccttcgggccgcaggcggaggaaacgatcgagaagatgcgggtcgagttcgccaaacgcggcaagtacatggccgagcgactcaatgccattaagggcgtccgatgtgccgagccggcgggcgcgttctactgcttcccggacgtttccgcgcacttcggccggaccatcggcggcgtcaagatcggcgacagcatgcaattcgcctcggccctcctcgagcaggccaacgtggccttggttccgggcctgccgttcggctgcggcgacaatgtgcgtctgagcttcgcctgttcgatggagcacatcaagaagggcctcgaccgcctggaaaagtggctgagccagtaacacaggcagtcggcacagcgtcaggcagtacgaggccgaccggcgcagcggccggctgggcggcacggcatgcgcgggcgcgcacgtgaatcttgttcgcatacagtcttcggcaaaccgcaacaggacagcgggggttcttgacgatatacggaagaagcagtattcttctacgatactatcagccgaaacctgttggaaagtgcgcgaatggcggcaaatgagaccggcgagggggacatactgttgacggccgaaggacgctcggcatggtccgtgtgcgtggcggtcgccggctggctggcgatgctggtcttcgcctttcacgcctgtacgcacatggtggccgccggcgacacctgggtggcgatggcgtgcggacggcactttgttaatcacggcgtcgataccgtcgagcctttcagcgccaacagccaccgcgccggcccgaccgaggccgaggtcgcgacttggccgggctgggcccgctggatcaccgagaaggtgggcctcgaaacggttcgcaagtggcatccgaccggctggatcaaccagaactggctgacgcacgtcatcttttatcgcctgaccaccctgttcggttcggagcaggagccgtacttcgacgcgctggtgttctggaagttcgctgtgtatttcctggcggttgccgcaatctacgtcaccgcccggctgctgggcgtagaccctgccctggccgctgccgcctccggtttcgcgctgttcgtcggacggtccttcttcgacatccgcccggccggcttctcgaacctgctggtggcggtcttcatcctgattctggcactgaccagttacaggaacgcgctctacatctggctgatcgtgccggtggtggtcttctggtccaacgtgcacggcggctatatctacgccttcatcgtactcgtcccgttcatgggctggcacataatcctgcaccttccgaagcgctggctggtggcggtctacagcattctcacctggctggttctctatggcctgacccatcagtttctcggtcgtcgggctgaactggtggccgagtatttctcacagagcaacgcgggcgctgtcggtatcggcgactggatgattgtcctcctggtgctggccatcggtggcagcattgcggcggtttcgcatcggcagatcggcgaccgcgcgttgacggctttgcacggcgtagcgacgtgtgtggtgttccttctggtgttggtgcggtacttcccggcgccgcccaacacaatgaacgaacgtattctgaagatctttgcggatcacgcggccgggggacgctggacgtgcgtcggtatgttcgttctgtccatggcgttcggtgcggcggtgctggcggtaagagagaagggcattcgcgtgttggatcgccggacccttctgcacacgctcggcgccggagcggtcgcgttcgtcgcgatggtcgtgttcaatccgttccacctgacgaacctgacgcacacctttgtgatctcggtcagcaagcacgcggaacgttggcgcgacgtgcacgagtggcatcgggctctggactggacgaacccggttggtaccgccattccgtttctgacaatgtacattttcgcctggctcgctctgctggtctgggccgtcctgtcggtgcggatggcgctggccgaacaatacccgaagaagcgcggcgggaaggccgaggcgcccgccgaagcctcgatcgacgtcgttttcattattgtggctgcgctgaccgtctatatggcgctgcggtcccggcgattcatccccattgccgcttttgctgcctgtccagtgatcgcgttgctggtgcagcggatcgtggccgccatcctgaccctggcggacctgcgtggtgccgctcggctgcccgatccggctcgggatgagctcgtcgaacgcctgcttctgctcgggctggcgggggcgctggccgtcctggggttgtggcgtctgctcttctggcgctggctgttcttcccggtgccgggtgcgcccacgcagattcagccgcgtttctggctgctggcgttcggaacgctcttggccttctcgtcatttccgctggttaccgtgttctgcggaactgacaaatccgcgggaggtaccagacaggcgggcgccttggcgttcctcaagcgggcctggcaggttgccgccctgatggtcttggcgtctgtcatgggttttggcctgtgggtagggctgaggttcaagctgatctacctggattactggccggcggacccgaagctgacgtcggtcttcatgcggatgaccgcctccgatgccaagccgttctatgcctgtcaattcatccgcgagaacaagctctcgggcaacatgttcaactactggaccgaaggcgggttcatcgcctggggtcaggaccccgatcccaacacaggacggacgcccctgcaactcttcatggatggccgggcccaggccgcctacgacacccggacgttcgacctctggacggagatcctggcgggcgggccggccgccagaagggccgcgtacgagggacgggacccgaccgccgccgagctgagagagatcgggcagtgggtgaccgagcaactcaacaagtttgacgtctgggtggtcctgatgccggccaaccagttcgacaaggatttcgtccgcgccctcgaatacgatcccaactggcgtctggtcttcctcaacaacaagcagaaactgtttgtcaacgtgacgaccgagcggggcaaggagttgttcggaggcatgtttaccggccggaccacgtatccggacgagttcaccgccaacttctccgtcgggcacaaccttctattgtctgccgaggccagccagagacagcagggtctggacatggtcatcaaggcgttccatctcgatccatcgccgggccccatgctggacctgctggtgattgccgcgcgctatcccgaactccagcagcgggtcaacgagatctgcgtcgagtacaccacgcaattcgagaagaacaagtccagctacgccaatcacgatggctacaatctccggctggaagcggcgcgcctggcgatggtgcggctcaagcaggtcgccgaggcccaaggcaaccgccaagtcgcccagacctgcgagaaccagatgaaacgctatctgatcgaaagagacctcatttccgacaggaagaggtggtaagcgatggcccaggcggacaggcggacgtcgtcgggtgagcaggcgcagtcggccgtgtcgatctcggtcttttttccctgctacaacgagcaggccaacgtggcgcgggtggccgagcaggcggttcgtgtgctcgaagggctgggcgccgactacgagatcatcatcgtggacgacggcagcgtcgacgagaccggacgcattgccgacgagatggccgccggcaacgatcggattcgtgtcatccaccatccgcgtaacctcggctacggcgccgcccttcagtcggggttccgcgccgcgcgcaagaagctggtcttctacacggacggcgacggccagttcgacatcggcgagatgccggcgctgctgccgctgatgaacgagtacgatatcgtcagttgctaccgcatgaaccgtcaggataacatcgtccgcagaatcaacgggtggctctggacaaaggtcaccggtctgttattctcgctgaaggttcgcgatgtggattgcgcctttaagctgtatcggcgttccctcttcgaccggatcaagatggaaagcaccggggcgctgatcgacacagagattctggcacgggccgcccggaaagggtatacgattacgcagagaggagtacatcactatccgcggacggccggtcggcagaccggagccagcctccgtgtggttctcagagccttcaaggaactctggcaactgcgtcggcgcatcgtacaggaaccatgaggggatgacgcggctctccggcgcaggccaggcagtctatgcacagacgaaaagccaacctctttatctacggatcgcttcgagacagtcgcatcttcaagtcggtcagcggttttgccttcacgcgcaagccctcgaagatcgacgtcaaaacgctgtttgccgagccggcttttctcccgggtcatcgacgggtcagcccggataacgtgtatttctacgccgtcaaggctcccgacgcgagaatcgaagggtttgtgatccatgatgtgcctctctcggcattggccgaaatcgaccggtacgagggcaaacgctaccagagggagacggtccacgtctataccgcacacggcaaggttgaagcccaggcctatctcgtgaccgccgaatcgatgcggaaacgcttcggcgaccggtttcacgtcaatctcatccacgagttgtggctccgcaagcggatcaaccggtttctccagaagcacacgcgtcccggcgagcggaccgtcgatgccgaactggaacgtcaggccgaacgcgagttgctggccacgaccgagcgtgacctggtcatgagccactaccataccgatgccatcagcgactactggctggaacgggagctggaccggccccgcccgagcatccgccatctgttcaacgatccggaggtgcagccctacctgcgcaattacctgtcgctggttctgcggcaggtgcttctcaacgagttcgacgagcaaatccagaaccggtaccgtttcgacctggagcacatgcggaccagcgagcggtacttcgcccggtcggtcagtctgctggcggctctgcggatgatcaacgccagccgcagcgtggtggacctgatcatcgagcggggcctcaacatgatgccgtcggagaaactggacctgatcgattatgtcaagtacgccgtacgcgcttcacggagcatcttcgattctcgcgtggcggaggcccacctgcatcggattcgctccaatctccagccggggctgatcccactcggctttgagttggagctgagcaatctgggaccggacgcgatcgaatccagacgcagcatctgcaaagcggtcgatccggcctacgacggcttccggtacttctacgacttctacctcgacgtgctctgctggaagctgggaggctacatcgacgaccacaccggttccggccagcgaaggcggacctccggatttctcgaactggcgccgggaaggctcagcattgccggcgatctgtcgcgacccgccagccccgatccctggctgctgaaccagttgatccatgagctggtcagctttttccaggtcgagccacacagtcttcacctgtcatttcaactgctcaagagccgggtcagggagcagaccatcctgcccctggggtttgtcaaatgcctgctggccttgggcggggggcccgaacgaagacccggaggcctgtgggtttcgcgcatgggccatgacgagatcacccagcacaaactcggtgaagaactggtgttcgcccgacgcagccggcgcaactggtatctggggggcgacgagatcggcgacaaggcgccggcccaggcgaccacctatatccagcagtacaagttcattcggttggagaagagggccaactacgagccgctgattctgtgtctcaagggtctgcaactggccttgaaccccggcgactacctcacggccgagcagcttcggtccgaccgggcgttgcagcggcaatacgagcaactgaaaagatgggcggccaagcccacgcagatcagctcgcgggtgatcgcccagtttgtgaacgccgcccagcagggactgatgatcgagcgccatcgtaagccggcacaccgcctgcattacatcgagtgggctctcggcgcgatcaccgttcagttgcggatgttcaaccaacaggtccgggaagccgtttccggatcgaacgagtaaccgaaccctctctgctggctggcgtattgttcgtcaatgggtctccgggtcctgacacatctcgtaaagtccgccgcccgcatggcggagcctgcccatttcgacgagcttgtcccagacttgacgcggatactgattcgggggctggatggccacgataccggaactgcggcctccgctgaaaggtcctccgcctaatgtggactctgcatcgagacgcgtcagcttcagacgctttttgaacgctttcatcgcctgcttgaggtaagccgggggcatgaagtcttcggatgtgccttcgctcatggtgatgctcctgccatggaccgttgggatggcctgcgttacatgagggccatggtagagtcgacatcgcaacgtgtcaatctgcaagcctcgccggcgacgcaaacagccgggcaggggtccgcgacgacgtccgcggcgcggtggccacaggggcgtacggcctggcgggctcccgatgcaccgtggctggcccgctcttgagttccaggcaatccaacacgcggcggaccctccgaaaccggggacgcagcgcccggaacagaagcgaggattgatacttgtcgctgtgcaaaaccagcagatgtgtcaggctgtcgctggcggccaggagtctgcgatacacgataagcgtgtacggcagggcgaccagccgcaacggcaggggggtcgagtgccatcccacgagcagaagacccttccatccgattcgacggagcaggttctccgggggacaggcggcacgcccgctgtctcccggcctgccacgcttcttctctcgccgcatttcgtcaccttctccttcttgtgtacgcaacgaccttgctcgcgacggtctcgccaacagggagtcgcaaaaaccggcgggcagagcatcgccggcagacagaaatgccgggattgcccaggatggttggggtgccgcgccctcgtctgcacaggtctccaggctccgaccggcatcgtcttccttcaacgcggcgccccggcacttcaagcatatcgtgtatcttatagcaggtgacgcgggcacgtgcaattgtggtgactacgtataacgtgtcgttatttccgatggttcgggtcggtcttcagtggaaaccatcaagagcatggtgacacggtttggccgagcacgtgatcatgctacgacgcgttgcgctttatcacgcgctggcgataagcctttgttcgtttgagccggctgatggccacgcgggcaacgcgatcgtggtcgaaggcgaggttctccggcaaacggtcgatgggaaaccacttggcctcggcggcgtcgtcgcctccatgcacgcccgtttgccgtttgccggcgatacccgtgaagaccacagtgatctgccggccgcgagggtcgcgaccgaccgtgccgaaggtccgcaactgctccaggcgtatgcccgtcagtccggtctcttccttcaactcccgagcgacggcgtcctccagttcctcgtccatctcgatgaagccgcccgggatcgcccaccggcctttgtatggttccttcttgcgtttaaccagcagtagccacgccttgccccgcgagaaacaaaacactgccgcatcgaccgttaccatcggccggggccactggtacacatacctgccctttttcgccatgcgtcaaatcctctacagtccgcgtgcatactcatgtcgaacgcgtcgcaggacgtcattctatcggcctgcgtggacatttcaacggccgatcgcggatcgcccgttgcttgcagaccggcgctgacatacaatccacaacttatgtccagtgcatggaagaacattctcctgatcaagcccagttcgctgggggacatcgtgatggcgttgccggcgttgtcggcgctgcgtcgcagctttccgcaggcgcggatcacctggcttatccgtccggcgttcgccccgctgatcgagggccatccgcacctggacgagatcatccacttcgaccgcaagacgctgggcaaggcgtggtactgcccgttcgcgatgaaagccctcgggtctctgatcgcggacctgcgtcggcatcgcttcgacgcggtgctggacctccagggactgctgcggtcggcgtcgctggcttgggcttccggttgcaagcatcgcttcggtccggactggggccgggagtttgcgcactggttctacacgaccaccgtgccgcggcacgccgactgggtccatgtgatcgactactacatgaagatcatcgaggcgatggggggctctgaccttggcgtcgagttcgtcctgcccgagaagccggcggctgcggaagctgttggcacgctgctatcgcagcatgatctggctcgcgaacggtacgcggtgctgatccccggttccgcccagaccagcaaatgctggcccgccgagcggtttggcgtgctggccgaccggctggcctgcgagcacgggctggccatcgtcgccaccggaagcagtactgagagcgcgatggtcgagcggattcagagtcacgcgaagcgcccgatcgtgaatctcgccggccgcacctcgctgcccgagctggtcgaggtgctgcgctccgcccggatcgtcatcagcaacgacacggggccgggccacatcgccgccgccctgggcaagccgctggtgatgatgttcagttggtccaacccgctgcgcgtcggcccttaccgccggcccgagtgcatcgtcggtcgtgacatcgccacgcggggcctggccatcaagagccgtgatccccagcacgcgattcagcacatcaccctcgacgaagtctacacgcgagctgcgcagcagctcacaggccgtgggctgtaggccagagactgtaggcaccgacgattgaccacgctctcagggacactccgaatctgatagaatggtgtcgacgtggggagggtaatttccatgctggacgatagccatgtgggggcggagggacaggaaatgcgcgatcacacagaattgcgggcgtttgagttggcgaatcggtggctctgtgtctccacaaaatgacgaagacgtttccgacggaggaggtgttcggcctgacggcgcagttgcgccgcgcggtcgtctgcgttgctccggacatcgtcgaacgctgcacacgccattggcaatccgactatcttcgtttcctggacatggcctgcagctcagcgcgagaggtggaggatcacttgtcgcttgcttcctgcctcggatatctcagcccacaggactacgagtcgctccgtggtctgcgcacggaactctcaagggtcttgagtgctccgctcctctcgctgcgcaagcaataacggcctcctcgaacctatggcctcccgcctatgcggaggcgacgacggtcgcgcagcgctggcagaggtccggatagtcggcgttggcgccgacgctgggccagtagttccagcagcgctggcacttggcgtgggggctcctggcggcgacaacggtcgtcgtttcggcggatcgttcgagcctcacctcgctgacgatgcacagcgccgcgaacgcgtcgacgccgaatgcctcgatcacgccggcgtcttcgtcggtgcatcgcatggtcaccgacgcctcctggttgctggcgatggtcttgtcctgccggagtccttcgagaacgcgcaggacgttgtcgcgaagggccatgatcttctgccatcggacctgctggctggcgtagtcgatgctcgtatcgaccgtcggcaggttcgccagatgcacgctggtgcaatcctgaggcttgaacggcatggcctcccacgcctcctcggcggtgtgggccaggatcggcgccaagagccgcacgagcgcactgaggatctcgtacatcaccgtttgaccactgcgtcgtgacagcccgtcagcggcgtcgcagtacatccggtccttgaggacgtccatgtagatgctgctcatctccaccgtgcagaagttgtacagcagcgagaagacgcgatggaacacgaagttctcgtacgcttcggtgacgtcggcgatcagcttctgcaactggcacatggcccacttgtcgatctcgaacatgtggtcgtaaggaatcgcgtcgatggctggctcgaagccgtcgaggttgcccagcaggtaccgcagcgtgttgcggatcttgcggtacgcgtcttgtgtgcggccgatcagctcatcgttgcagcgcacatcctcctggtagttgacactggcgacccacaacctcaggatgtcggcgccgtacttggcgatctcgtcctgggcgttgacgtagttgcccagtgatttggactgcttcatgcctttctcatcgacggtgaaaccgtgcgtcagaacgctcttaaagggaggtttgcccgtggcgcccagcgccggcagcagggacagttggaaccagccgcgatgctgatcggacccttcgaggtacaagtccaccggcaccggccagccggccgccaccgcgacgctgtaccagctacagcccgactcgaaccacacgtcaaagatgttctcctccttgcggagctggtcgaggtcgaaccctgcgggcattgggaagtcatctcccagaatctcgcggggtgagtcggtgaaccaactgttggagccatgccggccaatgtgtcgggcgaccgccatcacggactctttcgtcagcagcgttcggccatcgggcatcgtgaagacggggatgggcaggccccagcttcgctggcggctgatgcaccagtcgggccgcgattcgagcatgcctgcaattcgtttctggccccacgcgggaatccagcggaccttttcgaccgcgtccatcgccatcgcgcggaggttgcggccggtgtcgggcaggtccttgtccacgcccacgaaccactgctccgtcgcgcggaagatcaccgggcctttgctgcgccaacagtgggggtagctgtgggtgatttctcgctgggcaaacagccggcctgtttgcgccaagtgctcgttgacctccttgtccacggtcagcacgttcttgccccgcagccagtcaggaaccgtctcgtcgtagcacccgttgtccttgacgggtgaatacaccgccaagttgtaccgttggcccgagagatagtcctcctggccgtgccccggcgccgtgtggaccaggcccgtgccgtcctccgtggtcacgtactcggcgaggatcaccatgtaagcgtccttgtcggtcgggttgtcctcgatgaagggatggcggtagcgaagcccttcgagttcactgcctcggaccgtcttgggaccgacggtgtattgaccttgcaccaggccgcccgccacgacgaccgcctcgatgcgatcggtggccacgagcgaggtgtacttgcgtccatgcttctcgtacgagatggcggcgtattcgagattcggatgtacggcgatcgccaggttggcggccagcgtccagggcgtggtcgtccagatcatcagggcgacctcggaatccttggcctggtcgtttgtgacgactcccagctcgatcagccgggcggtggtctccggcgtggcgctgaagttgacgaagatgctcggcgaagcgatgtctctatattccagctccgcctccgccagcgccgtctcgcacccgacggaccagtgaatcggcttgagctgacgatagacgagccccttgcctaccagcgttgcaaagacttcgaggattcccgcctcgtactggggcttgaaggtcaggtaggggttctcgaagtcgccgaacacgcccaggtcctgaaactgccggctctggagcttgacatacttgctggcgtacttcatgcactcgcggcggatctccgtcttgctcatctgccggaccttctcgcccaggtcggtcattaccttggcctcaatgggcagaccgtggcagtcccagcccggaacgtacggcgcgtcaaagcccgccatcgtcttgtacttgacgacgaagtccttgagaaccttgttgatgacgtggcccatgtggatgtcgccgttggcgtaaggtgggccgtcgtgcaggatgtagagcggggcgcccagccgggcctcacgaatctgcgtgtagatgttctctttcgcccagcgctggcgcatctggggctcgcgctgcacgaggttggctttcatcgcaaagcttgtctgcggcaagttcaacgtatcgcggtagttcttctggttcttgtctgccatcgtcaaggtccttgaaatctcggaaatcgaatcgcgtatcttagggtttgcgccggccgctgtcaacggaaccccaaacgcatagggcctgcgtcgcaaggatggcgaaggcctcccaacgaaagaagccttccggagccggctgctctggaaggcttctgtggttgcgggatcgaggcattctcagggcagcttcctgtggtctccaatcatagcgatcgggccggcgcatatcagtcgcgttgccgtcccagccgctgctgccccgaattctctaccgtttgccttctgcacaatgcgctctatgaggttcgatctttgccagaactctcggcccacgtctaccatgacttcagttctcagcagttgacgctcctgcgccttgccatcgcaggaccgcgaggaccgggttgtgatcggagacaaccggctcgtcgacaatagtcacctgctcgacactccacgagtcggcggaacggatcaggatgtagtcgatcttcgagcggggagcgaggacgtcggtccagccggcgtcgagcagaacgttcattgggcgactgccgggccgggcgttgaagtcgccggccaggatcacgggcgcgccatcttcggtgccaaacaactgggccagccgcatcgtctgctgcgtgcggatctcctcatccagatggcacaaatgcgttccgacgaaccgcagcgggccgatgccctccggctcgatccacgcctcgagggccgctcgcggttcgcggtcgccccagtagggaagggggtgcacagtcgtcttgaggatgggaaaccgcgacagaatggcttcaccgtagcggccgccctggtgcggcatcgcttggccgaaggcgtggtgcatccagcagagcttgccgagaagcgccgcctggttgacgccggaagcccgctcggtaccgtcgtcgacctcctgcagagccacgaggtccggtgacagatcgttgatgaccttcgccagacgcttgtagtcgaactgctcgtccatcgcctcgccgtgatggatgttataagtcaacacgcgaagcgtccgcggcctcggcgcgcggaccgatcgcgcttggcagccgctcagagccggaagtgacacaatggccagaacgaatgcaatgactgctcttctgttttgtttcatatcaccacctgcgatcggagattcgacattccacggcgacacaacattccttctcccgtgacgttcgtttgatcttccgcaacggacggtctgttgtcaaacgcggatcctcgcaaagcggcgtttgccgacctgaatgaccatgccgtcggccggtgtggtcgcggcgttggggtccgcaactttctgcccgtcgatgctgacgccgccctgcatgaccatgcgtttcgcttcaccaccggtctcgaccagcttgcaggtcgtcaggagctgcttgatgctgatcggctcagccggcagccggaactcgggaatctcgtcgggcaactgcccctgcgcgaagaccttgtcgaactctgccgccgcgatctccgccagctcgggaccgtagaactgcgagacgatcgtcttgcccagtgtgaccttggcctctttcggatgggtctggttcggatcgagcagggtcgcgatctgctcggcgggaaggctggtcagcagcgtgtaatagttggccatcatctcgtcgctgatgctcatgatcttgccgaacatgtcgttcggcgagtcggtgacgcccacgtagttgcctttggacttgctcatcttctccttgccgtcgaggccgacgaggatgggcatggtgatgacgatctgcggcggctggttgttcagccgctgaaggtcgcgtccgacgaggttgttgaaggtctggtcggtgccgcccagttcgacgtcgcttcggaccatgaccgagtcgtacccctgcatgagcggatagaggaactcatgaatgccgatggggtcgccggccttgtagcgcagctcaaacgtgtcgcgttcgagcatgcgggcgaccgtcatgctgctggccagcttgatcaggtcggccagattgagcttggcgagccactcgctgttgtagcggacttcgagcttgtcgggcgaggtgttgaggatgtgtccggcctggttgaagtaggtgcgggcgtttcgttcgatctgctccggcgagagcatgggccgtgtggtgttctggcccgtggggtcgcccacccgggcggtgtagtcgccgataatcaggaccgccttgtgccccatgtcctggaactggcgcatcttgcggagcacgaccgtatggcccaggtgaatgtccgggctggtcgggtccagtcccagtttgatccgcatcggccggccggcttgggccgcctccaccagtcgctgggccaggtccgtctcggtgtagacctccacggtgccccgtttcaacgcctgtacggtctgtaccacgttgtccgacataaacctgcctctctatcttcgttgccgttcgaaagaagaagtggcaatcttagtcagacggacagacgaatgcaatcgggaaatccaccccgtcgagcaggggcggcaacgaatcgcgcggctcgcttgccgatccgtcgcggtccgggtatagtcgccgcagcggccgggtatgttcggaggccgatggtcgcgaggattgggatggaagactgtgcagaaatgccgacggtggaggttgtcgaggccgatttggattgcgtcgcgcaccagcgggcggtggtcgaactgattgatgcgtacgccgccgatccgatgggcaatggccggcctcttgcgccgcaggtacgagacaacctcatcgacggtctgcgccggcaccccacaacgctgatcttcctcgccttccatgacggtgaggcggttgggattgcggtctgcttcctcggattctcgaccttccacgccaaacccctgctcaacatccatgacctggcggtggtggcggactgtcgggggcggggaatcggccggcagctcctcgacgcggtcgccgacaaggcgcggcaattgcgctgctgcaaactcaccctggaggtgcaggagaacaaccatcgcgcgcggcgtctgtacgaggcggcgggattcgcccaggcgcaataccatgaaggcgccggcggctcgctgttctacacgaaacctctctgacgccaatgtcgttgcgtcctcaataggcttggccatcgccgtacaaggcatcgattcccgcctcgacggcggcccgtgactccgccttcatcagggtcatcgtcacctgcttgcggcaggggtgcaggcgggcgtagcggacgatgaacttgcggaaataaccgatcgcccgtttctcaggatagccgttcagcacacgatggaagtgttcgagcatgattgcccgctgctcggcgaggtccggcgggggcgggaccgggcgattctcccacacgcagcgcaggtcgcggaagatccacggattgccgattgcgcctcgggcgacgacgaacccatcgagacccgtccgcttcatccgttcgacggccgcgcgcgggtcgaagacatcgccgctgccgatgacggtggccgacgggaaccgggccttgacctgagccagggtgtcccagtcggctttcccacggtagcgttgttcgacggtgcgcccgtgaatgaccagcgcatccaccccttcctcgatggaccgcgtcacgatctcccagaagtcgtcctgcgaggcgctgtcgtgatcgatgccgatgcgaagcttgatcagcagcggacaggcgatggtctcgcggaccgtcttgacgatgtcgatgactgttctggggtgggccagcagggcgccgccccgcccgcgccgaaggaccttgggcaccggacaggcgaaattcagatcgatcacgtcgtacccgaccgccaccaggtcgcgggcggccttggccatgatcgcagggctttcacccatgatctgggcgcccaccggatgctcgtcgatgcccggccgaaagcaggccttccgcaggacgcgcggctcggccatgctcttggccagcatcacatcggccagcgcgaatggacagccgaaacgccgtgcgaacgagcgcatggtgtagtcgctgtacccgctgagcgaagcctggaagaatggaacgtccagcgtcaggctgccaagtcgtagggcgatgggattttgcatactctttccggggcgattctctgtgcgccctatggcctgtccatgtggtcggctttgggactgcgtccgtcccgactgtcgatggacggcttgccggtgagagtcttgaggatctcactggtgaccggcgggcatccgggcacgtactgcccgtcctgcccggaccgggcggcacagttgccgatacaaagggtcccctcaggcagattcgcattccccttgccgatggcgatattcagatgccgccaggacgggaagtagtcgaacaactggtctcgatagcccttcaggaacaacagcacggtggactgacacgcactgcaggagttcctgtcgaagaccgtgacattgggaaactcgatggtcaggttggccggcggcgtggcaaacggtgtaatccagtcctcccaatgatcgggcgtcacggagattgcggccaggtcgatgacgccgtagccccgcgccgccccgatcgccagatggggaacggtctcggcggtggtccccatgagccggcacgccaccgcgtcggccgcaaacgcatcggcgccggcgaccacggcatccatcgccttggcctcgcccgcgctgggccccagaccctccatgcccaccgtaccgtcgatgatagccaggtgcggacgcagcaccgacgccatgtcggcgatcgcgatgtcgatcggtttctcgtcgctgccttcgacgggccccagcatgtgcagttgcaccttgctccgccgccagaggcagcccttcatgttcttgaccgccagcgtcaccaccgtgtgcatgtgcatcttcatcaccgggatcgagacgaccagatcgtagtcgcacacgtcggcgcagagcttcagcttgtggagcgccacaccctgctcaatggctacctcgacgggcgggcgacggtccatgtcgatcaggccgcagccgcgttttcgggcgacgtcggcgattccggatgtgacgaacgcctccatggcgtcgacaccggtaatcgggctttcgccgacggccacatccgcacccgcttcgaccagcgcgtcgatcgcggccgcgacgacgtccggatgcgtcgtgatcccctcgcccggcgttgccacccggccgacgttgggtttgagcagcacgcgcttgcctcgcgcgggcgacaggtccagccccgccagggccgagcgcgtattggcgtacggcccctggccgtgggcgacctggaccgatggatgcgcagttgacttcaagagcggattctgtgctaacatagtcgttgcggcaagggcacgatacggggtttccagttgtccctcaagtcgtgcctggtgatcgtcaacaagctgcaaaatattcattatatcggttttctcacttcgctgtcaaacgctggttcgccttgcatccatagcgatccggatggatatcgcggtcggatacctcagaatgaccgccgcttgaggttgctaccggggcgggcgtatggtagcttcaaacgtgtttccggccgcgaggtggcttatcgagcctgaaaaatggagagattgaccggcacaagccgatgagacaatcaatggaagtcaatcgcatatcctgctcgaagcaggtgattcgaggtgcacgacattgagaagactgagcgtattgtccggcggcgtggtcctggtggccctgggagcagccgcgttcttcggccgcgggttcttccgaggcgcgatgacgatccacgatctgctcaccgagaaccagcagctcaagagcgccatcaccaatctgactgccgaggatcagatcggctatgccaaggtgatctcccaacgcaccgagagtgatgggcgcctgctgacgaccctgcgattcgtcgagaccagccgcgaggacaagacccagacgatccttcagaaggagtacacgatcgagggggacgtcattcatttcgatgccctgatcgtcaagttcacggaccagatggttatggacggcaaggcccgcgccctgtatatctggcgccgtgtctacggcgagaagatggcccccgaggaagggttgcccatcgagacgatgggcagtgagcccaaacgctacgccgacctgctcaagcttcttcccgccgaccagcgcgacctattctggtcccacatctgggacctcgcccacgaccccgaggccctgtcgcaatacggcatcaaggccatctacggcaacgtcatctattcccagctccgcgagggcctgatctacgtcttcaagattggtcccaccggccacctctacgtcgaagatgtccccgccatgtagcaccggctcgtctccgcttgctcggctgcaccgccgttgcgcgttgacgggtgggggcggtccgggtatggtgtgggcggcgttgtgatcggcagaccatgaacgggcggctatgcgaccggaaacggatttcgacattgtcatcatcggaggcggtattgtaggattggcctcggcgtacaagcttgtgcagaggcatccgcaggtccgtctggcggtgctggagaaggaggaccggctggcgacccaccagagcggccgcaattccggcgtgatccattcgggcctctactacaagcccggctccgccaaagcgaagacctgcgccgccggacgcaaggaattgatcgccttcgcccggcaatacaaaattccgcacgacatctgcggcaagatcatcgttgccaccgacccgcgcgagctgcccgccatggagcgaatcttccagaacggcctggccaacggggtcgaaggcctggagaagatcgggcccgggcgaatcaagcagatcgagccatccgtcgccggcatcggaggccttcacgtccccagcgccgggatcatcgacttcgtcgcggtggccgagcagttggccgaactgatctgcgagcaccggccggagaacaaggtcctcaccggctatcgggtcgagtccttcgacaggcacgatttctacctgaacatcaggacctctcgcgggcaggtcagcacgcgctacgtcgtcaactgcgccggtctccaatccgaccggatcgcctggatggaccgtgttgatcccggcgtcaggatcgtcccatttcgcggggactattgtgatttgagcccggaagcggcgcaaaaggtgaggaatctggtctatcccgtacccgatccggccttcccgttcctgggcgtgcacttcacacgcatgctctccggcggcgtggagtgcggccccagcgcggtcttctcctttaagagggaaggctacggcaagacggatttcagccttcaggacacatgggatgccctgtcgtaccggggcacctggcgtctgttccttcgccactggcgctacgggctgggcgagtgtgcccgcacgttctcgaagaagcggctggtcgcgcagctccaacggctggtgccctcgctgaccgtcgaagaccttcggcccgggaacgccggcatccgcgcgcaggccttaggccccagaggcgagttggtggatgatttcaagatcgaagcgacgcagaacgcgattcacgttctgaacgcaccgtcgccggcggcaaccgcctgcctggccatcggcgatcacatctgcggactcgcgacggagcgatttcaattgtgagaagctgatatgatcgacctggcggcgaagcggtacatcgttctggtgcaatgtcatatcgtcaaggaacgctgcccgggctacctttgtgagaaggccttccacgagcggaccggcggctttgcgccgtatccgaaagaccatgcataccggatgctctcgatgacctgcggcggctgctgtggacgcgccctgcatcgaaaactcacgctgctgctccggacgatcggcaagcaggaaggaatcaccagagagcagatcgtggtgcaactgtcctcgtgtatcacgaacgacaacttccacgcaccgccgtgcccccacctggactaccttcgggcgctgatcgcgcgaatccaactcgacgtgctcgatgccagcgtcatcagcgcgaccgccgagaagcgaagacgagaggggcgatatcagtcctgagtcgaacaccatgacaaggaagcacgcgacgcccagtctgttcgcctcccaggaaccgcccgagccggcgtgcacgcacattatccgcgtggccctggcctcggcggcggacacggaattcgactacctcgtgcccgatgcgctttggcccatcgaagtcggacgtcgtgtcgaggtgccgttcggcaggggcaacaaacctgaggtcggtttctgcgtcgagtcggacgttgtgcccgcgagggctttcgacagggtgggccgacaggtccgtctcaagcgggtcgccggcgttctcgacgccgagccgctgcttggccccgacctgatggagctggcgcggtggatcggcgactattacgtctgtccgctcggccaggtgctggcggcgatggtgcccggtgcggtcaagcgggcagccggcgtcaagaagcagcgctgcgtatatcttggcgcacgggccgaggagatcgcggcgaatctccgcagcgccacacagaagcggatcgtcagtttcctgggcgagcgcaaggcgctgacagttgactcggcggtcgagatggacgaattggttgcggcggttgattgccgcgcgcctgcggtcaagcgactggctgagaagggcatcgtcaaggtcacggtgaagaaggtcctgcacgccttgccggtggtgcccgaggcgatggctcttcccgaacgtgaggtcgtgctgaatgccgaccagcagcgcgggctcgaacagatcgtgcgtcagatcgagtccggtcgcttcggcgtcaccctcctgcatggcgtcaccgacagcggcaagaccgaactgtacatccgtgcgatcgaggcggttctccggaagggcaaggcggccatcgtgctgctgccggagatcgcgctaaccgcccagacggtgcagcgattcagcgcgcggttcgcgcggatcgccgtaatgcactccggcctgaccgccggccagcgcaacgtccaatggcagaagattcgagacggccagaccgatgttgtgatcggtgcccgctcggcggtctttgcgccactgcccaacttggggattgtggttgtcgacgaggaacacgagccgagctacaaacaggataccgccccgcgctaccacggccgggacgtggccatcaaacgggcccaactggccggcgcgcactgcatcttgggtagcgccaccccttcgctggagagccttcacaacagtcgcaccaggtccagcttcactctcgtccgtcttcccagacgcgtgatggacctgccgatgcccgagatgaagctggtcgatatgcgggcgcgcgatgccgtcgccgaccggcgggacctgctcagccagcctctggctgcgcacctggccgagacgctggcgcggaaggagcaggcgatcctcttgctgaaccggcgaggctacagcaacttcgtcttctgcccttcctgcaaatacatgctgcaatgccgcaactgcgacgcagcgctgaccttccacaagacatcgcgttcgaccgcgcccatgaaaaccgttaccggccggcatatggacttcggctatgcgatctgccaccattgtctggcccagacgctggtcccgcgggactgtcccgtgtgcggcaaggcgatgactatgatcggcctgggttcgcagcggctcgaagaggagttggcggcgagattcccgcaggctcgggttcggcgggtcgacagcgattccatggccagccaggactactaccggctcctgaaggaattcggccagggccgcatcgatatcctggccggtacccagatcctcgccaagggcctgcactttcccaacgtcacgttggtgggcgttgtcagcgccgatacgtgcctgtatttaccggactttcggtccaacgagcggacgtttcaattgatctcgcaggtggccgggcgggccggacgctcggagaagcatggcaccgtcttcgtccagacgtattttcccgaccagccgacgatccagttcgccctccggcaggatttcgagggcttcgtccgtgaggagatgaagcaccgcgaggtctgcacgctgcctccgctgtggcgtttggcgacgattgtgatgcgtgacgagacgtacgaccggctcgaaaccgccgcccataagatgcgtgtgcggatcgatgagatcatcgcccaccacggccttcaggcgaaggtccgcggcccgatgcccgcggtcatcagtcggattcagcggtttcatcgcctgcagatcgtaatccaggcgccgaccgccgcgatcatgggaaagctgtttaccagcctgcggagcgccccaccgatccgtccggcggtgaaaattgctgttgacatcgacccggtcgacttgttatagcttgcaatccttcgcgacgcgtgctatactgcatgtttcgacgaccggggagtagctcagcttggcttagagcgctgcgttcgggacgcagaggtcgcaggttcaaatcctgtctccccgatttcccctcgtcccccgtaagaccatttgacagcaagggtttatgaagggcaggcgtgacattcgattgcagttgatgcaccatattcgcacctaaattacccgaaagcaccgcgtcggccaccttctcggtgatgcccgcgaggcgatcattgcgagcgcgaccatagatgttcgcggtcaggtggggggtactgtggcgggccagttcttgggcctcccggtgcgtggctcctgcctcgtatgtaaatgtgacgaacgccgtgcgcagggcgtggaaggcaatcttcccctcggcggtcttcttcggtattcccgcccgaatcaggtctttgtccagttccctggctggatgggagggcacatacagcagggcgtcgggagggcacaggtactggcgaaaaaactgagcgtagaggcttggcacgaggccgcttcccgcgaaggtttcgagctctttcacaaggcggtgcggcagtggctgaaaaccggccttgcggttcttggtccaggcggggtccagtttcaggcccatgttgacggtatccaggtgccgccgggtcagagatcggagttccccggcgcgaagcccggtcaccattgcgatgacgtagagaatcttcaggtgcggcgccgctaccttcaagaggcgttgtgtctcgtccaggctcaaagcgcgatactgggatcgtggtgtcgtgtcgatcttgctcaatttggccagtgggttgtcctgtaaatagccgcgaatgacgagccaattgcacaagctgcgaagggcctcgacgagattgccaattgttttgcccgttttgcctcgggcggccagttcgcggatcgttgcttcaacacgtggcagcaggccgtccaagtcgcccaacgtttttagttccaatgtctgggcccatgaggtcaagtgacgggacttgtagtaggcgtgtttcgttgcccatgccctgcctttgtgcccaccctgcgcccgtccccaagcgaggtattcggccacggcctccatgaacgggcgacccctgtgcttcaagtgtgtttgcgacggctcgcgatagccgagccggatctgtcgatggtcgtcctccagcttcctcgcgatgcggagggtttcggaccgctttgttgtgcccgtgaagtattttttcttccccgtctggtcgatgaaaaacccctggtatcgaccgcttgtgcttggcttgtgcctcactccggccatgctactgcctcactttttgccaacatgcctgaagataagccgagacggacaaaccgctcctgcgcgcgtcctccatgagtgttttgtgctcggcgcgcgtcattcgaagggtgacgatctcggaaagtcgctcgctggccttcttcggcggcctgcccattttcttttttctgttggccatgatagcattatactttacgtaatcgaattaagtcaagcgctgatttgagagattcttcgttgcaagtgctcggcttccttcctggcggcctccagccgtctgctgatgtgctcccgcaaggcccgcacagtccaagtcggttcaccgaacagccgaacgctcgggggtagctcgccccgctcgacggcgcgtttgatgctcacgcgatgccggccgaacattgcggccagcgttttttcgctgagtaatgtatctggcgacaggtcgccaagatcgcggatgattcctgtttcgttggtcacgacttggctccttgttttgtccggccgggtggccgctgtcctcgccgttcgcgcagaccggtgatgatggcgtgttcaaagcaacggagcacctccagctccgtcacgtcgccggccccggcccgggcgcgctggatggcgtggagcgaaggaaggcgcgtagcaatctgacggcgcagaatgtcgatgacatcacccgccgcgcggctttgtagccacgccagacgcagctcgaaaaaggcccggtggaggatctccactgccgtccggatgtccgggacaaaatcgagcaactcggccgccgcgcgcatgagggcttcgtcccgcgcggcgaaccgtcgttcgacttctgacgcgtcgtatgttgtggtcccgtcgtcggcctcgtggcgcaggcccaactcgtggagtaagaattccatccggtcgcggtcgagtccgtgccgggccgccagttgggtcgatgtcaacaattctcgcttgtccatgtccatttctccttttgtttagtgttcccaacgttcttcgtcgccggcgccgacaagcgccggttcgtttttctgcttctgggtgtatcgccaagcggccctccgcatcaggcgggccagtttttcttcggttgtgtgtggcgcccgtcgcccgttctcctttgcaatgcggcggatattttcaagcaggatgtcgcacgcggtattggcgtcttccgggctcgcgcacagcgcgaacggcgcccacgtcactggccggccctttgcggagagccgacatgtcgatttgagggactcgtcgaggctcgcgatgttgaagcaaatttcattgttgtagacggacacttcggccacccacaggcgatggagggccagttcgatcagtcgttggatctcagtcatcgcgttttttgctcctcaaaatgacccccagttcgtggagcgtcaaagcgccagtgtctcctggctcttttccattttcgaaatgatatgccagccgcatgttctcgccttcgctagacctcgttttcaggaggtacatggtccggttgtgcgtccgttcgtccgttccgcacggcgtcttgacccgagagactttggcatcgtggctttcgagccagatgacgctgtcgagcgaccgtgcccacgcggccccccccgcaacgttgtcgagatcgggcaggcgaccaccgccctttttggggtgcgtgacaacgatcaacgaagcgcccgacatcctgaccgcttgctccacgcgggacagaaacttctcgtcctcgacccacggatcgccctggcgcatcaaggccgtcgtcgggtcgattatgatgatccggaacccctgggccgctcgttgctcgacccattcggcgccctgtgagatggtgaactggtttgggacggtgtagatcgattccccgatatgattgaggaactcacgatgctccgcgaataggcgacgaacggtgtctggatgttctcgaacccagtcgctccgcgtcagatcggcgatatttgtacgctgcgccagtatccggttgagatggaagctccggctgcgctcaagctccaggacggcgactttgatcccccgttcgatccaaacggcaagtgactgggtaatagcgaagctcttggaggcaccgccggcaccgacaagtccaagtcgcgagccaggcgtcaggccttggaccaggccggtgagccaaggccacggccacgctatgttgacaaacctcccggcgatctgatcctcgatctgggcgcccaactcagatgccgggtccgccaccgcaacgggccgggcaggcgatggctcaccgccaacccagtatggtccccatatttctcggttcactcgctcctgcaactcatggaggtcaccaccggcgccgcaccgccggcacttaaatcggacgatgccatcgcgagccgcgtagacgacgacgcttccggaaatgtcgatgcagaacgggcaccagatctttaccttccccccttcgccctctacgcttgcgccggccgccttcagcgcggtgatcagcgcgggcctgctccgacgttcggcatcgacttgcgtcatgatgcgccccctatcgcctctaccccagccctgaaagcatcgagcggaatgtcgtcggggtcggaccattgctgcccttgagccgtactctgcccgggcacctcggcccgagcctgtgctcgcgccatccaaccccccagaaatcgcatccaatcaattcgcttcctggcttttcgttcgttggttcgacaccatgctgctgccttgagaatctcggcccgagcgtcgattaaagggtaggcttcggaccactggcggacgaggtctttagagatgccgacgaatgcaaatccagcccagtcgtatgctacctttttcccctgattcgccatgaacgtgttcttgtacgtgttcttccttcttataccgacttttttggttggtacggccggtggggttttcgcggtacggctggtggggttttctgtcgccaaaaccccaatcgccggttgggttttctcatgtattgaaaccccaatactggttggggttttcggaggctgtgtcacggtgtactgcttgcggtgctccttgccccgtcccggccccttcgaccactcaaccaggagccatccggtcacgcgaagccgcttcgtgatccggcgcacgctttccaccgtcagccccagatcggcggcgatcatcgcttgtgacggccatcctgaattgttcttgccctggcgccaccaaaggtacatccaaacgcggaactctacggccgacatctccgtggcatgcagggcgagcacccaaaggggtggagtattcttggccttgctcacgggcgagcctcctgttggcgtgccgccaatacggcgggcgccgtccgatcgcagcgcagggcgttttgagggcggggggttgactcgtcgggggggaagtggtagcctcgtggcgtagtcctgctcctggccggcgccccgcaagcccggccttttttgtgcgcatgggggatcatgtcggcgcgacctccttccgttcggcagctcgcttcacaagcgcggcccgcacggcggcgagactgaagaggcgtcgccggccgacgcgtaggcacggcaatgctccccgatccgcctcggcctgcacccatgcaaccgggagccggaacacacgggcaacgccatgcacattcagtagttcatcgtgtttcgtcataccacgagcatagcaggagggatgtgcgctacctgtgcatgtacctgtgtaaaatttgagaagtgaagatttttttcggggctcgcgtctacctcttcgcaggcaactcccgtagacgatgcgttcctttgcctctgcccttgacaatcatggcgccccaggcccgatggtccctgaaaagatggtcgagtcgctttgtgtcgcactccgccgcttcaagcagggtggcgtcaccgacgtcgggacacttcctctcccatgactcccacaacaccttcacgcaagcagcctgactgggcgtgaacgtgtaggtctgtccataccaatataccgagcgaaagtcgggtgagtgcgtcgccgaacaagtggttttcggcgccgcctcgccggcccgctccagccatctctccaactcggcaaacacacgatccgtgctcagatggtcccaagccgctggacacagcgtgcgtaccccgctcctgtactcacctgccagccaagtgactacctcatccatctccaggttggccccccattcttttcggcagccgtgcaggaaatggaccagcatccccggtgacttcgcgtgcgtggcgagtttcgcataagctccctcgaccgccggcccgtcgtttctcgcccgcgccgcccgcaagtccttcaacagatccacgagtctgcgatggtagtccacgttaccccctccaggaaaaaaacgcccgggctgatgtcgccgatagtcgcgaggccagcctttcggcctggccgacccgggcagcgataattgcggcaactggtgtgactatccgttccatcgccggccagtatggggtaacaccggcggttcgtcaagtggtgtgagcggtgtaaccaaggcaggagcccgcgcgaaacgctttagtaaattacccgtctatgacggcactgggcagtgcgttggcctgggcgatcatctccaaaaacatggccttcgtcgcctgcgcctgagcgatggccttgtcgcaggcctcgatgctgtcgaggacgggcgggccgggggtggcggacacggccaggtcgttcctctcgcagaccccatacttcgcggaggccacgagcttgacaatgtgatgttccagttttccttcgagtccgccgcgcaaaacgcggacttcgaggatgtcgttcacgcgatccacggcctcggcgaacaccgggcttctcgccgacagttgcgcaatatacgcgctggggatgttgtgttcgcagcaaaactccttgaggaagaggacgttggggtcctgggcccattccagtaaatcccgagccagttgctccaggacttcgggcgtccatttccagggtccgagaggcgccatcagaagccctccggccagccgcccgtcaggatgccgttcgggtacttcttgcggatctcgacccgccattcgttgtaggcctcaagcaccttctccatatcgagcccccgcttgcgtccccacttgaccaaggccttgtacaactcctggccgtcgtgcagttggcccgccagtcgcaactgacacagaagaaaaaactcctccatcgggagcttgttggcgccccacgtttccttggccttggacgatttcttggctccggacgtttttttggccttggccttggacgttttcttggtcataaccgatctcctccctctcaattcgcgcctccatgcagcagcgacatcacgtggtccacggggcgcatggcggcgttcatgtcggtcgcgtgcggccggaccagctcctccatctccatccggtacttccatcgttcgatcagcgccttcacgcgcgccgccggcagccgttccaacaaaccgtcatggtcaaacatcatcgcctaacatccctcagggctcgctgtcgaaaactccgggcctccacgtgccggcccgccgcttgcgcgcgacgtccgcgacaacctggtccagtgtgccggacctgaactcatccgagtcatcgagatccgtcacactcagtccgcgtgggccgctgtcggtggggacggccttctccttggcccggtgtctcgccgccacctccgcgtaggccttccgcatcagccgaagaccctcgaccggcgtgtgcgggctgtccgtctcgcagttcgcgaccatgtcatcggccaaggcttccgcctcccggcgaaactgggccccgaactcctcgtcacaggcgtccaaaatctcggccaccacgccttcgttcctgcggttcatgttgttctcctattcacgggctctccctattgtaccaccaaacaccaccctaacaacccccacacctgcaccctctcttcctctgccccacccaggtccgccgggggtcttttttttgccaattttcgcgtccacatccgccccatcatgggcgagggcgcggcgcttgtgcacgcaggcgggggggtcgcgatgggcgaagtgtgtcggagggaaaagtttttcgatttgggacttatcgggggccggattcgtgacgataaggaagacggaggcgggctgagggaatgtacttttgcggcgttcagtgcgaatggtttcggctttggtgcgatattcccggagctgaagacacgtgcgggcgttgccattttcacggccagactcatggccgccgacaggccggaagactggccgcagattggcagacaccccacggggacggagtgcggtcggagtgccgatcccgtggggaccattgaaatgagggcgagatgacagcgaattacaatctgttggacgaacactggattccggttctctatcgcgatgggaggtacgaccgcgtcggaattcgtaatgccctggaagaggccggtcaaatcaggcaaatcgcggccagcaacccgatggacaacgtggccctgctgcggttcctcctggcggtgctgatatggtgcaaaggcgaactgacagagaatgaccgcacactgctcgaaggtagagcggatgggattccgccagagtggctgaacaaactggccgagcataagaagaagttcaatctacttggcgatggcgagcggttctatcaggacaagaccattctcgccgagctattgaaagccaagcaaaaggaatgggacgaacagagaaagaaggcaggatcccagaaagctccgaaaaagccttatccgacatcgctggacgacaacgattttcgtcccatcggcgatttgctcgtcgagtttccaggagccgattcagtaaatcacacacgccatgtgctgcacggttcctatggattctgcccggcctgctgtgcaacgggtatcctccggttctcggtctgggcctcggccaatcgatattatccggcatccgtgaatccgggatcagcggtctatgcaatcgtcgctggcgacaatctggcgcagacgcttgccgcaagtcttccggacaacgcacaccaaacgtcggaaccgccctggttgtcggattcgccgccttccttgcccctcgaaacggcgacagttcttgcatggaggcctcgcaggttatggcttggtgacgctgctgagaagggggtgtgcgcgaactgtggcgatcatcgcggcctaatcaagacgtgacctgccctacggacggtgggcgcgggaaccgctaacggctaggctgcctcgtccataggggtcaacggtccggcttcataccgacgctcgtattcggccggactgagatagcccagggcactgtgacgtcgggtcggattatagaacatctcgatgtatttgaacacctccctgcgggcttgttcttccgtggcgtaatcgctgtcgatccactcggtcttgagggacccgaagaagctctccatcatcgcattgtcccacgggtcgcccttgcgtgacatgctcatcgtcagaccctcgcgtgtcaacaaatcgcggaacgcctgcgaggcgtactgaacgccgcggtccgagtgatggaccaggtcgtcttgcggacaacgccgacgcaacgccatctccaacgccgcacagaccagggacgcatcgatggtccggctcaggctccagcccacgatccgccgcgagaagcaatccaggaccaccgccaggtacagccagccctcgaccagacgaatatacgtgatatccgccagccacttctgattcggacgcgtggcggcgaagtcgcgttgcagccgattcgtcgcgatcggctcgtcgtgattcgagtcggtcgtcttgacgaaacgccgtttatgccggccacaaaggcccagatcgcccatcacgtgacgaacggtctcccggcagcaggcgacctggtggtcttcgatcaggtcgcggtgcacccgccggtaaccataggtcccgtgcgaatcgccgtgcgagcgttgggccgcccgggcaatctcctgccgccgctgcgccctcgccgagggcggacgccgacaccaggcataatagccgctccgcgagacctgcaagacccggcacaggaggttcagcggatagcagtcccgttgcgtgtggatccaggcgtacctcacagggactccttggcgaagtacgccgccgctttttttaagatttcgttctccagacgcagttgggccaattcccgccgggccgctttgagttcttcggccaacgggaccatctgccctttgggcggcaggtggccgttagcgcggaaggccttgacccagcaccgcagggcccagtcgctgacgcccagttgctgcgaggcctggtggtaggtggtcccgccctcgacgatgagcttggcggcctggagccggaactcctcactgtagcgtttcggtcgtgtactcttgtctgccatagatagttcctttcgtgtctatggcagcccagtctatcaagctcgccccgcgcccaccatccgtagggcaggtcaacgctcgcgtttgctgcgggctgggcaacacctctaacggaaagtcaggcgttcgccaaacgcgtggagcaacatctcaagaacctggggcataatgcaaaggattccaagacaaagaaggaggtgaaagccgcgtggatcatcctcaactgcagactggccgagttgcagaaggcatgcagtgacaaactgcgaggaacacttgacgcaggcttaccaagagaacaactcgcggaatcgatagcgaacgcccttgatgatgtcttgaagacaaacgagaagatgttccaggacctcgttaagaagccgaacaaaaaggaagaagcggcaatcggacaagaagacctccggcagaagaagttctggggatcggatccccagcttctggtgtcgaagaatgaggcgcttgcgcttccccgcttggaagccgatgccgaagcgcacgccaggttctggaggtcggcgtttcgtgccgccgcaggaaagcagggacgcaagcgcattgcgataggccccgtggtcaaccagtttgtgtatcaagacgcaacgacgctttccattcccgatacgtctgccgagtcacaggtgcgtctttcaggcgatgttggcgacgaattgctagacctgttgaagcagctcacaccgaatcataaacgcgagcatcctgaaatccgcgctgccttggcgttgctcgcaccagaaacagaagaccgaatccgcgccatcttggacaaaagcaatgtcgcgggcgatgacagggacttcctccgctcaacgttcaagccggtcgtacagaagatcattgcgtccactgctcgcggttcttcgtttcagcgccgcgtggcgatgaccgaggcgtacgccgaacttgagaagctcatcaacaagaagacaagagcaaggaagtcaggcgcgtgtcgcaagaagggagctacgctatgaccccgaccattgaattcatcaacagactggagaatctcaaagaaggcgatcgttctcgcctgcgttggctggcgggccagccgctggacaagacgctttcgggatttgatctgttcaccggcctgtggtggccgctgcgtgcgacaaatgcgcgaactccgcggcgtgaaatctcatggctcatcgccaagctgtattgtgcatcctcggttccgtatgttcggcctgaatcggatgttggggtatcactcccggcggtgcttggcagatgcgaaccgtgcgatccgccggattaccgcgcccgcaatacctttcgccggcgattcgacgccgtgatttgctcaagcctttctgacatcgaaccacgactacagtggggcttgcgcgaggttgccaaggcagttgcgggtcgtgtggtccacgcggagactgtgaccggcatcgactgggcgctgctgctcgacgacctgtcgctctgggacagggagttcaacatggacgacacatggcagaagagccggttgaatgctcaccaacggctcgctcgttgccgtgaaactcaccgcacgccgcaggacctgtgggcgtgcgagtacctgaacgcaactgttcaaccacaaggaggcgactatgctgattgaaatccacatgattcagaaccacagtccgtcgaacctcaaccgggacgatctgggtgcccccaagacgtgcatcttcggcggcgtcacccgcgcgcgcatttccagccaatgcctcaaacgaagcatccgacgcagcccggaattcgcagcggcactggagaaagacggcggggttcgcacgcgccgactgattgaggagattgcgaaagcggccggccgtgatggcaacgagcccaaagaagaacacctcaaagccgtccgggaagtcttcaaagagggcggtgtcggcctgaaggatgagaacacttttgacatcctcttcttcctgcctcgatcagccatcaaagaaatgggggtcgccgtgagcgccggtaacggtgatttaggtaagaagttcgccgaagtcatcggcaagttcgtcaagacgccggacatcgccttgtgcggacgcatgacggagtttgatgcgaagggcccgttcgaaggtctgaagggcaaatttaccgtcgaagctgcactgtccgcagcacacgccatctccactcacgcggtcgtaaacgaggtggattacttcacggcagcagacgacattcccggccaggacgcgggggcgggacacgtcagcgaggcgatgttcaattcggcctgcttctacaagcatttctgcatcgactgggagcagctgctcaagaatcttggcggcgatgtggagcttgccacgacgaccgtcaggtgcttcctcgaaggcgccgcaaaggcgaacccctctggaaagcaacacgcatacggcgcgttcaactaccctgacggcatcttggttgaggtcaaggccgagaccgccacccctgtaagttatgcaaatgcctttgccgacccggttccggagaagtctgtgcgaggtctgatcggcgagagcatcgcgcgccttggccagtatgcacatgatctcatcgacggctatgccctctcggctgaacgcttctggttttccccgagctcacgccatcgcctgacatggatcgacaaaagcaagagggagcctgagcaagagcagtccgttgtggacgagaagaaggaattcggaaagttcccggacttcgtgaccgctatcatggaggaggtcggcaaaagaagcacggcgccggcgggagggagactatgacagactctcggacgatcttcctgcgtttcgaaggcccgctccaggcgtggggtgatacatccaagtttgtgattcgtcgaagcatggactcgccgacgaaatcgggtgtgctggggctgatttgctgcgccatgggtttatcgcgaccgggggcgcgcgagaagcttccagccttgaacacgcttacgatgggtgtacggatcgaccggcccggcgctcgctggtgggactatcacaccgttggggcgggtattggcttgacgacagcggcaggtgggctcaagaccggtgcgcagggtacggtcatcaaacgactggaatatctggctgatgccagttttctggtcgctttgcagggcgatgcgatattgatcgccacggtcgcagaagcgttgcgatccccgaagtggccgttgtacctcggtcgcaagtcgtgtccaccgtccatgccggtattcgcccagccgcgcaaggatgagacatggaccaacccaatggcggtcgatggtgatatcgaggctgcgctccagataatgccgtggcatccgcgatatgccgacgatgccccgcgcgatcagcatgggaaacgctacgagaacattgagttgccctgcctgatcgagtggcgcagaagaaatgacaaggatacagctccgcctgacgccgaggtctggtacgacacacccttttcgttcgacccgccggtgcatcatccgcgattggtaagacgaggtcaggtcacggtcacggtcggcgatgcgctccagcagcatacgccgccaccacctcgtccccgcgcggactacaataacgaccagtacaagaagcatcgtgctgagcgtctacaatccgatcagggcctctgcgtcttctgcaagtcgccggccacgactgtccagcacgtgacctatcgccgcgccgggggcaatgaggcacaggaagacctgcggtctctctgccggctctgccacgatgccgtgaccatgatcgagtacggcatgggcatgggcctggaccggattgacccgtgcgacgtgcggtggcgcgatgacattctccggacccgcgccgacattatccgtttccgcagcgaggaaacccggcggcgagcactgcgcagtgctcccgagaagattcgccgcgaggctttggaagaagaggatatctgaatcatgtaccactcccacctgctcatcaatgttggtgacaaccctgaccgcccggattggagcatcacccggcgctggctgcgaaatctgtatcgagttcaccagcgcttgtgtatggcctttccgtcgaaggtcccggtgtcacataaggaacgccttgcagcgtactgcgcaccctacagcggcacaggactggaccatctgcgtaacttgcccggggagccggatacagcggacgtgcaccattcccgtagcgatcaggccggattcctcttccgcatcgattaccctgtcgatcacagccggggcgtccgacgacccctcatcatcgtccagtcggcggggaacgagccgccggattggcactatgccttcgggttgaatgaagatgccgtggatgatggcggacgcccgattggcaatgccggattcttgttggccgcgccaccacagaccagaaggatcaccatgagccttgagaatgacgatgtgtttgtaattggcagcccaaaggagaatcatcgaatcgctcccggcgatctggtgcgtttccgcctgcgcgccaatccaacgcggaaagtgcaggacggatcgccgaacggcagccgcaaacgcatttgcccgacgctggtcgatcacgccgactggttgaaaggcaagttgggagatgcggcggattccccggtctgtttggagaacttcgtcaccggttgggcttacggatggcgttcaaagcacgaaccgcagcccagccagcgcatgcagtggtggtccgtactgtttgaggggagcttccgggtaggtaatctgaaggtgctgaagcagttgctcgaatgcggaatcggtccagccaaggcgttcggtttcgggctcttgtccatcgcgccggtcaggtagagtttcccggtcgaatagccgatgggtgtaatgcggatggcgtatctgcccatcgaatcgcgatctttgctgtccagtacgaagggattctggaaatgacggatacgcagaagttttttcagacgctctgctctggcattggcccggccaagggactggggatgggtctgctaagcattgcccgcgcttaggagaacctatggctgatctgcacgaactgccgaagttcgaggaccgctggacgcacctctacctggagcgcggcggcctggacaaggacaaagaaggcctggtctttcgtcagggcgaaggacgaacgctcattccgatagaccagttgtccctggtcatgctggggccgggcacgtcgatcacccagcaagcagccaaggcgctggcggccaacaactgcctgatgtgcttcgtcggtgaggagggcgtcaagatgtacgccttcggcacgggaggaacgcacagcgcccaccgactgctccggcaggccgaattgtatgcctctccgcagcagcgggaactcgtcgcacgccggatgtacctgaagcgattcccgtctccagtctcggcggatgtgaccatccagcagctcagggggatggaaggggcgcgggtccgcaagacctacgagcaaatggcggcaacctgcggcgtgaagtgggaagggcgcgactacgatcagagcagttggtacaccgccgacccgctgaatcgggcgctgtcgtctgccaattcttgcctctacagcttgtgccacgccgcgattctgtccgccggttacagccccgccatcggcttcatccacacaggcaaggtgctgagcttcgtctacgatgtggccgacctgtacaagacggagatcacgattccgctggcgttccagaccgtatccggctccaaggacgacgttgaaagacgaacccgactggcctgtcgagacatgttcaaacaggccaagctgatacggcgtatcttgcctgatattgcggaggtgctcgatgctcgtgatgatgttggagaacgtgccgatgagcttgaggggcgagctatctcgctggctgatcgagcccaaggctggggttttccttggaagtccgacggccagaatacgggataagctgtggcagaacgccctgaagaagcgcaagggcggctacgtccttcagatatggtctgattccagcccgcagggctacagcttccggtccgaaggcgaatcgtctcgccaactgcaagacttcgagggcattgccttggtggcttacaaagacaagcgtaggccgagccaggtatcaacatcttgaggtctgcccagtcccggcatacaatgccgtggtattgtccccacgcacgtgggggtgaaccgatatggcaatacttcttttaatgcagacacagattgtccccacgcacgtgggggtgaaccggcactgcaagcgatgtacacacggcgactgctattgtccccacgcacgtgggggtgaaccgtccacgactgttattacccgcccgatccacagattgtccccacgcacgtgggggtgaaccgacggtttctctgcctgtgggtgctccgtatctattgtccccacgcacgtgggggtgaaccgcgtgctgagtgtgctggatgggagttttcggtcattgtccccacgcacgtgggggtgaaccggtgtgggccgggcggccataaggggagatttgattgtccccacgcacgtgggggtgaaccgctcagccagcttctccaagcaatcaccacaaaattctccccacgcacgtgggggtgaaccggtgatcccggccgacgagaacgtcgcacacggattgtccccacgcacgtgggggtgaaccgaccgccgccgccgtgctcccggcggcgagacattgtccccacgcacgtgggggtgaaccgccagatgaacatggactgggagggctccgcggattgtccccacgcacgtgggggtgaaccggggagttgttcgtatcctcgcacagccgcaattcgacttcccactcggcctgcgtaaagcccgtcactccattctgcatgtcctcgaacggcacgtcgacacacaggttgcctctggatgctgtgagggatgaggattccctcatccggggcaatttggccatctgatctccgtggggcagcatttgtcaagacaccccgcgtcgtaggggacccgtccaccatacgccgctgggcgtcagcccgcctccgggccaaacggacggaatcaccacaggtcccggaccaagtatcggggcttctgcgtcagctcgatctcggccgccaccttcgccttgaagtgctcatcgtactcatcggtccgcagatcgagcacccaggtgctcacaaacatcacgctggcgagcaggtcctggcagccttgttcgacttcgagttccaggtggtcgatgtgctctccctgcggcggggacgccacccctttcagcccgcccgccagcaggaatagatcccgcccttcccccacgagcggctggcggcgccctttggccgccatcaatgcctccgctctgtccttgtcgaaactgacctcacgcatgaagccaccatcctttcgccggcgtcctggcccgaccgccgcctgtgaatcctaccttgccttgcccttcgcagaaccaacccgccccgtgcgaaacataccgtaccgcatgggacccgctccacagaggcccacagagctcgccacgggccttctgggcgttccaattcacagagacggcccttgggtcgggtccgggccagatcgtggctaattccgtcgcgaatcgcacacgtattcgagttggggcgacgctgtgagtcgtctcgacggccgtgggcgtcttgcgccccgtcagtctgtaggcgaacaaggggcagcccgtgtcggtgcagtcccgaaccgcgttcgccacgtaagccatgcactccagacacaacgaccggatggcagcactttggctgcgtccggtcatggccagccggtagagcctctgaaaacgtcttggcacatctctgtccgtcatgctgttggatctccttcggccgttccgtcaaaaggggccgatgccccatgtccgtcgtctttgctgatgtcactggctctcgtcggcggcatcgccggcctgattccacatctcgggcggccggacgtaccactgggggcgtttccctccctggcgccggacccggctaatcatgcctgcttcgctcagctttcgaagatggcgtttgatggcctttgtgcgtagcatcccttgctccggtggtgcgcagagccgagccagcctcatgatcggcgcttcacacggttgtcttccgccgtccgtccattcacagagccagccaaacacccgcagtgccccgattccgacgcatcggctggcggcctcgcgccacgccggcggaatcagaagctccgcgcgtgggaaggcccccggtctttggtcgggttggcttctgctcgcggcagcgtcctcgtggggcttggacgggggctcgggtacaggcctgtccagcgcagggtttcgcctgattctcgtagggaagctcaaacgccagtcttggccgctcggcttgtacacatcttcccggcgcccgtagtagcccttccggtaggtcgtcacacgagcatcgaactccacgcagtccccctggtgcagcacgcccagggcccggaaccccttcgtctccgtgaaccagagatgatcggtcacacggacgcccccatccacagggcacacctcacgaaacaaaagcgtcttgaggggcgctcctcgataggcactcttctggccataccgctcgaagatggcacggaacctcattcgttgaccgtccagattcttccattcgtctcttggcatgttggctcctctctgaggcccgatctcgggccgttcgtcaaccacagcgattcacaaaccgtccgcgcattaccagatccgcaccgcaagagcgagagatagtactgtggggccgggggtgccgggggggctccccccggtggggtccgggccgcaatcgtgaagcccgttgccgggccgggaccgaaacacgacaaaacgtgttgtcttttcccgttgcctcctcgcgcgcccgggcgcgagacttcttggctccgagagccagggaacggcacatccccgggataccttcttactcgcccgtcagtgcctccgccgccatccatgccccgagcatcatcctgctttcctcgtccagctccgcagcgccctgcttggccgcctccatcagggcctcgtggtacttgtcgagcacagcattgagcaagtccgggtcgccgtggtcgccgtccgacagggcccaggacaggctcacggccagcatcgtctccagcggccgctgctccagccacgtcgcgatcaggtctttcggctgcctctgcggggtcatcgtgtctcgttcactttccatcgctcagcctccgtcaaaaggggttccgcgccgccggctgctcgcacgagaggcccggccggcacagggttacgttctatgcaggcgcctcaggggtcggcctgtggctcctgaccaggtgcaggatcttccgcttcacatcctccggcaggtccggccaggccgccacgatctgagccaagtcggggtcacccgacgcaatctcgcgcaccaaatgcgcacctattctgtgttcgggagtatcatttcgctgttcgggaagtgcaagagtctgtccctcgaaatccccttcaaatggctttcggtcgcattctgtgcaggaattggagcggtcctgtggtgattctgttaccccacgaatcgggttcaaatcctgtctccccgatttcccctcttgttctgccgcttgccgcattcgatctcgtcgcaggggccagcggcagcttgccgatgggtcccacgtccaagtactcagaccagagccgtttatggaacttgcctcggccctggggcgacggtatagttagaggtcctcgcggctgctccgtgggagctatgtatgtaagtgggctcgccgcgcgggccgtgagagtgcggcgccgcctgggcgcgttggaacatggatgggaagaagggttctgggcaaggaaagctgtggtagattcgggtgcggcaagtctggactacgagcaatttgaagaacgcggattgcgtcttgtcctaaaggggacgttgaacgccgccgacgcacagcggttctggccccaggttatgcagaaggtggcgcagtgtgacccttccgccatcgaagtcgatgccggaggtgtggaaagcttggatacggcgggcatggcccttctgctcgaattgaaggctggacaggagcagcggcagcgaggttttcggattcagggcctgcgggacgatctgaccgaactgatgaggcggttcgatccgggcccgcccgcgccgcctaagccagcgccgccgtggctggtccgcgcgatccatcgtgtcggtgagatctcgcatggatcccttgtgggctttcacacgcaggtcgctttcctgggggagattttcgtccgcctgctgagtgttctggttcgcccgcgtcgtctgcgctgggccgatacattcctgatcgccgagaaggcgggagccaatgcggtcggaatcgtcgcattgatgggttttctgatcgggctgatcctggcctttcagtcggccatcggtatgcgcaagttcggcgccgagatctacgtggccgacctcgttgtgctggtgctgtttcgcgagctgggacctttaatcactgcgttcatcctgaccagccgcagcggatcagcctttgcggccgaattgggcacgatgaaggtcaacgaggaggtcgatgcgctggtgacgatgggcgtggaccccgttcagttcctggccttgccccggctggttgccgcgatctgcgtgatgccgctgctgacactgttcaacgagctgttcggtctgatcggctgcgggctggtcatgcgatcgttcggtttccctgtggcggcttacatcgaccagattcaggaggccgccagcctgggcgacctgttcggcgggctggtcaagacctttgtattcggcgctctgatcgccggcattgggtgtctgcgcggtttgcagacgggcaacagccccagcgccgtcggcgattcggcgacccgcgccgtcgtcagcggcatcgtcgccatcgtggttgctgacggcgtgttcgccgtgctgtactactacttgggggtatgacgatggggtccgacgcaccgccgatcattcaggtcagcgacgtgaccgtgggctacgatcatcacatcgtcctgaaggacgtgaccttcgaggtgggcgccggcgaggtcttctgtatcctgggcggttccggctgcggcaagagcacgctgctcaagcacatgatcggactgcatcggccgctgacggggcgcatcctcatcgacgggaccgatatcgtcaccgccgaaggcgaggagcggcgtgcgctgctgggccggatcggtgtggcgtaccagaacggcgcgctgttcggctccatgagcctgatcgagaacatctgcctggtcctggaagagttcacgagcctgccgcgacaggccatgcagacgatcgcccggatgaagatgaaggtggtcgggcttcaggacgccggcgatcgactgccctccgaactcagcggcggcatgcgcaagagggcggccattgcgcgggcgctggccctggacccgaagattctgtttctggacgaaccttcggccggactggacccgatcactgcggcgcagctcgacgacctgattgtcgaactgtcgcagaccctgaagatcacgttcgttatcgtgacgcatgagctggcgagcatcttcgcggtcgccgaccatgtaatcatgctcgacaaggaacggcagacgatcgttgccaggggctcgcccgaagagcttcgtgaccgcagcgacgatccgtgggtgcggcagttcttccatcgagagtcgtcggctgcaggaatcaggaggtaggcatgtttggaaccggtcaacagagagattgggacggatcggcctgatgggaaggaaaccaagctacttcaagatcggcgtctttgtgattctcgcaacggccttgctgctgacggccgtgatcctgttcggttccggcgtgtttgcgaaggacaagctgagattcgagacctatttcgacgagtccatcacagggctgacggtcgggtcaccggtagagtttcgtggtgtgcgcatcggtcaggtcgagaccatcacattcgccggcagtgtgtatgcgatcccgccggacagcggacgattgtccgtcttccagcctatcgtccgcgtcgtctacgcggtgccgcgagagacgatgcccgaactcggcgtcgaaaaggccggtgccatgcttcaaaagatgattgctcgcggcctgcgcgttcgcgtcaattcgaatatcctgacgggccagggctacctggaggccgactatctcgatccgaatcgcttcccgatcctcgaggtgccgtggacgccggtgtacacctacatgccgtcggcgcccagtgagatcacgacgttgaaagactcgctcgaaaagattttcacccggctggaggagattgatttcgaagggctggtggattctttcgagcggaccctggtggccgccgagagggcggtgggggatgcgaatctggcccggatcagcgaggaagccacgagcctgctggcggaaacacgggagaaggtccaggccctcgacgtagcgggcatcaacgacgcgacgcagcgtttgctggcctcgctggagcggaccgtcgcggatgccaacgtgccggaactgagcgccgaactgacgcggtttgttcaggaaatccgcatcacgaacgacggccttcggcgtctgctggcgtcgccgacggggaccgcgggcgggtccaaccttccggaggttgtcgcgcggctgaaccgggtgctgtcgagcatcgaccggctggtgacgaccgagaaaccagagattgaaatcatcatcggcaatttccgggagatttccgacaatctgcgcgacctgaccgacagtctcagggagcgtccttcggagctgatcttcagcaaacccccacgtgaatcggaggcatacaaatgatatgtaaggggacccggccggccctgtttctggccctgaccatgttcgcgcttgtcctgacgggttgcgcgaggccgcagtcggccaacagccgcttctacttgcttcagacgtctcgctcgttgtccccggccgttcgcgaaggcaaggctgttctggcggttccacggttcaccatcgatgcggcgtacgccggcagggggctggtctaccggctcgacgaacatcgatacgaatccgacgcttacaacgagtttcttgtttcaccgaccgtgatgatcacggagaggacacgcgactggttgacccagtcgggtctgttcgcgcaggttctcggctcgggcagcggcgccgagcccacgcatcgaatcgaagccaatattgccgctctctacggtgactttcgcgacaggcgcgcgccgaaggcggtcatggagattcgtttcttcctgctgcggaccgaaagcggcgtagacccggagatcatcctggccaagtcctacgccgcgacggccgacgtggcgaccgccgggccggaagggctggtcgccggtctcgaccgctgccttcagacgatcctgacccagttggagaacgatttggccggtgccgtctgacgctgaaccgttcgaatcagagtcgcacgatctgacaggcgatgtcacttcgcaccaccggcacggcgacactcaatcggtcctggtcgtgtcgaacgcggtgcgtcttgatgcaagtgccctgacttgtatcccaccactgaacggcgtactcgcccggcgaaaagtctgggatttcgagggtcgcaccttcgatctcttgaggtgtctgccccgcgacgaccttccaccacgtggcgtcccggctggacagccacagataggtgcgatccgttccctgatagcccagcacgcgtagacgcgcgtcggacacagttgcgcctgtcgctctcaatccctcgaaggagatgtcccgcaggtatgccgccagcggccgatagtgacggtaggcgtcctgctggtccaattgctcccaccaccagaacatggccgtgcccgacggtccggcgaaggtcgacgcccagagagcattatggaagtgcacgccatcggtgtcttgtctcatgtgctcgctcaggccccacttgtcggtggccaggccgaactcgccgatcagcgccggtttgttcggcgcgtgctctcgcagaaaggccgccttttcgaggatggcctggacttcgtctttgaagtctgcttcgccagggcgcaagtagtggtgcagttgggcgacgtcgagggctgcgaggccacagtcgcgcgccgacggatgccatgtgctggtggtccgcaggtggcggtagatgtcgatttcgtcgaggtagccgcccacctcctcatagaagtggtccgttggcttgcccgggtcgatctcgttgaagtactcccacgcgccgacgctggtcgagtagccccaccgggcgacggcatagcgcatgaactttctggcatccgcgatggctcggtcgtaaggcacattgttcggattgccaagctcattcatgtaaagatcccgcgtcagcaggcaaagcatcagatagatgccgtgtttctcggcggcctggacgatctgatcgaccatgaagcagtcgagcggattgtagtaaccccgcacgggacgattgacatccgcttcccatagcagctccgcgctgtcgtcgctttccttcagcgacagaccggtcagccacgcagtgccttcgcccgaaagtgcaactgtggtgtggcccagccagtactcatcggggccggtggtgaattcttctgcgaagtcctgccaggtggcggtgtgtgccggcacccgccaatcgtgtctgccgacctggattcgcaaaccgtccgctccgtcggccttgaaccttccgcggagtgtgtaccgcgtgtccggccgcagcgccacccggtgcgagggcgaaacctcgatcgaagcgccgtcctggccctgcagttgtacgcacttgccctcggcttcaggcaggggaaccacgggcgattgccggttccatgaacgggtccacgcgctcttgggagcctcgacggcgagggcccagtcatggcaacacgtccaaatgcgcgcgaagttcgcgccgtttcgcgccatctccgcgaagatcgcctcggccttcgggacgttgacatactggctctcgccgatgaaggcgaggttctggccgatggcgaagaagggctggccttcggcgaattcgagaaacctcgggtcctcgcggccgacgcgcaaaaatcccttatttgtggaagggacgcactcgatccggatggtctgcgacagcgattggccctcacggtcgttcaggcgagcccggatcgtgtatgtccccgtctccgtgggtgcgaaccgtgctttccacgtcccttgaccgatcgggtagcaccaggccacggttttgccatcgctggggaaatctcgccgttggtaatcctggccgaaaaaggccggcagaacgagcgcccgcccgctcgggcaatcgatcagcagatcgatcgcaacctcacatgggtcgaagggattgtcgtacgtccgctccggcgtcagtgtcagttcgagcttgtcatacttgccgacatgggccggacaaggcccgatggcgaccagccgcggtgcggcaaggaggctgccggacgccgccagacagcccgcgaacacgtgggtaaaaaccatcctgcatcgcatgcgatgttctccttatgacctgaccattcacgaggcacagcctaccatgccgcgtccgtgcgaggaagcgcccttgcatttgcccggcgaaggccgcatactcagcgtgcggggttcggaggggatggcacgcaggcggcaagccccgattggggcgacggaggtttgcactatggcagatcgattgacaacgcggcggacgtttcttgcggatgcggttctggcgacaggggcgatcgcactttcgccggctcaagttcgtccggcggcgggctccgagggtgagcggatgcacgtcgcctgcaactcgtactcctggaccgtgttctatcagcgtcaagggcgcaatttcgaccagtcgctcgatgaaggtctggccgaggtggctgccagcggtcttgacgggtttgagccgtcgttcggcgacgtcgcacaggtcgagcgtctggcgcctctgctgaagaagcaccgcctcgggatgcggtctttttacgtcaacagcctgctgcatgaggccggccgggccgatgagagcatccggcagatcctcacgattgctccgagggcccgggacgctggagcgcggatcgtcgtgaccaaccccaatccgctcgcctggggcggcgcgcaggacaagaacgacgaacagctcaaggtccaggcggccgcactgaaccggctcggggccgaactgcggaagctcggcctgacgctggcctaccacaatcacaacatggaactgcggcaggccgcacgcgagttccaccacatgatgctcggcaccgatccggccgatgtgacactctgcctcgacgcccactgggtctatcgcggcgcgggcaactcgcaggtcgccctgttcgacatcgtcaagctctacggcaagcgcatccgcgagctgcacctgcggcagtcccagggcggcgtctggaccgagacatttggcgagggcgatatcgattaccgcgccctggccgatgccctgcgccaggagggcgttcgcccgcacatcgtcctggaacaggcgatcgaaaacggctcgcccaacaccatgccgcccctggaagcgttcaccagaagcaccgagtacgtccgccggctctttgcgggcctgggcgaaaaagcttgaacccagacgcacgttccgataaaatggccgcagtgaatcaaggttcgaaggccggccggaattgaccatcatatccgtgcttgtcgctatcatattattgtcgcatatcatcgcaccggcaccttcggagaccttgcggagatagctcagcgtggcttgagggattttcggggcacgggcggcggttccacaaactatggcggcgaacgatgattcgcccgcactatcagccaaaggtacgccccctgtctggtcgaagagaaggcaggtgctggatttacggttattatccattcattcatcccaatctaaggagcggcacaatggcacggagaatcaggtttgcagggtttctggtcctggggctggtggcggcagtcgcccgggcggggaccgtcgatgtgatgatggtcgtccccaagacgttgtacagtggcgcctcgacctcggcgacgatcacggtggtcagcgcacgccagtcgtcggcagggatcggcgtgagtctgcgcctcaaggcccatgaagggaacgtagacctcgccgccgggcagaccgatgaggcagggcggttcgtcgcccgattcgacacgcccaacttggcggatggctcctatatcctggaggcacacgtcgatggcgccgaggagactctgacaactcagatcatgatccggcggatgcccgtggtgttgatcgaaacggacaagccaatctacaagccgggccagacgatccagggccgcgtgctggtgctgacgaacgagcttcgtccgagcgcctccgacgtgaccgtgcagatcaccgacggcaagggcgtcaaaatcttccgcaaggacctcacgacgaacgccttcggtgtcgcgccgttcaacctcgatctggccagcgagctgaactacggcacgtggaagatcaccgccgaatcgggggccggccggggaaccatcgacctgcgagtcgaggagtacgtgctgccgcgattcgaggtcaagctcgacacgccacgggattacttccgcaccgacgagagaatccccgggaccgtcacggcgacgtatttcttcggcaagcccgtcgacggcgaggttcagatcagcgccagtcgctacgtcggtgtctgggaggaatacgctcgctacacggcgccgctgacggaagggcgggcggagttctcgctgcccgaggtcaagtacgtcagcgggaccacgggagccggcggtgcgggcagcgtgcagctcgacgtgaccgtcaccgacacgtcggatcaccaggagaagacgaccaagctgctgaagatcgtctcgtcgggaatcgagcaccggctgatcgcctcgtctcggtcgttcacgcccgcgcaatcgtatgacgttttggtggtggccgagacgcccgacggtgtgcccgtctccgtgacaggacagttgatcggcgagtactacgccgaatcgggtgagatgatctccaaggaggcccattcgctggcgttcgaaggctcgacctcgatcaccctgagggcgccgcagaaggcttcctgggccacactgaagagcgaggttcgaggcgatggcgaaagcgggcaggcggagttgtacgtctatgcgacatactcgcccagcgacagcttccttcatctgagtcgcgaatccaccggcgccgtcggcatgggtgacacagtcacgatcgatgtgtttcgcacgcacgatgcaaccatctactacgatgtctttgcgaacggccataccgtctggtcggacgcggtgaccggctcggcgatccggttccaggcgacgcagcagatggtgccggccgcccgggtggtggcgtacgtgatcaacccgaacaacgagatttccgccgccacgatcgagttcgaggtgacgatggaccacgcagccagcctggccctgggagtcagtgccgaagaggtcgggccgggtgagccggttcgcgtctcggttcgttcggagggtcagtcgatggtcggcctggccatcgtcgacgagtcggtctatgcgctgaacgaaggccggctcaacatgcaggaggtgttcggcgagctggaacagcggttcatggagccgcaggcggaaacgcacgaccagccgtacagctatggcgcccgcaacatatttgaggacgccgggcttgccgtggtgacttcgcgcgggctggatgttcccgagggccggcgaatcaacgggctgtggtggattggtccggtcgtccgaaggggtggcgccgacgatgttgccgagaacgccggcaaaggagatgggttggcggaggtcgatcgggtccgccagttcttccctgagacgtgggtgtggatgccggatctgctcaccgagcccaatgggaccgcgatgctggacctgacggcgccggacagcatcacgacgtggcggcttcatgcggtgtccacgagcgacaacgggcttggcgtgacggagtcgtcagtccgcgtgttccaggagttctttggcgagcccgatctgccgtatgcggtgacgcggggcgagcaattcccggtccgggtccaggtgttcaactacctcgacgaacctcaggtggtctatgtggagatggcggacgccgactggttcaacctgctcgacatcagcgaacagcaggtgcaggtaaatgcaaattccgtgtcgtctgtttcgtttgtcattgagccgacgaagctcggacatcatccgctggaggtccgtctgcgttcggtccggcgggccgatgccgtgcgcaaggaagtgctcgtggagccggaaggcacccggcgtgagctggtcaccaacggcgcgatccgagcgggcgagacggtggtcctcgacgcgaatacgccggaattcgccgtgcccgattcgcagaagattctcctgagcatcacgcccagcctggttgcccagagcatcaacggtgtggatgacctgctcggaatgccctacggctgcggcgagcagaacatgatcttcttcgccccggacgtggagattctgcgctatctcaacgcgaccggccagctcacgcccgaggtgcgggccaaggccgagcacttcatcacggtgggctaccagcgagaactgacattccgccatcaggacggttcgttctccgccttcggccagagcgatgccgagggcagcctctggctgacggcattcgtgctcggcacgttcagcgccgcgcgtgaggtgacgacgatcgacgagacgattctggccgaggcggccgcgtggatcgcctcgcaccaggcatccgacggatcgtggccgccggtggggttcgtatgccacagtgaaatggtcggcggggtgcaggggacgtacgcgctgaccgcgttcgtgtcgattgcgatggcggattacggtatggccgatccgcacgtgcagggagcggcgacgcaatatctgcgtgacaacctcgcgtcggtccgggacgatgcgtatgccctagcaattgcggcgctggccttcgcgcgggtaggtgatccggccgccgacgcggcgctcgaacggctgctggcgatcgccgtcaccgatgccgacggtctgcactggcaacctcacccggtggagacaaccgcctacgcggcgctggcgatgatcgagaaggaatggccgcaggcgaacgaagcggtcaagtggctttcgctccagcgtaacagcctgggcggctacggcagtacgcaggatacggtcatggggctgaaggccctgatgatggcggcccgcagtcagagccgcaacgtggaccttacggtgaccgccaaggcgcggggcggggaaacgctggcgcagttcaccgtgaacagcaccaacttcgacgtccttcagacggcggagctgccgctcgaatcggccgtcgaaatcagcgctgtcggctcggggcaggtgcgattccaactggttcgacggttcaacgttctgctgcgtgacgatccggtccagaaggacatgaccctggaggtgatgtacgacgccgaccacgtggaggtcgatgatatcgtcaacgtcaccgcgacggtgcggtacctcgggccaaaggactcgacaggaatgatgatcgtggatgtcggtgtgcctacaggcttcgccgctgtcgccgagtcgctcgatgcgctgcttgccgacaatctcgtcacgcggtacgaggtggccggacgcaaggtgatcttctatctcgacggcctggaacgcggcgaacaacggaccctgcacttccaagtcaaggcccgcttcccggtgcgcgcgacaattcccgacagccaggcatactcctactacgaaccacaggtgcgtgccgaggctggcggcaatgagatcaccatcgagccggccccgcagcagtaagcgaggaccgtggcgtcaagtccaggcgtactgctgcgggttgctcgcggccctacccggcccgatgccgggcggacaatatcgcatcgcccctcatgtgccgagctttagagcgttcggcgtcggcgcagccagctcaccgcactgacaccgatgccggccaagagcagggctcccggcgccggaattggtggcgtcgtgctgcagatcttcgcccagagcgggagcggaggacaggtggtacggcattcttccgtgctaagcgacgagatgatgctgctggggcaactgccgaaacccagcacgcacaactcgtagtccgcgcccccgacctcaaacgcgatgggatcgaacgacgtcggcagcgtgatgacatccgcaggatggccacccgggccgaccgtttccgtaacgcccagcgtcagggacgtgttgaccggcgtcccctcaaagtccatcgccaggtccagatcgaccgccgtgatgccggtgccgacgactatgggcgtattgtaatggcgcagcgcgcccacgacaaagggcgtatcgagcaccacgtcggtgggcgtcgcgacgggtgtgaagcccaagctgctcttgagaccaaacagataggccggagtgccccaggatatgagctgttcgcccatcaaagaagaccagtaggcaggggcaggggccaaggactgaagtacaggatcgctccaggtgccgctggcgctggaaagcgtcagcgcaccactggcggtgccgacgacggcgagcagcgccagcgccggcagtattgcaggtaaccgtctcatcttgtgtctccttacactccgtgtgtgactctgtggaaaccgtcagcttaccttgtatccgtggaacccccaggcacctcctttctccgggtttctcccacccatccgtacatctcccctttactccgtccggacaaacctcgcccgcacggattttactcatccagacactctctatgtccacatagcgtctgcgtgtagctattccgcgtgagcagaaccacacgtgtattcatcaccgccccatccgggttaaatatacgcgcaatatgggacgccctgcaagcaattccacggaggaaaatgcttattttgatgtgggaagattgggggacatgggaagactgtcggtgacattggtttcttttcgagattccgtgtcccatcggatgatgaggcgccgcacaggatcgggtcagcgtcgggtggaccagcgggccgaccggctggccgatccggactcacagaggttgccgaccacggcgcgcacggtgttgcggagaattgagagaaacccagcgacttacgactgcatcgacgcgagcacgtcttcgagtgacaatgcggcgcagcagaccgttgtgtcggaggcgccatagtagaccttcaaagtcgtctgttcgacgagcaggccgcaggtgaagaccacggggccgaagaagccggagcactcgtattcggtctgcggctcgagaatcggccgcgctgagcgggcccgcaccatccagggctggcgggcgtcgagcaggacggcgccgaggcagtaacgatggttgcggtcggcgccgtggtaaatctccagccacccctcgtcgaggcggacgggcggtgcgccggccccgatgcgggcctcgtcccagaatccgtcgcgcagccccatcaagtggcgatggcggccccagcagagcaaatcgggcgattcggcgatccacatgttgttggtgtgacaaagcggcgagtgcggccgatgcaatgcgtagtatcgtccgtcgaccgtctcggggaagaggacgacgtccttgttttccgggccgaagataacgccgtgacgttcgaaggtcgcgaaatcacacgtcgacgccagcgccgtggtcacccccagcggcgagaccgcgacgtagctgatgtaatacgtctggccgatccgcgtgatgcgcgggtcctcgacaccgaagctctcccaggggtcggccggaccaagggtgggatgctcatcgatggtgaagcggataccgtctttgcttctcgccacgcgcagatgcgatattgaggtcaggtatgtcctgccccggcgcacgatcaaccgaggatcggagaaatcgttggccgggtcgggtcgagtgaacgccttggtgacgatccggccgcaggccgggtcgagaaacgcggtctgcaccacctccgggtcagtctggatcggacgctcggctacgcgcaccagcaggacgatttcctcgccaaggcgggccaccgcgggattgaagacgccgaggacctcgaaatcgccacgcgacggcgttacgtcctgtggggtgaggatcggattggctggatcgcgaaatgctgccatggcgacattctcccgaactctgtcggcggccttggcgtcaaggccacgattgcatagcgaatcgtaaccggtcggatcgtatccggcaaggcgtcggctcgatctcgacgaggtcggcggtgtagacttggcggcccggcggggcaaataacgttgattttcaggccgcgaatggtagaatacagtctgatgcgcatgtgcgaatatgccttcacggcgggcggagtcgcgaggtcattggggatcgacgacggtcccggattctggaacaccagcgtacttgcacgcctgtcaccgcttggattgtcgggagtgaggaatgagtgtgacgcgtgaatcccgtcgggccgctcgtcttgtgctggcttcgtttcttctgagtgtcggtcctgtctcggcgaccccggcaggccggggggcgggtctgccgctggcgatcaatgagctgatggcggccaacagcagtgtcaaggccgacccccaaggccagtacgacgactgggtcgagatccataattacagcgatgcgccgatcgacctggcccgcatgtacctgacggacgatccgggcgaaccgacaaaatggcagttcccaggcggtgcctcgcagccggccaccgttccggcggggggatatctcatcgtctggctcgacggccccacaagcgacagcgggctgcatgcgtcgtttgcgctcgattccgacggggacaccctggcactgtttgcccccgatgggaccacgctcatcgacagcgttgcattcgaagaacagaggaccgacatctcctatggccgctcgcccgacggcaccgggccgtacggcttcctgctgacgcccacgcccggctcgcgcaacagcggcctgtacgacggtctcgtcgccgatacgaagttcagccatgaccgcggtttctacgatatgccgtttgacgtgacgatcacgtgcgagacgcccggcgcgaccatctactacaccctcgacggcagcgcgccgtattcgcaggctcggcaggttcctgccggcagtgtctacaacggcccgatccggatcaccaggaccacgtgcctgcgggcccaggcggtcaagccgcagtgcgtacccagcaacgcggacacgcacacgtacatcttcctggccgatgcggcgaggcgctcgcagtccgaggtgctggcacgtggctatccgagcacgtggttcggctcctacccggccgactacgagatggaccccgagatctacaacagccccgcatatgccgacgtcatggacgatgcgctgctggcgattccgacgttgtctctggtgaccgacagggaccatttgttcagcaagaccaatgatgcgcagaccggcggcatctacatctacaccgggcacagcagcacgggcggccaggattgggaacggcccgtgtccgccgagctgttcagcatcgacggcgccaaggaatttcagatcgactgcggcctgcgcatccagggcggcgaaagccgcaacccgcccaagtgtcccaagcacagtttcagcctccgctttcgcgacgtctacggctcgtcgaagctccggttcccgttgttcgacggcagccccgtggaaacgttcgattcgcttcaactgcgcggcttctttaacaacgcctggacgcactgggatcccggccagcgccagcgggcgcagtacattcgcgaccagtggatgcgcgactcgttgctcgagatggggcaggccgacgccggacgcgggttctacgtgcacttgtacctcaacgggatttactggggcctgtatctggtccaggagcggccggtcgcctcgcactacgccgcctacaacggaggcgacccggatcgactcgattcgattaacggaggacgcgacgcccacgacgtcaccccccagacctggcaacaggccaggagcatcgccgccggcggcgattgggcccggatctgccaggtcatcgacatcgacaacttcatcgacttcacgctcctgaacctgttcgccggcaaccaggatctcaagaccgacggaaactggcgcgccgccggaggcggcgccgacaacaagccctggcgcttctatagctgggacggcgaacgagttcttgagaaggcgaccgagaccgtgataagggatacgttggacccgaccggcctgtatcgccccctttcgcaaatcgaggaattccgcgttcgcttcggtgatcgcgtgcacaagcatctgttcaacggcggcgccctgacgaccgagcgcaacatcgcgcgatggacccgacgggccgacgagatcgacgccgctgtcatcgccgagtcggcccgctggggcgactatcgccgggatgtgcattcctacagttcgggcccctattacctgtacacccgcaacgatttctggatcgtggaacgtcagaatctgctcgacaactatttccctcgccgcaacgaggtggcactgtcgcagttcaaagccctggggctctacccgagcgtggaggcgccggtcttccatatcgacggtgtctatcagcacggcggccacatcgccgagggctcacggctcacaatgacttccaacgccgcaacggtctggtacacgctcgacggcagcgatccgcggcgccccggcgtcagcggcagcacgggcgctgagctggtcctcgtgccggaagcggcggccaagcgcgcgttcgtccccaccacggatatcggcagcgcctggcgcagcgaggtggatttcgacgattccgcctggatcgccggctccggcggcgtcggctacgaacgcagcaccggctacgaggcgttcttcgacatcgacgtccaggcccagatgtacaaccgcaacgagagctgctacatccgcattccgttcgacgtcacacccgaggggttgcaatacgccggcggcctgacgctcaaggcgcggtacgacgacggtttcatcgcttacctcaacggcgtcgaagtccagcgcgtcatgttcgaggggacgcccgcctggaactccggcgccaccgacaaccactccgacctcgacgcggtcgagttcgagcggttcgacctctccggccatatcagccggcttcgcctgggacgcaacctcctggcgatccaggggctcaacgcaggtgccaacagttccgacttcctgatctcggttgagctggtcgcgtcgcaggggggcgcggacgttccagccggtgtcgcgccgacggcggtccgctacgccggcccgatccggctcgatgccagcgcgatggtccgcgcccgtgcccagagcggcagcacctggagcgcgctgaacgaggcggtctacgccgtcggtccggtggccgagagcctgcggatcagcgagatcatgtatcatcctgtcgatccgaacaccgaatacgtcgagttgctcaacatcggctctcagccggttaatctccatctggtgcgcttcacgaatgggatcgacttcaccttcggcgacgtcactctcgacccgggtgcatatgccctcgttgtcaaagacatcggggcgttcgaggcgcggtatggggaccagtcgcccgtcgtcggccagtacgccggcagcctgaacaatgcgggggaaagcatcgagttgcaggatgccgccggccagatgatcctcgccttccggtacaaggacggatggtacgacctcaccgatggggctggctactcgctgacggtgattgaccccctgaccgccgattcggccaccctcgacaagaagggcgcctggcgtgccagcgccgaggtcggcggctcgcccggctacaatgactgaacagagactcgaaacacgaaatccgaaacaagcccgaaatccgcaagctaaaatgaacgaaatgctgacgctgtgccgaaccccgtttcgaattcgcagtttggtgccttcggatctatttcggatttcgtgtttcggatttcggatttaacgcaacgccgtcacttcttcggataggcgtagtaaaacgtctcggcacgggagaaggcctcgacgtgcccgtcgaggaacgcgcagttgccgcgtccgcccagcttgtcgcccgaaggggcgtggtggaaacccgcgatcacatcccagaattgcccgaccccctcgggacccgggatgatgcgacgcaggtcgcctccggtctggctgaaccaactcttgaccatcgtatcgctgccgggggccatgaacgtgtcattgagcccggacatgttgtaggccgtatcgacgatcgcgctctcctctgcgaacgaaaacgtcgtcgcaggatgcttgacgtccgtgtccttgagaacgcgggtctcctgaacgtcactgcgggcgctgcccagataggcgttcatcgtgtagttgtaccagggttcgtagttcttgacgttcttgccataggcgaggaagaactggtcgtcgctgtggcgcactgcgaggttcttgaaggttgggcagatgaatgccctggcatcgccgaggtaccgggccatcatccctccgtactccgggtgactcttcaactcgatgtcgccgttgcaccagcgcagatgcaggtactcggaaatgcctgcctcgacggggtagggtgttagttggctgaagtagcatctctgtggttccgcgaacctgcggtcgttgtcgtcgaggtacatcgccatcgcgatggtatagttcttcaggttgcccttgcaggcggcgccctgggccagctcacgggccttgcctagcgccggtatcaggatccccatgagcacggcgatgacggcgatgacgaccagcagctcgatcagtgtgaatgccttcgacttccgcatgacatggtcctccacgttctcgggaagcgcttacccagacctatcgtctcggcccacccgtctccgggcgcacccggcagggcatgccagtcagggtgcctgatcgcgttgcatcgcggcatttaccattctatcgacagaggttgccgtctgcaagagatatcggtatccgccggccgcccatcatccgtctatggggcggggatcaggcggacgagggccacgccgtgacgcgatacgttggcggcgaagcggctgtcgtacgtgcccaggtccttctgccgccaaaggtcccgcacgaggcgcttgcccgacaggcccagtagcggccagtcgaccgacatctcgcgaggcaattcggccaggttgaacaggcccaccgccagcgagccgtcggccatcgccttggccataatcagagtctcgtcgtcctgcaccagcggcctggcctggatgcccagcgggtcctgatcgacgtcgatcacctcggcattgcatagtacgttgagggtgaattcgtcgagatagcgcatgtcgcccgagtagaacagcggggcggccatcaggcaccacatcgacatgtagctgtactgctcgcttggcgtcagtggggtgggtttgggcggctcatcatgctgataggcgttgccgatgtgcccgatcaggatgtagtcggggtcgttccactgtccgggccgggcgtactcaaagtgccgggcgttgctcaggccgatccggtagaagccgggcagcaggccgccttgttcgaggcccaggtcgcccgtggtgcgccagcagtgcccgccgacctcgccaccccaggtccagacgttgcccatgccgtactggcacaggttcaggatgatgtcccggtcgagactcttgaggatgtcgcccatcaactgatatgggcgcttcaggtgctccaggtctgtgccgccggcgacctcactgtacgagcaccagtcgtgcttgaggaaatcgaaaccccgctcggcgaacttctccgcgtccacccgttcgtgttcgtagctggcgacgtacccggcgcacgtccagggtcccggccctgtgtagaggcctgccttgagacctttgctgtggatgtgatcgaccatgcccttgatgtcggggaacttggcgttgggcaggatcgcgcctttcgcgtcgcggtagggctcatcgccgcgcctcttcatccagcagtcgtcgatgttgacgtagctgtacccgtagtcggccatgccggagctgatcatgacgtcggcggcgtttcgcatgtgctcttcggtgacgtgataatagtggatgtaccaactgttccagcccatcggcggcgtcagcgcgagcgtgtcgccgacgatgatcgcgaaggtgcggcggtcgctgccgtggtcgtttttcgcttcgagtgtcacgacgtactcgcctcgcggcgtgggcacggtccccgtgatgattcccgtgctcgcgtcgagccgcagcgtctcgggcagcccggcggcgccaaacgcgatcggccgcgtccccgtgcaggggatgcggtagaggaacggatgtcccggtcggcagccgtagaccttcggcccattgatctgcggcgccgggcccggcttgggcgtcagcagcaccttctcctcggcagggggccgtggtgcgtcgacggtcgtcggcttgtcaccccccacgatgaactcggcgcccgcccagttggcgtggtcgtaatcgatgccgtcgccgccggaactgaccagcaggatcatctgcgtcacgccagccagcgagacgtcgacacgcttggcttcgtcgttgccggtcatcaggccgctgtcgaacagcaccttgccgtcgccatagaccttgaaccggaccgagccgcgaggcccggtggcgtcgtcgacgcccacccaggcgctgaaccgctcggttttgccgtccagggcgatgtagcagatcgattcggcgtgtgtcgccacgcccgtttcgaacgagcgcccgccgatcgacagcgttcgggcggtgatgctcttgttgacctggggcttgccccacccggtggacatcttcgtcaggtccagctcgcccagcggcaccgttgcgcccgaggcgactaccgcgccgagacagatcagagaacacaccggaatccatcgctgccttacgctcgaacgcatgttcacctcccgttgcctgagccccgtgtttgccgcagccacgatcgggccgcccccgaatcctaccacgatcctgtcgcggcatcaatggcggggcgagcggttcgctcacgttttcgccggcgtctttgtgcttctgtgcgttgccatgtgagcgcacaacaaaggggccggcgtcactgggacgcaggcccctgatcatggacattcgactgtggcgaaccttggcaagggttcactacggcgcgacggtgccgaggaactccacttccgcgatctgcatgttgccatcgctgttggcccgaagggtcgggaacaggatctgatagtacctgtaggcaaccgtgttggcgaactcgatcggggtggttg

SEQ ID NO: 505 - DNA, 201895 bp, Artificial Sequence
  Synthetic Oligonucleotide
actggacctccgttgacggttcatgaagcgcgctttttgtacgaccctgaaagccgatgcttgagtcctgtcaccaatccgaaccgaagcacagagccgcagcttagcccgttggattttgggtcgggctttttcttgaagggtgccgcgttgaaggcggggatggtggcaggcgtccaagctgtcggcaaaggggcctttatctcatcggcccaccaaagagttcgcacccttgcagaagggtgtggtaagaagcaaagtgcaggtggagcatacattttaaggccattcgatgtgggacaattcaacgttctacagcaggcatcaaaagtgggggatgacctagctattcatcatgttgggcagaagcacgcgatgcagcaaatcatctcaggttataatcctaatacagcacccgcgattgcggttccgactgctcagcatcgagcaattcctaaccttgtaggaccatacaacggcaatgctcgccaacttctcgcacgggatgtgaagaatttaaaaaaatacacagatgtccccattgccaaccttcgcgaattaatagaactcaacaaacagatgtatcccaacgcttttaaaaaacgatgaacactaaagaatatgtggatgctgttagaacggtggtttacattgccgctgtgcaaggaatattaacggtgttaaaacaaccaccgggaagatgtcctgacccggacatgcttaagcttagcgactggtataaccagttgaggccacaggatcgcgacaatgtggctcgaattgcggatatggcagctaagcaagcgacgtataattatttattgactttggatggtttgttggctgtcgaaccagagggggagaaaggaaaacttgagttgttctacaacgatgggaaaagaagcacgcgactcaatgatgatgagggttaccaactgagttatttattcaagaaaactgaatcttgtgaaaaataagctaacctatgaatgtgggaatgaaccgccgattaagttttcaatattagatctccaaaaaggcattgctgaggcgccgctggccatacgtgcggcgcggggcgtgccgcggcagaagctcatttaccagtacgactgggtcggtcggcgggtgagcaaggtggtgtcgaactggaccggttcggcccgggcactgccagcaacgaagtcagacgtcaaggaaaggagattatttatttaatgcggcgttccatggccgcgattttgttggaaatccagcggtttttgtccgtcaccgcctggtacatcgcgagggcctctttgtaacgcgagatttgttcaaattcctgggccaatacaacacgagcttgattggcctccttatcatcccgggcttgtttcaaattttcgcgcaacaagggaatgatgcgctccggttcattggcgttgcggtaggcggcaatgcaggactgcaccaacgcatcgggggtgaaaggcggcttgcggttgggttcgttggccatgtgccggttgggcagcacataggcctcaccaatgcgggccgccagccaataattttcaacaaggttgggagtgctgcaaagaacgccggtctgcacggccatttgcaggcctatccgttgttggttggtatccgcgcgcgacagcaaatcctccaccaccgtcagcatctcgcccacgatgacgtacatctcgcggtaagttttcgcaacattcaggcgttgccggaattgcgcggtcaaatcagtctgttgggcagccagcaagttcttctgcgcttgcaaatccctgcgcaatgcagcacgggcggtgacctggtcctggaatttcttatccatctcggccacgcttttttgccgttcagccaaagcgttgcgaagtgtctccacatcggccggaaggttcaggccttgcaaccgcgcatccaaatctttccgggccgtgtccaaatcactcatgagccgttgaatgtttgcctccaacgtccccacggtgttgatgcgttgttgcagccagcgcatggtgcggtaggcggtggccaccggagccatgtttttatcaaattccgcctgcttttcggccaactgctcctgcaacggcttgagctcgccgtctatcgtgtccagattcgtttggatttgcgctatgcgattgctggcggcggtcaaatcgtccggggtgaggactacttcattggtgccctgcatgcgcttgccgtccttgatttcctgctgcaactgggccatctcccgttgcagaggcgcgcgggcgcgcgtgcgctcatccacctgattttgcaactggttgatggtgtcccggagcggttgcaaaggttgcagaaccgggtccaccacagcagccaggttcgtcaactccgtccgcatggcctgcatgttggtgagtgtggcttccggcaaattggtcaacgctgccggcacttgacgcagcgtcagctccaaatcgcgaagacgattggtaagtatgttctggcggcggctgacctcggacaacgtgttgagtgcgcgatttattgactgtatttccgcccgcaaccggttggcattggtttcataatcggccaggtttttatccagctccgccaaccgtgcttctagcttcgccacgtcctccgacaaattgagtttgaatgtggtttcaaatttggactggccggtttgttgcttgaggtagcggtgaatttggtagcgggcataccacggtctgggcatgccgtgcaaaacatcatgaacccaccacgccaccccgccccccaacaacaagagtaacccaaagattacccatcccttccacgggaccttgcgttgttttgtttgttgttgcgccataactttaactgcattaacgcggcttttccaccatcaagcccggcaaactctgcaaatccgtccaattgggacccgcagcaggtgccattaattttggacgcatcttcccccgccgagattcaattgttgtggcggcttttttggaaaagtttgatggacaggagggaagtctttggattagataccttcatgcaagacttccagcctttatttgaagccattatcaacggccaagcacccgaggccaaggcactcactcaaaaactgattgaggccaatgccaatcaggaagccctggtcaaggattgcatcatcccagccatggccgaggtgggtcgccggtttgaatgtaatgaatactttgtgcccgaactgctcctcgccaaccgcgccatgaaggagtgcatgaaactcctctccagcagcggtcccaaattgggccgtgtggtcattggcaccgtcaagggtgacctccacgacatcggcaaaaacctggtggccgccatgctcgaaggcggaggcttcgaagtggtggacctgggcgtaaacgtcgccccggagaagttcattgaagcggtcaaaaccaaaaacgccaacatcgtcgccatgtccgccctgctcaccaccaccatgaccgccatgcaggccaccattgacgccttcaaacaagccggcttgcgcgatcaggtcaaattcctcattggcggcgcgcccatcacccaaaaatacgccgatgaaatcggcgccgatggatacagcgacaacgccgttggagccgtggccctggccaaacaagtcatgggctgctaatccttgaacgatatccaattccacgcatgcaccccaccctcgctgcgctgctctccgggcatgtcgtactgacggatggcgcttggggcacccaactccaagcccgcggtctggccgtgggggactttcctgatgcctggaacttgacgcatcccgatgccgtgcgcgaagtggccgaagcctacatcgccgccggcagtcaaatcatcctcaccaacacctttggcgccaaccgcctccggctcgccgataatgggctggctgaccaaacggcactcatcaatcgccgcggtgtcgaattatcccgccaagccgctggcaaccaggccaaggtcttcgcctccatcggtcccacaggcaaactcctcatgagcggcgaagtcaccgaagatgacttgcgcactgcgtttaatgaacaagcccaagctttggccgaggccggcgctgatgcaatcgtcatcgagacgatggccgatttaacggaagccaccctggctgtccaggccgccaaagccaccggccttccggtggtggcctgcatggtttttgactccggaaaaaacaaggaccgcacccttatgggggtgactcctgaacaagccgccacggcccttggcgaggctggcgctgatgtcgtgggagccaattgcggtcaaggtatcgccggcttcatccccatctgtcggcgaatgcgcaccgccaccgaacgccccctgtggatgaaacccaacgccggtctcccggagcttgaaggcggacgcacggtgtaccgaaccaaaccggaggaattcgccacccacgcccaagatttgattcaagctggcgcctcgttcattggcggatgttgtggcaccagcccggcattcatccaagccctgcggcaagcccttgcttcatccccggcctgagttgtctgcaggccgggtccatgttaaattggccttaaacatgcgtcgggttctaattgtagatgaccacgttttgacccgcatgggaatggttcatttcgtgcggcattgcttcggtaatttggaaatcgaagaagccgacaccgcccaggccgccctcaccctcgcccgcgaaaaggaattccatttaatcgtcctcgacattgacctccccgatcgcagcggtctcgatattctgcccgacttgcgccgcgcctgccccaaaacagcggtcttatttgtcacaggcctggttcaagaagacgtagctcttcatggcttgaaaaacggcgcctgcggttttgtggaaaaaggcagttcacccgatgagatcaaacgcgctctgaccgcggctttcaacggccagcgctatatcagcagcggcatgcgcgagcgcctggccttccatgccatcgagccggaggacaactcgcccctcgataaattgagcgaacgcgaattccaagtgctgcgccaattgggccagggccacaccctgaccgaaattggccaaaacctctctctaagcgtgaaaaccatcagcacctaccgccagcgcctgttggaaaaactcggcctccgcaccaccgcagacctggtccgttacgccgtgcaaaaaggattggtcaaatgaaatggcttcccgcacgcgcaggcggtgtcttttgggggctcctcatcgcctacccccttgctgcccaaaccggccccaaacccctggccaacccgccagcctcagaccccgcagccaccaatgccgtttttcaacgcattgatgaaaaccgctttcaagtcggaaaagtcatcctggataaaaacgcaaaaacagtctccttccccgccgtcgtgaacatgcacgaaggcttggtggaatacttttgtgtgggcgttcagggcaaggtgcatgaaagtgtcctccgcaccgaggtggaaccctttcacgttcatgtggcgatgctcctcctcggcgccaaaggggcccccgcgcaggcgctcaaagaagactaccgccaacccgtcccgggcgatcctatcaccttgaccgtttcatgggacgacaagggccaacaacgccaactccgcgccgaagaacttgtgtgggacgtggccaaccaacgcgccatgtctcgtgggccttggacttacagcgggtcacgcgtcttcgacggcacctttctagcgcaaagggaccgctccatcgttgccatcatcggagacattgatgctttggttaacaatccacgcccacgccgcgaacgcgacgacaattggctcgtcaacaccaacacctgtccgccggtgggcacggccgtgaacgtcaccttccaactgtctgcgcccacaaccactccccaagaaaagccagcccagtaaaacgacagcccagccccgatctttttacctttaccggttggcggggttctttacgtgtggtacgctttctccatgaatagcggcggattacatacgttgtttgcttcacttgccggcatcatctgcattttcggggccgccccctgcccgctacaggctgccgatgaatccttcaaaaatgaggttcaaatggccattgaccggggactggcttggctccgtgccgagcaaaagacaaatggcttctggtcaacgccggatttgcccgccctcaccgccatgagcgtgctctgtttcaagggtgacccggcgggcaaatataaccagcccgagcccgaatttttgcaacgcggctacaagtttctcctggaacaagtcaaaccggacggcggcatttatcagaccaattacgccacttacaacaccgccatcagcatgctggcgctgcttcaagccaaccgccccgaatatgaaccggtcatccacaaagcccggcgctttttggtgggccagcaaaatgatttgggtgaacccggcaaaatagatacaccgtttgatggaggcatcggttacgggagccgttaccgccacagcgatatgggcaacaccctctacgccttggaagccatctactacagccgccacctcgtgcgcgacagcggcggcaaagaacccgatttgaattacgaggcggcgattgcctttttacagaattgccaaaaccttcccaccgtcaaccgccagccttgggtttccgaggatcccaaagacctcggcggctttgtctattacccgggtcacagcatggccggcggtgtcaccaactcgcaaaccggcaaggtatcccttcgttcctacggcagcatcagttacgccggcatgctcagttacctttacgcccaactttccaaagaagacccccgcgtcaaagccgtcttccgttggttgcaggaaaattacactttggaggaaaatccgggaatgggtcctgagggactctttttctattaccacaccatggccaaagcgctgacggtggcggaggtgaacaccctgactttgaaagacggacgcatggtgccgtgggccagaatgctcgccatgcgcctgctcaacatgcaacaacgcgatggctcatgggtgaaccaaaacaaccgctggatggagcgggaccccgtcctggtcacttgctatgccttgatggcgctggaaatgatccaccccaagctttgattcacccgcggcaggcaacctggggctctgcagttaatctttgatcaagtcctggccctgcgcatccttcatcttgccggtggcaatcatgatgatgtccaccacataccagatgaaaaagccaccgcaggtgatgagcttcaagatgcccaagccggtgtaacccagataaaagcggtccacccccaagccacccacgaagatggacaacaagagagccaccaaccatttcttaccgccggttgttcccgccgaaggcgccgattgaggaggggttgcttcgccgttgctcataacactttgggcttaggttgagggtgttgtttgggacatttccatgcctggcccaagccaagcattgcctgaatgttggctacaatgagctccccgtcaactaaaaacccaaaccccgccacatccccttggtcagagggagatgatgaacaaggtgcttgcggtggcagttcagccgttgaactgcctcaatgcaaccgtggcattgtggccgccgaagccgaaggagttgttcagaatggcccgaatacgcatctctctggcggtgttgggcacgtagtccaaatcacactccggatcgggtttttccaggttgatggttggaggcgacacttggttttgcatcgccaaaatactgatgaccaactcggcggcaccagcagcacccagcatgtggccggtagcccctttggttgagttgaccgcaatcttccgagcatgttcaccgaaaaccgttttaatagcctgagtttcggcgacatctcctgccggggtggccgtcccgtgagcgttaatataatcaatatcctccggccgcaatccagccgagcgcagcgccatggccatgcaacgggcggccccttccccgccgggggcgggtgcggtcaagtggttggcgtcggctgtgttgccatatcccaccacctcggcatagatttttgcgccgcgcgccttggcgtgctccaattcctccatcaacaccaccgcagcgccctcgcccatcacaaaaccatcgcgctccgcgtcaaagggccgggaagccttcttgggctcgtggttgcgcgtgctcatggcgcgcatggagcaaaagccgctgatgcccagcgggacgatggtggcctcgctgccgccggcaaaaatcgccttggcatcgcccatcttgatggtccgccaagcctcgccaacggcatgggtggaagtggcgcaagccgagcaggtggccacgttggggccccgcagcttgtagtacatcgagaacatgccggaagccatgttcaagatgagcatgggaatcatgaacggggacacgcgccccggcccgcgggagagaaggaccttgtgctgctcggcggtggtgtgcagacccccaatacccgatccaatgaacacgccgatctcatcgcggttcaccttttccaaatccaacccggaatctttcagcgcctgccagccggcataaacgccaaactgcgcaaaacgatccgagcgcttggcctccttcggcgaaggaaaggcgggcgatgcatcgaagttcttcacctcggcggcaatctggcaatcaaactcggccgggtcaaaggcagtgattcggtcaatgccacactgcccggcaatcaagttttgccaaagcgtttgcggatcatgccccaacggggtgaccacgcccatgcctgtgatgacgacgcgtcggtcggaccaactgcttgccataaataaaaagggcagccagggcgattcctgccagccagagctgccccaaagattcccggcaggtattgttacttcttgatgtcttcgatgtacttgaccacgtccccaacggtttgcagtttttcagcttcttcgtcagggatttcgctgccaaattcctcctccaaagccatcaccaactcgacaatgtcgagggagtcggctcccaaatcgtccacgattttggcgtcgttcgtcacttcgtcaggattcacgcccaactgctcgacgatgatttccttgacccgtgtctctataggtttgtctgccatcggttttctccgttcgttgttaaatgtcttttgtctgtatgccagccgcgcccaaaccgtcaagcctgcattttgctttttccggcgcgctggtctgcgctgggttgctttcgccatcccggcgcatccatcactttgccggcgacttgtctaatggggggcggccattctgtccagcggtattttgtgaaaaatttacatcgccaaaccaccatccacggccaacacctggccggtgatgtaccgcgcaccggggctggcgaaaaacagcaccgcctccgccacatcctccggctgcccaagcgtccccagcggcacgtttttgaggatcgcctctttttgctcgggagtgagtttgtcggtcatggccgtctgaataaagcccggcgccaatgcattcaccgtaatacctcgactcgcaaactcgcgcgctgcggatttggtaaagccaatcacccccgccttgcttgccccgtaattgcattgccccgcattgcccatcaggccgatgaccgaggcaatgttgacgatgcggccggagcgttgcttcagaaaactccggcaaaacgcctgggtaaataaaaaggtgcccttgagattgatgtccaacaccgcatcccattcctcctcgctcatgcgcatgagcagggtgtcgcgggtgatgccggcgttgttcaccaaaatgtccaccttgcctgcatcggcgaggatttgttcggcggcagctttgacttcggctgctgaagcgacattggcggcatatccccatgcccgtctccccaaggccttgaccttgtccaccgtttcctgtgtgaattcaagtttgacatccaccacggccacatcggccccggccccggctaatttcaaggcaatggcctggccgatgccgcgtccggctccggtcaccactgccacctggttttccaagagttgcatagcgcccaacatcaagcctcaagccgcctcaaggcacaagcggaaagttgcctcccctacccccctggcccgactcttaaatttttttgaacatccctgcatttttgtttatcaaataccttgaaaggtcagcccgtgttccccctgggggatggaacattatgaccgcgccaagatattcataaaccggttgattcccaccatgcgcacccattccattcattggccacgcccctggggcgtgggacgtttgctcaccatggccgttgcggcgtgtttcctcgcaggagcactcagcctgccactgaccgctcaggaaggtcttttccaggcagaacgcgcgttggaaaacaaacgcaatgcggacccgaattggaagccgaaatacaaggaattcgatcttatcagagtgcccaccaaaaaaggggtcataaataatttttgcctgaattcagacggaaatctggtcgtctgcgtcggcacaagtgacgatggcaccaccaaaggcaacaccgagctggaaatcatcagcccatccggcaaagtcctcaaaacaatccctttacccttcaatccccaagccatttgcaccgacggcaaggacgccatctacgtgggagggggcggacagctttgcaaactcaattccaaaggaaaaattgaaattcagatgccggcacccgccttccagctcgccaagaaagaacaagagacctggaaagttaaacttgccgaggaaatcgaaagacaaagcaaggaactcaaggaagccaatccaggcatgaaggacgccgatattaaaaaaattatggctgaccagcaaaaagccatggaaaaacgacgtggaaacgtgacgggattggcagtggtgggcaaggatttgatggtggccacaccctccccggcggaattcggctacatggtctggcgggtggatgaaaaattggccaatccagtgccagtactgaagcggctcagtggttgttgcggacaaatggacattcgcgggcgcgacggcaaattgtgggtggcccacaacgccaagcatctggtggaatgttacgactcccaaggcaatttgctctccaaatttggaaagcatgacagggtagccgccgatggttttggcggctgctgcgagcccaaaaacctcacctttgcctccaacggtgacattctggccgctgaatccggaccgccggttgtggtcaagcgtttcaccccggaaggcaagtttttgggagtgcttgccaacccgctctataaaagtggttgcgtgcgggcaacggtggccatcagcgccgatgagaaaaagatattcctgctgaatacgggctacaacgcgattcacatctttaccctctgagcgccccatccccaagtcccacgccatgaaaccttggaaggtctttctaacatgggccgccgccttgttgcagctcggcctcctgcaaggggctgaatcccctccgccacccaaattgttgtcgcttttaatcatggacccgctggccaaagaaaatggctgcgcttgtgtggccggcatgggtcaacgtgattacgaggccttggggcgccatctttccaaggccctgaaaatacaagtggatgtgcgatttgccctaaacttctcccaagccgtcggcgcaggattgaggcgtgggccagacatcgtcattggcaaggattcccaagttgaggccgacctccggtcttggaattggcctatgacccgcatggctcgattgaccgacttgcaggggcgaacaaccctgacaggattgttcgttgttcctgcaaccgacacggcacgcaatcttcgggacttgaatgagcgtccttttttgttggggaaaccggatgaaaccgaaaaacacggcgccgccatggcagccctgcgcgcggcaggcgtggaacccggacatgtactgaaggtcttgcccgactgcacagccaccgccaacgaacttttgtcccatcaagatacccctgcaccggcaggcgtgatctccagttatgcactgccgcttttggagggctgcggcaacattcccccaaaatccctgcgggtggtggggcgaaccgcaccagtcccctttatcaccgtgtttgtgtaccgggatttggacaaggccctggtcgagggcattcgcaaagcattgatggaggtggctcaaaaccggactttatgccggcttttggaatctcgcgatggttttgttccttttgaagacccgcaacaggcgctcaaggactggccaggatggggcggcgcaatgcgctgggggcagacgagtcggctgccgaaccgtctgccccaacccctgccggtatcgtgggagcgtcccctgaatcaccccggactgggaggggtggcagccgccaaaggctatgtggtggtgagtgaccgtgaccccttggataaggctgacctctggcgctgttatgaagccgcctcaggcaagttgctctggacccttcaacagcccactcggggaccccacatggattacggcaattctccacgttccaccccgctcatcgttcaagggcgggtgtttatgctgggagcatacggcgacctgttggccgcggacttggccaccggcaaaatcctctggaaacgccacctcgtcaaagacttcaagggacgtttgccaaagtggggctttgccaactcccccctgttttttgaaaaccggttgtgggttttgccgggcggcgagaagcacttcattgcggccttggaccctgccaccgggaagacgatatgcaccggcccgggcacagccccgcctgcctacgcggccttgatggccggggaatgggatggccaaagcatggtcatcgcctacgacgaaaatggattgggcggatggagcgctcaaaccgccaaacccttgtggcgggtgacggcggctgaagagggtgatttcaatgtgcccacacccatgttcatggccgatggtctgctgctggcgacggaaaacaacggttgccgtctgcatcgttttgacggacgcggggcgctccttccggagcccgtggccgcccacaaggagttgcgccctcaaacagctacaccacttgtgatcggaaacttcgttttatgtaacggcagcgggctcatctgccttaaattcgattttagaaaacagcaattgcttgaactgtggaaaaaggaggatgacgcttgggccgaacatgtgtcctgtatgaccgatggcacactggctttgattttggggtatcacggcgatttgttgctgttggatgtgacttcggaggactacaaagaactttcccgcctgcgtttgtttgaagatgagcaggagatttacgcccatccggcgttggcggatggcaagtatttcgtacgcggggccaatgttttaagatgctacgagctgattcgctgacggctcacgtcgtaagagtcggcggggagccggcttgaaggattcgctccgcggcctgccttacggcggcagccaattccggcggttccaccacacggcaatgcccgccccaactcaacacccaacgctgaacctccgagagacctgagaggcggaatgtcacctccacgcccccatcgggcaaatcgcgcaattgctggctttcgtgccatttcttttcgcgaaggtagtctgcagcgaccggcgtaaaatgtagtaccacacggtaatcgcctgtcccctgcacgacgccaaagctgccgcgcagccagttttcaatcgaaaacttttttgggcgggtgaacgtttgtcctgtgggcacggcagactggatgcgcatggggacaaacgttcgaggggcctgccgcaggtggtcgtaagcgaagaggtaccattcgccgttgatattggccaggtgataagggtccacaacccgctcctccaccggcccgcctcccggtttgcggtattggatacgaagttgacggcgatgacttaccgcatcggccagacagcgaaaaatgtccaaatcaagcatcggttccgcacgggtgcggaaggaaatgctttgctgcaggtcctgaagggcaaccgtgatggtctcaggcagtcccgcagcgattttctcaatcgcggccagaaggggtttttcaaagggggtcccccgatattgcccaagggccttttccgcaagcaccaaagcaaacaactccccctcactgatgcttacggcgggcaaatccgtaacgggggctgtgtagtaataaccgttgcggcggggatcgaactcaagcggtaactccaaccggtcccgcatgaattccaaatcacggtgaatcgtcttggggttgacctcaagctccgcagccaactgacgtgcattggggtaacgcccgcgggcaatttcatgatgaatgcggcgaacccgatccaatggcgggcgggaatgttgcaccggccgggcggatgctttggctggggtgcgcttgcccatgaacgcagggcggccaatcttccgggatttcagccgcggtccagtttggccagcaactcgtcgttggttttgtgctttttgcaagcggcgatgagcgtctccatcgcctccacagggttgaggtccaccatcatgcgccgcaacttgcgcaccgactcaatttgatgcttcgggaagagtttttcctctttgcgtgtgccgctgcggggaatgtcaatggccgggaacagacggcggtcgctgagcttgcgatccagcacgagctccatgttgccggtgcctttgaattcctggaaaatcaactcgtccatccggctgccggtttccaccagcgccgtcgcaataatcgtcaaggaaccgccttcttcaattttacgcgccgcggcaaacatcttgcgcgggatttccagagcgcgtgcatctacaccaccagtcatggtgcggccggacccgccgtgcacgctgttgtaagcgcgtgccacgcgggtgatggaatcgagcagcacaaacacatcctttttcgcctccaccatgcggcggcagcgctcaatcatgaatcgcgaaagccgcacatgggtttccaaatcctggtcgttgctggaggccaccacctcggccttgaccgagcgttggaaatcggtgacttcctcggggcgctcgtcaatcaacagcaccaacacatgcacttccggatggttggtggtgatggcgttggcgatttgtttcagaatggtggtcttgccggtgcgcggcggggccacaatcaagccgcgggtccctttgccgatgggcgtgaccaaatctatgatgcgcgtttcaatcaagtcgggcgtggtctcgagcttgaacttctccaccgggtcaatggtggtcaagttctcaaagcgcaaggtcttgacgtattcctgaaaaggcatgccattgaccttgtccacagcgcgcagttgcgggctggtgccgcggtgcggcggttggagggtcccctccacaaaggctccctcccgaagaaaactgcgcttgatgctgtccggcgtgacgaaaatgtccgtcggcttgggcgcaaaaaagttgtctggagaccgcaggaaaccaaatcccttctccgatatttccaaataccctgaaccgtagtcaggatagtgggccgaattggcatgtgaacccataaggatattactaactatctagctttgtgttgtgtcatcaggccattgaacttccagaaacaaccccgaaatgttttgaattttgaactttcgggaaagccgctgcactccaatgaacaatctaactgttgctgtgctgacgcggccgcgcctgtgacgtgataaatgtaatgtatttcaagctctgcgcaacaaatatttttgtaagattttttcccatgaaacgccttgaggaggccaaatatggcaaaaaagcacaaaatgcccgacttctaaacgtctgcctctcaagaccttgcggcggtcaaaagaagaaaaccgcctgtccgaaaacgctttccgccagattaaaagtcggcgttcttgggagtacgcgcaaacggaatgacgtcgcggatgttggccacaccggttaaaaacataatcaaccgctcaaagcccaacccaaatcctgcgtgtgggacagttccgtatttgcgcaaatccgcataccaccaatagtcctgggggttgagtttatggaaggccatctgttcctgcaaccggtcaggacgctcctcgcgctgggcgccaccaataacctccccaatgcccggcaccagcacgtccatggccgtgacagtgcggccatcgtcattcaggcgcatgtagaacggcttgatctcccgcggatagttgaagaccgtcaccgggcatttgaagtgttcctcggtcaaataccgctcatgctccgattgcaggttgacgccataagaaaccggaaactcaaacgccttgccagacgcctgcagaatttgaatggcctcagaatacggaatacgctgaaaggggcgctccaccacaaactgcaatcgggacatgacttctttgtccacgaatttattgaagaaagccaaatcttcggcgcaatgttcgagcatgtgtcgcgccatggctttgatgaattcctccgctaaatccatgtcccctgccaaatcacaaaaggccatttccggctcaatcatccaaaattccgccgcgtgccgggcggtgttggaattttcggcacgaaaagtggggccgaaggtgtaaatgcgcgaaagcgcgcaggccagagcttcgccttccagttgcccgctgacggtgagataggccggccgcccaaagaaatcgtcctcgggtttttctccgggctgccctttgagcgtggtcacgcgaaacatttcgcctgccccttcacaatcgcttgtggtgatgatgggcgtgtggacataaacaaagtcgcgctcttggaagaattggtgaactgcatgcgccagccggctgcgggtgcggaacaccgcgccaaacaaattcgaacgcggccgcaagtgggcaatggtgcgcaaaaactcaagggtgtggcccttcttttggaggggatacgtggcatcagccgggccgatgagctccacccgccgcgcgtgaacttcccatttttgtccggctgccggtgatggcaccaaggccccttggatgaccaccgaggcgccggtgaggatgtgggtgatcggggcgttgcacggggtgccctcattaacgaccacctgcaggttggacaaacaggaaccgtcgttgatttcaaaaaatgaaaagcccttggcatcgcgccgtgtgcgcacccagccccggacggtgacgtcttcaaccggggcgccggactgaagcaaatgtttaatcatcggttgcatgcgccaaagcataaacgaggcaaagtgttgcggacaaaagaaaagtggtgttgcgaaaaagcaacagcttcatcagggcaacaaaaaacccgcgccgaagtccggcgcgggtgtcgtgtgaacttttgtgcggcccgcccgcctcaagaggcggctccagcggtggcctgcggggcggcagccttttcctcggtggccttgggggcctccggttgagcagcaggcagctccacccattcgaggatggcttgttgagctgcgtcaccacggcgttggccgagcttgacgatgcgggtataaccgccgggccggcttttttgagccggtgcaatttggttaaagaggattttgacagcgtcctcctgatggaggcgtgcagcagccaggcggcgggcatggatggtgccgcgcttgccaagggtgaccatcttctcagcgaggctgcgcgcggcgcgcgccttggcgagggtggtgatcacacgtttgtgaaggatcaggctgcaaaccaagttggccagcatggcattgcgatgctggaactggcggccgagcttggcagttcgttttaaatggcgcataaggcatcagtcgttggcaaggaggttcttgatgtcgtcgcgggccgaagaggcgccggcggcaggggcggcttcaatcaagtccgggtcaaagtgcatgcccagagtcaggcccaaagccgcgagcttgtccttgatttcgttcagggacttcttgccgaaattgcggtatttcaacatttcggattcggtcttcatggccaactggcccacggtggtgatgttggcgttgttgaggcagttggcggcgcgcacgctcagctcgatttcattgacgctcatgttgagcagtttcttgagcttggcgcgctcatcatcctgccggtccacctgttcttcaaactccacggcgttcttgtcgtagccgacaaaaacatccagatgccgctggagaatggctgaagcctgggtgagggcgtcatcgggggagatgcgtccatcagtccagatttcaagaatcaagcggtcgtagtcggtgcgttggccgacgcgggccgcttcgacggcgtacttcacccgtgtaaccggcgaaaagattgagtcaatggggatgaccccgatggcctggtcaggtttcttgttttcgtcgcccgggcagaaaccacggccgaccttgacgaccagttccatctcaaatttgcgcttcttgtcgagggtgcagattttctgcttgggattcaccagctcaaggttttggttgagctggatgtcctcggccagaacgtccccttccttgttgacggagaggtagagcacctgttcctcacggctgtgagccttgaagcggattttcttgaggttcaggacgatgtcggtcacatcctcgacaactccttcaacggtggcaaattcgtgcatggcaccctcaatgcgcacgctggtgatggcagctccctccagggacgagagcagcacccggcgcagcgagttgccgatggtgtggccgtaaccggtttcaaacggctcggcaatgaatttggcgtaggtttcggtggcggtggcttcttctttcaccaaccgcttgggcatttcgaaacggcctagacgcactggcatagttttttcctttccggcaaatttaacctggcagcatccggagtcttattcccgcaatccggacgcgcccgtatatttgccctgcccccgctaaggggcgagttatggtttagcgggaataaaattcgacaacagcctgttcattcgcgatgggctgaatttcatcccgtgtggggatgcgcaccacgcggcccttgaattggtccttttcgagcaccaaccaatcaggcaccgcccggctggtggacatttccaaattccgggtggccatctggcggctgacgttgtgattgcggacttcgatctcgtcgttgaccttcaaggtgtaagacggaatgttcactttgcgtccgttgacgcgaatgtgcccgtgggtcaccatctgccgggcagccggacgcgtgggcgcaaagcccaggtgataaaccacgttgtccagccgggtctccagcaattgcagcatttgctcgcccgtgacaccgcggcgtcgcagcgccttttcatagactccgcggaattggcgctcctgcaaaccatagtagtaacggagcttttgcttctcaatcagacccaaagcgtattcggtgaccttgcggcgcgctttgggaccgtgaacacccggaccgtattgacggcgctccaaatacttggaggggccgaagatgggcgttttgaaacgtcggctgatgcgaacgcgtggacctgtatagtgtgccatggacttcgagagttaaaaagggttgcggttagacacggcgcttcttgcgcggacggcatccattgtgcggaaccggtgtcacgtctttgatggcggtaatttccagaccaatggcctgcaaggcgcggatggccgcttcacggccggagcccggccccttgacgtggacttccacttctttcatgccgtgcgacatggcttgacgagcggcttcctgcgccacctgctgggcggcgaaggcagtgcttttgcgcgagcccttgaaacccacgcgcccggcggaagcccacccgatgacgttgccgtgcatgtcggtaatgctgacctgggtattgttgaaagtggccaggatgtgggcgatgccgctgacaatgttcttggcacccttggccttgatgattttcttggcggcaagatcatcgcccaacagctcggctgcagtaggggcggcggcggcagcgggcggcacttcggcagccggggcctccgcgggtttggcttcggcggcctttgcttcggcggctttaccttcagccgcggctttcttggacgccttggccggtttttcggcggccggagcagcagcgtccgctttggtttccttcggagcaggagcgggttttttggtctcgtcagacataggagttcaagctgttacaattaatggatgcccgccttggcgttcggattgcgcacgacaccgacggtcttgcgcgggcctttgcgggtgcgggcgttggtctgggtgcgttgtccgcgcacgggcaggttgcgcatgtggcggatgccgcggtaacacttgatggcctgaagccgctttaggttcagaccaatttcgcggcgcaggtcgccttcgatgacgtatttgccatcttggatggcatgaacaatctgcgaaagctgttgctcggaaaggtccttggcgcgggtgcccaaggggatgttggcgcggcggcaaatctccagcgccgtggtgggaccaatgccgtagatgtaacgaagggcgatttcaatgcgtttctcgccgggaatttcaacgccgatgatacgtgccataggtttttcggattaaaagtctagccttgccgctgcttgtggcgcgggttggtgcaaatgacgcgaatcacgcctttgcgtttgatgatcttgcaattctcgcacagttttttcactgatgcccgtattttcataacttcactccaaatgcaactgcactcaagcggccttggccggccccaccaaacgacctttgctcaggtccaggggcgacagctcggccaccacgcgttggccaacggcgaactgctcgccggccacggcccgccgggcaggcacaaaacccaggaactggtgtccattggccagttccacccggtagagccgctctttgagcaccgcaatcacgacgccctcagcgcgaaggatgtttgattcgtgcacgtcagaatttccggcgcgccttccgtcaccaggacggtgtgctcaaaatgggcggacagtgaaccatcctcggtcaccactgtccagccatcttttaatcgtttaacgccaggttttccggcgttgaccatcggctcgatggccagcgtcatgccgggccgcaacaacggcgaaacccggcctggctccacaaaattcggcacttggggctcttcgtgcatgtggcgtcccactccgtgcccaacaaattccctcaccacgctgaacccatgactttcgacatgctgctgaacagcacgcgaaatgtccttcacccggttgcccgcgacagcggctgcaatgccccgctgaagggccgtttcggtggcctccaagagccgcaatgccaccgggtcggtgcaaccgcccgccaccacggtccgagcgttgtcacccacaaacccatcataataaacccccacatcaatactgacaaggtccccgaaagctatccggcgcggcccggccagcccgtgaaccacctgctcattgatggagatgcaagtgtggcaggggtatttcaaatgccccacccgataccccaaaaaagcgctccgggcattgtaatgtttaattcgctccgctgcgtaatcgtccagctcgcgtgtagtcaccccgggcgccacagccgcggccacttcatccaaaacggcacgcgccacgcggcatgcagcccgcatggattccaaatcgcgtcctgttttgatgatgatcatgcccaaagtgcgatgccatccgcagtgcgccgcgctcagatgcgcccgcgcaggcggcctttcttcaagaacccgtcgtaatgccgcatcaagagatgggtctccatctggcgcatggtgtccagcaatacgcccaccgtgatgagcaaactggtgccgccaaaaaattgacccaccccgtagggcacattcatcaccttgtacaacaaatcaggaatgatggcaatgatggtcaggaaaaccgcgcccgccagagtaacccggctcatggcgtgatgcaaaaagtcgctggtcgcctgaccgggccgcacaccgggaatgtagccaccgtatttcttcaagtcatcggcaatctggatttcattgaattgggtggccacccaaaagtaggagaagaacatgatcatcattccgtagatgatgaagtatgcaggctccccgtggttgagcatggcgcccatggtacggaagatgcccttgagccccggccccacgccgggcaggttgcccaagctctccagaatcttctgcgggaacatcaggatcgcctgggcaaagatgatgggcatgacgcccgcataattcacacgcaacggcatgaaggaagtaccgccctgatagaccttgcgccctacggcccgctgggcgtattgcacagccactttgcgctgggcctgggtgatggcaatggtgccagccaccaccgcggcgagcatgatgagcaaaaacacaccgtggaagatggtgaatttctcggcaacagcacccccggcggaaaacatatcgaagagggaatgcattgcctgtggcacacgagccaaaatgccaatggtgatgatgagtgaaacaccattaccaatgccgcgctcgctgatttgctcacccagccacatcaaaagcagggtgccggtggtgagaatgaccgtggtttgtatgcggtaaaaccagcccggattctgcaccaattcctcagttatgccgggaaacatttcacgcggattttcccagacgtgggacataatcatgccccagccgaaacaaaggagcacggtcagataacgtccgtattgaataatcttgggacgcccgccttcctcccgggccagtttgctcaagcgcggaatgaccgcggtgagcaactgaatgatgatggtggcgctgatgtagggcatgatgcccaacgagccgatggcgcaacgctccatggcaccgccggtgaacatgttgtacatgcccatcaggccgccgccggcgctgttcttcgcagccaaatcctggaagtattgaaacagcaccgtgccatcgagtccggggatggggatgaccgccaccaaccggcacacagccagaatgaacagggtgaacaggatgcgggacttcagctccggaatcctgaaggcattggcgaaggtgttggcgattttggcgagcataacccctgattcccctcccgtcaggctttggctgcggcggctggtgtttcacacacaccgccaagagcctcaatcttggcccgggcggacgcactaaacgcatgcgccaccacggtcagtttcttcttgagttcaccatttcccaaaatcttgatgccgtcggcctttcccttggccaggccggcctggcgcaaaagggcttcatccacccgcgcgccgtcatcaaagcgattcaaggcctccaaattcaccggcaggtaacgggtggcaaagcgggcgttgttgaagccgcgctttggaatgcgccggatgagcggcatctggccgccttcaaaggtgggccggatggagcttccggaacgggccgtctggcctttgccaccgcggccgctggtcttgccatggccgctggattcgcccgcaccgaggcgtttacgacggtgcttggcgccgggtcggggtttcaaatcatgtaaacgcatacgctcgtttgagaaaaaatttcagacgtttagacggtagccgcagtttcagacgccgccggtgccggtgcagcttcggccggggtgcgcagcggcaggccgcggctccggtagatttgttcgcgcaaacgcaaccgcaacaaggcgttcagcgttgccttgaccacgttggcggcgttcttgctgcccagggacttggtcaggacatcacgcacaccggcggattccaatacggcacgcacggttttgcccgcgatgatgccggtacccggtgaggccgggcgcaatagaatgcgcgcgccatcgtattcggagaaaacttcatgcggaatggtggcgtccttcaagcagaccttgagcatgttgcgacgggcctgctcgccgcctttgcggatggcgtcggccacttcaccggccttgcccaagcccacgcccaccatgcccttgcggtcgcccaccaccacaagcgcggaaaagctgaagcggcggccacctttgaccaccttggcggagcggttgatgaacaccaccttctccatcaattcctcgccggtctggccttcggtaatttcagcagcctcggcgttttgacggccacgcccgcggcggccgcgcccgccaccgcgtgattcaccggcctcggcgccacgcacctcggcggcggcagggatctgctcctcagaaagagggtccaggttgtctttgttgggattttcagccacagtaacagctcctgttcaataggggttaaaatttcaagcccgcctcacgtgccgcatccgccaaggccttcactttgccatggtaacggttgccgccgcggtcgaagacaacggtggtaatgcccttcgccagggccacttcggcggcctttcgtccaataatggcggcagaagccacattcgccttcagggtgccgcgttggggcaggtctttcgcacgggtggaagccgacgccaaggtaactccgcggacgtcgtccacaaattgcacgtaaatgtgtttgcctgtaaaacagacgctcatgcggggccgctgcgcggtgccgctgattttcttgcgcacccgccagtgccggagggttgccagacgatgtttgacttcggttctcatgttgttcacgggccacggatttggccgtagccccattagttaaaaatggattactggacggtcttgccttccttgcggatgatgcgttcgcccacgtaacgaacccctttgcccttgtaaggctcgggcggataaaaggcgcgcaaatcagccgccacctgtcccaccttttggcggtcaggtccttccacagtgatgcgcgtgttttcttccacggtaaccttcacctggtcgggaagatcataattgatgggatgtgaatagcccaggttcaaagtaaccgttttgcccgcaacggaagccttgaaacccacgccatggatttccagtttcttgacaaagccttcggtgacaccgcgcaccatgttgttcaagatggcgcggctgaggccgtggagcgctttggcttgcgcatcttctccttcacgtttgacgaccaactggcctttttcaaccgccgcggcggtgcgctggggcagttcatactgcaacttgcccttgggtccctccaccaaaacggtgcggcccttgacgtccaccttgaccttgggcgggatgacgatgggttgtttgccaattcgagacataaacagcgagagttaaaggttaccacacataacagaggacctcgccgcccaggcggttcttgcgcgcctcggcgtcggtcatcagtccgcgcgaggtggaaaggacggcaatgcccaatccgccacggacgcgcggagcggaaacggcggtggtgtaaatgcggcggccgggcttgctcacccgttgcaatccttccaacacgggccggcggccttcgtatttgagatggagcttgatggtcttgaccgtctgaccggcaacggtgaaatcacgaatataaccttcgcgcttgaggatggccgccaggctttccttgagccgggaatacggcacttccacgtccggcagcccggcgtgggaggcgttgcggatgcgcgtcaacatgtcggcaatgggatcgctcataggacaaaattaccagctagctttggtgactcccggaatcaacccctgcagggccagttcccggaaggtgagacgggagcagttgaatttgcggaaatagccgtggcgccggccgctgatggggcagcggttgaccactcgcacgggactggaattgcggggaagcttggccagcccggcatagtcgtgcttggctttaagctcggcgcgcttggcggcgtatttcttgaccaacgccatgcgtttcttgttgcgttcggaccaggattttttggccatatcagttctaacaaaaaaggttaacggttttccgcaaaggggaagcccatgagcttgagcaaatcgtaggcttcctcattggtacgggcggtggtgacgatggtgatgtccatgccctgggtgcgcttgatcttgtccaaatccacttccggaaagatggtctgttcggcaatcccaagggagtagttgccccggccgtcaaacgagcgcggggaaagaccgcggaagtcgcggatgcgcggcagcgccgtggcaaccaggcggtcaaaaaactcgtacatgacctcgcggcgcagggtgacatggcagcccacgggatgcccgacgcgcagtttgaagttggcgatgctcttgcgggacttgctgatgaccggtttgcgtccggtaatcaaagcgaggtccttggcggcatcttcgacggcactcttctccaactgggcgctcacacccatgttgatgacgattttttcgaggcggggcacctcatgccggttcttgtactggcgcttggcaatgagggccggcaccacttcgttttcgtatttttcctgcaatctcggtttcatggctcggttggcggtgaaaaggatggcggcctggttcaagattcagcctgcgccgccggagctttgccggcgtgccgggcatcgtaccggtcggcccgcatcacattggagatgtgaatgggcccctcacgctcaatgatggcgccctgagggtgaagctggctgcggcctttcttgatggttttcttgagcatgcggacgccctcgacgagcacgcgttgcttggcgggctgcacctcgatgatgcgaccgcggcggcccttgtgggcgccgctgatgaccacgacttcgtcgccttttttaacgtgcaatttgggcataattcagactacctccggagccaggctgatgattttggtaaatttgaggtcgcgcaactcccgcgccaccgggccaaagatgcgggtcccaatgggctcgcgctccttgttgatgatgacgacggcgttgctgtcgaaacgcacataggaaccgtcgctgcggcggatgggccggcgggtgcgcaccacgacggcatcggccacctggccctttttgatggtgccgtccggagcagcttccttgatgtgcaccttgatgacatcgcccacgcgggcatacatctggttccggccgagcacaccaatggcggcggcgcgtttggcgccggtgttgtcggccacgtcgagaatggaacggacttgcagcataggtcaggagagtttcaggcggccgcgccggcggcgcgttcaatgatttccaccagccgccagcgtttgaggcggctcagcggacgggtttcctcaatgcgcacaacatcgccgggcttggcctcggacttttcgtcgtgcgcgtaatactttttgtaactccgcacaatcttcttgaagcgggggtgtggaaaacggcgctccacccggacgacgatggtcttggccatcttgttggaaaccacctcgccggtgcgctctttgcgacggcgggcggtgacgggggcggaaggggttgcagtggtgtcagccatagtctaaaaaatcatgcctggtttttcttgcgagcggtgatggcggtctccacgcgcgcgatgtcgcgccgcagcaaacgcatgcgcaccggattctccagccggctgccggccttctggagccggaggttgaagagttcctgtcgcaggtcgcggctcttggcctgcagctccaccagggtcaaatctttcaattcactcattttcatggcatcaatgacggtggcgggagatgaattttgtgtgaatgggcagtttggtggcggccaggcgcatggcttcgcgagccacgatttcaggcacaccatcaacttcgaaaagaacacgggcaggtttgatgacggccacccacgattccagcgggcccttgcctttgcccattcgggtttccaacggtttcttggtgtaggacttgtcagggaaaatgcgaatccacagtttgccgcgccgtttcatgaaacggctgatggccacgcgggcggcttccagttgtttggtgtccagccagcagcgctccaaggcctgcaggccgtactcaccaaacgcgacggtgttgccgcgggtggccaggccggcgcggctgccgcggtgcatcttccggtatttaacgcgtgcaggttgtaaaggcataaaacagtctcaggttaacgggcggcggcccggtcatttttggcggtttcaggcttgttttcgccgcggcaaatccagcatttgattcccaacttgccgtaaagggtgtgagcctcggcaaaaccgtagtcaatgttggcgcgcagagtgtgcagtggcacgcggccttccagatattgttccacacgcgccaattcggcgccacccaaacggcccgagcaacggatgcggatgccctcggccccctgttccatggcggtctgcacagcccgtttcatcgcgcgccggaaagagacccggcgctccagttgcagggccacgccctcggccaccagttgggcgtcgaggtccgggcttttgacttcctgaatctcaacgtaaatttccttgccggtctttttgctcagctcttctttgagcttgtcaatttcagtgcccttgcgcccgatgaccacaccgggccgggcggtgaacaaggtgatgcggcagcggttgccggcgcgctcaatttgaatcttgggcaccgcggcatccttgagtttctccttcaagtaccggcgcaattggaagtcttccaccagcagccgcccgaagtccttcttctcggcataccacttggagcgccagtcacggttgacggcgacacgcagaccgatgggattggttttttgacccataatgattagttggctccgtcggaaagtacgattttaatgtggctgttgcgtttgatgatggggccggccatgccgcgcgccttgggggtgtagcgcttgagacggctggcggtcagggcgacggcctgggccaccacgagtttggcggcctgcaattgatggttgttctccgcattggcaatcgcggaatcaagcgtccgcgccaccagccgggccgacttgcgcggcaccacggccagaacggcacgggcttccagggcggacaatccctggatttgacgggtgacttcccgcactttttgcggggacatccggacattgcgggtaatcgcctgtacttgcatagcttacttggcctcggctttggcggtgtgagcgccgtgtttcttgaagatgcgcgtgggagaaaattctcccagccggtgccccaccatgttttccgttacaaaaaccgggtggaacaccttgccgttatgcacgttgaaggtcaagcccacaaaatcgggcgtgatcatggaacggcgcgaccaagtcttgatcggggctttggacttggactccttggccgccaggatcttcttcatcaacgaggggtccacaaacggaccttttttaatcgatcgtcccataggctttcagatcaaagcagtttatttgcgtttcatgggccggccatcgcgccgaaccacaataaagcggttggaaggtttgtgtttgttccgtgtgcggtagcccttggccagcaatccccaaggcgatgtcaattgttgccagccgccaccacccttgctctttccggcgccaccgccgttggggtgatccaccgggttgcgcgccacaccgcggttgaccggccgatacccgaaataccgcgtgcgcccagccttgccccaaacaatgttttcatgatcggcattgcccacctcgccaatggtcgcatagcagttttcgtgaacgcgccggatttcaccggacggcaaccgcaaggtggcatagccttgatcgcgggacatcaaggtggcggagctgcccgccgagcgcaccatctgcgccccacgaccgggcaccatctcaatgttatggatggccatgccgatgggaatgtttttgagcggcaaatgattgcccacttccaccggagcctcaggcccgctggaaaccttggcacccaccttgagatccttgggcgccaaaatgtaagacttggcaccatccggatacttgatcagcgcgatgcgggcggagcggcaaggatcgtattcgatggcctccacagtggccacctggccatgacgccggcgcttgaaatccaccagacgaattttttgcttgtggccgccgccaatgccgcgtgcggtgacgcgcccgtagcagttgcgcccgccagtctttttgcgggtcaccaccaggctcttctccggctccaccttggtgatctcgctgaagtcggccaccgtgatgtagcggcgcgacggcgtcaaaggtctaaatgttttaacaggcataaggcaaatgtaggttaggtgaggttgatgcggtcgccttccttcaacgtgacaatggccttcttccaatcactggtcatgccggcctggggtgtgcgttgacggcgcaatttgccgcgcatgttcagcgtgttgacggcaaccaccttgaccttgaacaactcctccaccgctttgcgaatctgggctttgttggcccgggggtccgccaccacggtgtattggttgtgcttctcggcctgcagggtgcccttctcggtcacgcggacggtcttgatgatttcaaaggcattcatggtgtcaggattggctgaggcgctgtcccacctgcgccagagcagcgcgtgtaaaaacgattttggccggtttgagggcctggtaacaattcaagtctgcgccggtgaccagttccacatacggcaggttgcgggcagccaggcgaaggttctggtcaatggtgtcggtcaccaccagcacggtctggccgggagccagagtgtccagcaaccgcaccagctcgcgcgtcttgggctgggccagtttcaattcttccaccacgatgacttcactggccttgatgcgctcgctcaaagccttgcgcagggccaggcgccgggtggagtcattgacttttttgctgaagtcgcgtggcttgggaccaaagaccacaccaccaccacgccacaagggcgactgaaacgaaccggcgcgggcgcggccagtgcctttttggcgccagggtttcttgccggtgccggccacttcacccatggtcttggtgcaggcagtgccggagcggcgggcggccaggtgggccaccaccacatcgtgcacagcctgcgtgcccttgccgttttcaataatcgggaaagggacttccacttcgccctgcggcgaaccttgcaaatcttgtacggtgagcttcatgacgggtctcctcacttcttggcggccttggctttaccgcccttggccatggccttgtgtttctcgatgcgctcctggcgggccttctccaacacgcgggagcgcttcttggactcgcgaatgatgacgtagtccccctcggccccgggcatcgagcccttgatgagcaaaagattttcagcttcgcgcacctggatgatttgcaggttttgcacagtgcgccgcacctgtcccatgtggccgggcatcttcatgccgcggttaacggtgccggggaacaaacggcagccaatggcgccgctccgacggtgccagcccttggcgccgtggctcatgtcgcccccgcgaaaatgatgccgcttgaccacgccctcaaaaccacggcctttggtcacgccgatggcatccacgtagtcaccggcccggaagatgttcactcccaaggtgtcgcccggtttgacctccagttcaaagtcgcgaaattcgcggatgatccgaacgggcgagccgttgtgctttttgacgtggccctgcagcggcttggtgaggcgggactccttctgctcgccaaagcccagctgcacggccttgtagccgtcgcgttcgtgggtcttgcattgcagcacgcggttggggccggcctgcacaatggtcaccggcacgacgacaccgttggcgtcgtaaacgcgggcgtgccccagttttttgccaagcaaaccaatcatagagacttagattttaatggtgatgtcaacccccgccgggagggtgagttttttgagctcgtccacggtcttggcggtcggttcaatgatgtcaatcaaccgcttgtgggtgcgttgttcaaaggtttcctgggacttcttgtcggcatgcggcgagcgcagcaccgtgaaccgctcgatgcgggtgggcagaggaaccggcccggccacgcgggcgccggtgcgcttcaccgtttcgacaatttcgtgcgccgaggagtccacgatccgataatcgtagcctttgaggcgaatccgtatgcgttgtccaggcatataaagaacaagttaagagtttctgttttacgtccgggctgcaggcttgtttttggcctgatccaaaagttgagcggcaatgctgctcggcacctgctcgaaagtgagcggttccatcgagtaggaggcgcggcccttggaaaggctccgcaccgccgtggcatagccgaacatctccgccagcggcacgcgggccgtcaagacggtggccccgttgcgcacttcgatgtgctccacgtgaccgcggcggcggttgatgtcacctaaaatatcaccctgatactcgtcgggggtggtcacctcgactttcatcacgggctccaaaagaatgggattggccttccggaaagcctctttgagcgcaaagatgcccgccatcttgaacgccaactcgctcgagtccacttcgtggaaggtgccgtccacaatcgccaccttgatgtcaataatctggtaaccggcataaacaccggtgcggacggcttcctcaatgccgctgataaccgccggaatgtattccttgggaatggcgccaccaacaatcttgctctcgatttccacacccttgccgcgctcattcggctcgatgtggatgatggcgtggccatattggccgcgcccgcctgattgccggatgaatttgccctcgccctcggccttggtggtgatggtttcccggtaggcaatctgcggcgccccggcattggcctgcacattgaactcccgataaaggcggtcccgaatgatttccaggtgcagctcgcccatgccggcgatgatgagctgaccggtctcttgattcgtgaaaacccggaaagtgggatcttcctcggccaaccgttgcagcccctcggtcaatttgtcgcgatcgcccttggtcttgggctctatggccatgctgatgaccggttcggggaacgtgggcggctccagcagcacactgaaatcttcgtcgcacaacgtgtcgccggtggtgatgttgcgcaggcccaccagcgccgcaatgtcgccggagaaaacctgctccacgtccaggcgcttgtcggcctgaatcatcatcaaccggttgacgcgctcacggcggcgtgtgcgaggattgtaaatgatgtcgcctttcttcaacgtgccgctgtacacgcggaagaacaccagcttacccgcgtaggcatcggtccacagcttgaatgccagcgcgcaaaactgcgcgttgtcatccgccgccaccatcaatggagtgtggtcgtcgggattctcaccttgagcgggcggcacatccagcggactgggcagataatccacaatggcatccaccaagggttgcacgccgcgcttgcggaatgcgctgccgcagagcaccggcaccagctccaaattgcaggtcagtcgccggatggcagctttcagggtcagagcgtcaatcggtttttcctcgatgaccagctcggcaatggtgtcgtccttgttgctgacggcgtcaatcaattcagccagggcggcggcagcacgctcgcgcagttcagccgggatgtcggtgatggtgaagcggacacccagatcatcctcaggatcgtaaatgatggccttttgattgacgacatcaatgacgccccgcagatggtcctccttgccgatgggcagcacgaccgggtaggcgtaagcgccgagcttgcggcggaggtcgttcagcgcgttttcaaaattcgcgccggtccggtccatcttgttgatgaaggcaatccgtggaacgcgatacttgctggcctggcgccagaccgtctcggattgcggttggacaccggccactccacaaaacacagccacggcaccgtcaagcacccgcatcgagcgctccacttcggcggtgaaatccacatggcccggagtgtcaataatgttgatgcggaattcctggccggcaaaaagcttggcgcaaccgtcttccttgggtttccagtaacaggtggtggcggcggaggtgatggtgatgccccgctcccgctcctgctccatccagtccgtcaccgtgttgccatcatccacatcgcccatccggtgaatgaggccggtgtagtaaagaatgcgctcggtggtcgtggtcttgccggcgtcaatgtgcgcggcaataccaatattgcgcgtccgggccagtggataaggccggttcggcgcatcgagcactttcttttccgtcgcagtttccatgcaaaatttttaccgtatcagacaataaaaacgccccgattttcagcgcagccgacggggcgtcccagtgagcaccactaccagcggaaatgggcaaaggccttgttggcctgcgccatccggtggacctcgtcgcgtttacgaatggcgttgccctgcccctggtaggcatccataatctcggcagccagggcctcgcgcatcgccacacccttgcgggcatcggcgaaatccaccatccaacgcatcgccagagaaatctggcggtcgggcggaacttccaagggcacctgataggtggcacccccgacgcggcgggccttggtctcaatgcgcggcttggcattgtccaccgcgcgctggaggacctccagtggattgatttgcgggttcttggccaccaattggtcaaaagccccgtaaacaatccgctgggccgtgctcttcttgccccatttcatcacagtgttgatcaagcgggtgaccaacacgctgtggtacttcggatcttcggccatcggccggcggacagcttgacgtcgtcgagacataattccaaaaatcctcaggatttcgccggagcggctttcggccgcttgaccccgtacttggagcggctcacgcggcgtttctccacgccggccgcatccaaggttccacgcacgatgtgataacgcacgccgggcaaatctttaacacggccaccgcgcaccagcacgatggagtgttcctgcaggttgtggccctcatccgggatgtaggcaatgacctcatacccgttggtgagccgcaccttggccaccttgcgcatcgccgagttcggtttcttcggcgtacgcgtcatgacctgaatgcagacgccgcgccggaacggcgcgccctccagggccggcgccttcgacttggtggcgacctttcggcgtccaaaacggacgagctgattaatcgtcggcattattgtaaattccgtgttgtgctttcttcaacgtccttccccgggagaggaaaggagcgcggatattagcaaagcattttcaggttgcaacaagtatttcaaaaaaatttttttcttgacaacttattctccatttccggagtcctccgcagccgcttccccggccggagcttcgcctgccgcggcagccggctccgccggcgcaggctccagctccaccagcggcttgagctgcacattccgatgcgccggataacccgtgcccgcaggaatgatgtgccccatgatgacgttttccttgaacccgcgcaggtagtccacacgcgaagtcgtggccgcctcggtgagcacccgcgtcgtgtcctggaatgacgccgcgctgaggaaactctccgtttcgagcgaagccttcgtgatgcccagcagcaccggctggcactccgcaggtttgccgcccagtttctccacccgctggttttcctcttcgtgctccagcttgtccacctgctcgccccacaggaagcgggtgtcgcccggctcagtgatgcgcaccttgcgcagcatctggcgcacgatgatttcaatgtgcttgtcgttgatggtgacgccctgcaggcggtacacctcctgcacttcgttgacgagatgctcctgcaactgctgcgcgccgcagacctcgagaatttcgtgcgggtcaatcggtccttccgtcaactgctggccgcgcttgaccatgtcgcccttgaacacgatgacgtgcatgccgatggggatgaggtgctcctccttctggccggtcatcggatcggtgatgatgatgcaccgcttgccgcgcaccgtcggaccaaagtccaccacgccgtcaatcttcgaaatttcggccgcatccttcggccgccgcgcctcaaacaactcggccacacgcggcagaccgccggtgatgtccttggtcttgctcaccttgcgcggggtcttggccagcaacgcgccagcctcgatgatgtcgccttcctccaccacgatgtgcgcgcccgaaggaatgccgtagctggcaatcacatcgcgaccgtcttcatccaaaatgatgatttgcggatgcaaatcttccttgtggtcaatgataaccttggcctgctgcccggtcgcctcgtcctcctcctgcttcatcgtcacaccttcaatgatgtcgtggaagcggatgcggccggctttttccgaaatgatgggcacgttgtacggatcccattgcacgaaggcctcgcccttcttcacccgcccgccatcggggacggaaatgaccgagccgatgaccagtgtgtgactctccagctcgcgcccatcctcgtcctgaacgatgatgctgccgtttttgttcagcacgatatggttgccgtcctgcagcggcacacaacgcagatcattgtacttgatgataccgtcgtgtttggccttgatttgcggctgcttgaacacctgcgacgccgtgccaccgatgtggaacgtacgcatcgtcaattgcgtgcccggctcgccgatggactgcgcggcgatgatgcccacagcctcgcccagcttgaccatctgtccggtcgccaggttccgtccgtagcagcggatgcagacgccgtgtttgctctcgcaagtcagcaccgagcgaatcttcacgcgctcaatgccggcgtcttcaatctggcgcgccttgtcctcgtcaatctcttcattcgcagccacgaggacccgtttgggatcgcgcgggtcgtaaatgtcatcgcacgcgcaacggcccaccaggcggtcacgcagtttgacgatttcatcttcgccctccaggatggcctgcacccagatgccgttgaccgtcccgcagtcttcttctcgcacgatgacatcctgcgccacgtccaccagcttgcgcgtcatgtagccggagtcggccgtcttgagcgccgtgtccgccaaacctttgcgcgcgccgtgagtcgaaatgaagtactccaacaccgtcagcccttcgcggaagttcgagagaatgggcttctcgatgatgtcgccgctcggcttggccatcaaaccgcgcagaccggccaactgacgcacctgttgcttgttgccacgggcgccggagttgaccatgaggaagatgggattgtactcggacttgttccggttgcgctccaaggtctgaagcatgaccgttgaaatctggtccgtgcaatgcgtccagatgtccacaatcttgttgtagcgctcgccgtcggtgatcacacccttccggtactgtttctccacctccgctatctgcttctgcgcctcgcggatttgcttctccttttcctccggaatgatcatgtcctcgatgccgatggacacaccggcccgcgtggcctcgcggaagcccagctccttgagccggtccaaagtggcaatcgtctcctcatgcccgcaatacttgtagcaattccaaatcaaatcgcccaattcgttcttgccggccaccttgttgaaaaagcccagcttctcaggccacacttcgctgaagatgacccggcccacagtggtctcaatcaccgcactcttcggatcgccatacaccgtctgacgcccgcggtcgggattggccagccgcacccggctgtgcgtcttcaattcaccctcgcgataagcgaagatgacctcctccttggaaccaaacagcatcaggcgctgattgcctttgggctggcgtggctccgcggtgaggtagaagcaacccagcgtgatgtcttgcgtcggcgtcataatcggccggccgctcgacgggctgaaaatgttgttgggcgccatcatcaacaggcgcgcctccatctgggcctcgatggacagcggcacgtgcacggccatctggtcgccgtcgaagtcggcgttgtacgccgtgcagaccagcggatgaatccgtatggcctcaccttcgatgagcatcggctcaaaggcctgaatggacagccggtgcagcgtcggcgcgcggttgagcaacaccgggtggcccttggtgacttcttcaagaatgtcccacacctcggtggactggcgctcaatcaatttcttggccgagcgcaccgtgtgcacatagcccaattccttgagccgccggatgatgaacggctcaaacagcaccagcgccatcttcttgggcaaaccgcactgatgcagcttcagctccggcccaatcacaatcaccgagcgaccgctgtagtccacgcgcttgcccagcaggttttgacggaaccgcccgctcttgcccttgagcatgtcgctcagcgacttgagcggccggttgccggcaccggtgaccgcgcggccatgacgcccgttgtcaaacaaggcatccaccgcctcctgcaacatgcgcttctcgttccggatgatgacctccggcgtcttgagctgaagcaggttcttgagacggttgttgcggttgatgacacgccggtacaaatcattcaaatcggaagttgcaaaccgcccgccctccaacggcaccaacggccgcaaatccggcggaatcaccggcagtaccgtgagaatcatccactccggcttgacgcggttttccacaaacgcaccaagcaaacggatccgcttggccagtttcttgcggatttgcttgctcttggtctcctgcatctgctgctgcagcttttcaatctggcgcggcagattgacgttggccagcgcctcacgcacggcctcggcgcccatcttggccacaaaggcatccggcccgtaagtctcgcgagcttcgcgatactcatgctcgctgagcagttggtggagttgcagcggcgtgttgcccgggtccaccaccatgtaatcctcgtaataaatcacccgctccaagtcccgcgccgtcatgtccagcaccaagccgatgcgcgagggcatgcacttgaaaaaccagatgtgcgataccggcaccgccagctcgatgtggcccatgcgttcgcgccgcacccgcgccaacgtcacttccacaccgcaacgatcgcacaccaccccgcggtgtttaatccgtttgtacttgccgcaggaacactcccagtccttcacaggaccgaaaatgcgctcgcaaaacaggccgccacgttcaggtttgaacgtgcggtaattgatggtctcggggttttttacctccccttttgaccaggaacggatggcctccggtgaggcaaccgagatggcgacgtaatccacctggttgaccttgtccagtccgagcagctcgcgtgctgtttctttcgtattcatgttggctgtggcattggtggggcggaaaaatcccgccccgggtctgcaaagttcaattacaagttggccagggcgctggccggcgtggccggttgatgttcaatgggattggtgtaccccaccttcacgtccagccccagggactgcatttccttgaccagcacgttgaaagattcagggatgccggcctccaaacaattgtcgcccttgacaatgctctcgtagatacgggtgcggccctgcacatcgtccgacttgacggtgagcagctcctgcaacgcataggcggcgccatacgcttccatggcccaaacttccatttccccgaagcgctgaccgccgtactgtgccttgccgcccagcggctgctgggtgaccagcgagtagggacccaccgcgcgggcatggattttgtccgccaccaggtggcccagtttcatcatgtagatgtagcccaccaccacttcctgatcgaacggctcgcccgtccgcccgtcgaacagacgcgccttgccgttgggcaatagcccctgctccttgcccacgggcgtttgcgccgcctgtttgatgaactcccaaatgtctttctccttgatgccgtcgaagaccggcgtcgcaaatttcaatcccagcagcttcgcagcgtaccccaggtgcgtttccaacacctgacccacattcatgcgcgacggcacacccagcggattgagcacaatgtccaccggcgtgccatcggccaggaacggcatgtcttcctccggcacaatcttggccacaacacccttgttgccatggcgtccggccatcttgtcgcccaccgacagtttccgcttcgaggcgatgtacaccttcaccatcttgatgatgccggcgtcaatttcatcacccgcctccacgcgctccatctcctgatcgtgctgggcctgcaaatcatcaaacttctttttgaagccgccgatgatctcattgatcttgttgcggatgggcgaaggatcaatctcgatccggtcatacacctgcgccagcttccgcaacaacgtcttggtaatcttgcgattcgccggaatgatgatttcaccggtctcgctgttcaccacgtccagcggaattttctcgcccagcaagatattgctcagagcctcggtcagttgctcccgcagctcttccatcttggtgcggtattcctcctgcacctgtttggcggcacgacgcgcaccgcccgtctccgcctgcacctctttttccccttccttctccttcttggcggagaccttgacatccatcacaatgccataagtcccgctcggtactttgagagaggtgtccttcacatcggcggccttttcaccgaagatggcccgcaacagccgctcctcgggcgccagctccgtctcgctcttgggcgtgatcttgcccaccaaaatgtctccgggcttcacctccgcgccaacgcggatgacaccgtccggccccaggttcttgagggcttcctcgccaagattgggaatgtcacgggtgatttcctccggacccagcttggtgtcgcgcgcgctcacctcaaactcgtcaatatggatggaggtgaaaatatcctccttgacgatgcgctcgctgatgaggatggcgtcctcgaaattgtaaccgttccacggcatgaaggccaccaacacgtttcgtcccaaggccagttcaccctgagccgtgcagggaccatcggcaataacctgccctttcttgaccgtgtcacccttgttcaccagcgctttttggttgatgcacgtggcggcgttggagcgcatgaatttgcgcagtccatacacgtacacgccattggccggatcgtgtttgatcttgcgcttgccctccggcagcttgccatccgcagtgatgatgatttggttgcccgtcacgctggccaccttgccgctctcctctgccaccaacacagcgcgggaatcccgggccacacgctcctccaaaccggtggccaccagtggcgtctcggtcaccagcaacggcaccgcctgccgttgcatgtttgaacccatcagcgcccggttggcgtcgtcgtgctccaggaacggaatcaaactggccgccaccgaaaccaattgcttcggcgacacgtccatgtaatccaccttcgccggctccacgtccacgaaatcgcccttgcgacggcacgtcaccgtggcggtggtgaagtggcctttttcatcaatcggcgcattcgcctgcgccacggtgaagttctcctcccggtccgcagtcagatactcaatttcatccgtcacacggcccttgaccaccttgcgatagggtgtctccaaaaacccaaactcgttcacccgcgcaaacgtcgccagcgaggctatcaagccaatgttcggaccttccggagtttccaccggacaaatccgcccgtaatggctcgggtgcacgtcgcgcacctcaaacccggcacgatcccgcgacaaacctcccggccccagcgcggacaaacgccgcttatgcgtcagctcggccagcggattaatctgatccatgaattggctaagctggctccgcccaaagaaatcgcgaatcaccgccgacaacgccttgggattgatcagcttctgcggcgtcatcgcctccaacgactggtcaaacaaagtcatgcgctccttgaccagccgctcggtgcgcgccaggcccacgcggcattggttggccagcaactcgcccaccgtccgcacgcgccggctgcccaggtggtcaatgtcgtccaacgttccctcgcccttcttcaggcgcagcaaatacttggtggcctccaccaaatcgctcttggtgaggatgcgcgtgtcgttcttgggcaggttgagtttctggttgatcttgtaacgccccacgcgccccaagtcatagcgtttgggatcgaaaaacagccgcttgatgagcgctcgtgcattggccgccgtcggcggatcccccggccgcaaccgccggtaaatatccttgagggcctcatcctcgttcttggtcgggtccttcttgatgcatttgatgatgatgccgtcgtccactgacgtgtccaccacccgcaacaccttgacccccagctcgccaatctgcttcaccaccgcacgcgacaacggctcaaaagcccgcgccacaaccaaccccttgtcctcatccaccacgtcctcgatgagcaccttgttgggaagatcatcgcgtttctcagcttctttgatgggcagctcttcaatggtgtaaaaaagcttcaacaactcggcatcgctgccacggttggcgtcccctttgcccttttccggctcgtccaaaaatgccagcgcacggaagaaagtcgtggtcaaaaatttgcgacgccgcttcttgcggtccagatacacataaagcaaatcgctcgtgtcaaactgcgcctcgtaccatgaaccgcggtcggggatgatgcggaaagaatgaagcgtcttgccgttgggatgctgggttgcttcaaaagcaatacccggcgaacggtgcaactggctgacaatgacccgctcggcgccgttgatgacaaaactcccctgcggagtcatcagcggcagctcgcccatgaacacttcctcttcgcgggcgaccttgccgttttcctccaaacggaaagtgacatggagcggtgcgccgtaagtctgcccttcgcgcaggcactccagccacgtcatcttgggctcgccaatcttataagaggcaaagtccagcttgaacttgccgtcgtagctctcgaccggaaacacctcccggaacaccgcctggaggcccacgtctttgcgtcgtcccggcgggacatcagactgcaaaaactccttgtaggaggtggtctgcagttcgataagatccggcgggttgatcacttctttaatcttgccgaaattcttgcgttcgatggctcgcgttgacatgggacttgctctattgggccggcggcatgtacagcctgtacatcccgacagccgggttcgggcttagacagcacaaggcgagtccccccttcccggggagtgctcgccaaaacatggatgaatccaaccgatactacgacttttatcttgccagtccgccctgccggccgcccgcaaaccggacaaccggccgaaggggggcgccacccggcgccacccctccagcggacaattacttgagttccacggatgcgccggcctcttccagcttcttcttggccgcttcagcatccgccttgttggcgccttcaagcaccggcttgggagcgccttccaccagcgccttggcttccgccaatcccagaccagccttgatctcgcgcaccgccttgatgacggcaatcttcttgtcggcaggcaccttggccaggatcacgtcaaacgtatccttggcctcggcaggcgccgcagcagcagcaccacccgccggggcagccccagccgccgccaccgctaccggcgcagccgccgtcacaccccatttggcttccagttctttcaccagctccgcgatctccaatacggtcgcgttgctcagttcttccacgatttttgctttatccagtgccataggtcctttctgtttcgccgcccggcgtggccacgccggatttcagcccgctgcccgcaggccggcgagttacatgttaggttgttgactttttccccagccgttggctgcagcaggagaaaaactgtgatgttaattctctcgaaaaaggcttgctcatgccgccgcaggcgcgccttctttttgcgccttggcctgcagtactcgcgccagttgcgatgccggcgtgttgagcagcgccaccagcttggtggccggcgcctgcaacagacccagcaacttggcctgcaacacctcgcgcgacggcaaatccgccagcgccaaaaccatggacgcttccaaccgctgattgttcaaatatccaaagcggattttcggcttgtcctgctccgcagcggcaaacgtcttgagcgccttggccgccaaggtcacatccttcttcccggtcaccaccgccaccggcccctccaagggcccaggaagctccacccccgccgccttggcggcatgccgaaacaggctgtttttgaccacatgaagctccgcacccgcctccgccaattggcggcgcagggtcgtaagctgggccactttcagtccggtatagtccaccgccacaaaaaacggagacgcattcaaccggttgagatattcctgagttaaattttgtttttcagcacgcatgatgattccctccgctgcaggcttgcgttatgtggtggcgaactccttcaagtccaccggcaccggcggactcatcgtcgtggagatggtgcagctcaaaatgtagcgccccttcacactcgaaggccgcgccttttgaatcgcctcaatcaccgtccgggcgttttcctcaatctgctcgggtgcaaaattaatcttgcccaccggcacatgcacattaccgcccttgtccaccttgaactccacacgacccgccttgaactccttcaccgccttggcagtgtcgtcggtcaccgtgccggtcttgggattgggcatcaaaccacgaggaccaaggattttgcccagtttgcgcacttcggtcatcgcctccggcgtggcaatcgcaatgtcaaattccgcccagccttcctggcacttcttaatcatgtcctcaaagccgacatactcggctccggcggcttttgctgcctcggcggaagcgccgctcttggcaaacaccagcacccgcaccaccttgccggtgccatgaggcaacggtacagtgccgcgaatcatctggtcactttgcttcgggtccaccccaagatgaaacgccaaatccaccgtctctgtgaacttggcccggggcattttggccaacagcgccaccgccgccttcagcggctgcgccttcttgccatccagcaggctcagggccttcttgtatcgtttgctgcgttttgctgccatgttaatggttgcggtacaatcgagggggactccctctcccgcgttggtttgttgttagtccacgatttcaatacccatgttgcgggccgttcccgcaatcatgcgaaacgccgcctcctccgagttggcgttcaaatctttctgtttgatcttgacaatctccatcacctgcttgcgggtgactttgcccactttttccttgttcggcaccttcgagccggtggcaatccccgctgccttcttcaacaaaaccgacgccggcggcgacttcgtgatgaaggtgaaggacttgtcctgatacaccgtaatcaccaccggaatcgtcatgcccgcctggctctgcgtcttggcgttgaattccttgcaaaacgccatgatgttcacaccatgctgacccagggcagggcccaccggcggggccggattcgcctggccggcggtgatttgcaacttaatctgtccaacaactttctttgccataaatcaatcttcgtcctgtccgcaacgcttacgttttttccacctgccaatactccagttccaccggggtgttgcgtccaaaaatgttcaccgtcaccttgagcttgcctcgctccggctcaatttcctcaataaccccgctgaaattcaggaacggcccgtcgttaatcttcaccgtctcgcccacttcaaagttgaccttcggcttctccacatcctccgactcgctgatttgagccttgatgctctcaatctcctcatccgccgtcggcgccggacggtcccctccaacaaacccaatgatgccctgcgtctcgcgtatgaaataccacgggcggtcaatcacccggttgttctcatccaggagcttcatccgcaaaaacacgtacccgggataaagcttgcgggtgctgacggtctttttgccgccacgcacatccacaatcttttccatcggcaccaatacctcctcgatgtattcctgcatctcctccgccttgatgcgcttctccaggctctccttgaccttgagttcctggccggcaagggtgtggaccacaaaccactggctcttggatgagggcataaactcgaaaaaggggcgttaaacagtggtcacaaaccgcatcaccaaaagcagcaccgaatccaccacaatggtgaacaggctcaacaaaaccaccgacaccagcaccaccaccgtgctgcctttcaactcctcacgaccaggccaggtgcatttgcgcaactcctcccgcgtctcctgaatatactgattcaggcgcaaaaaatgccctttccgccagaggtagaacaccacggcggccaaggcagccagcccgattatcttcaaaatttcacctgtttccatatcagtctcctgacttggcggagagggagggattcgaacccccgtcccgcgatgcgggaagcggttttcaagaccgccgcattagaccactctgccacctctccggcaaaaaaactggcagggcgtgagggactcgaacccccaacaggcggttttggagaccgctactctaccaattgagctaacgccctgttgccgcagagattgttgctcactgtctctccggtcgcttgccggtggttcgcaccgggcgccccgccacgccggcaggacgcccgcgcctgtcaaactgttcgttaatccaaaatttccgtgatacgaccggccccaatggtccgaccgccttcacgaatcgcaaaacgctgcaacttctccatggccaccggcgcaatcaccttgatctccatggacacgttgtcgcccggcatcaccatctccacgccctgcggcagcgtcaccgtccccgtcacgtcggtggtgcggaaatagaactgcggacgataattggtgaagaacggcgtatgacggccaccttcttccttcgacaacacgtacacctcggccttgaagtgcgtgtgcggcgtaatcgaacccggcttcgccagcaccatgccgcgctccacctcttccttcttcacaccgcgcagcagcacgcccacgttgtcgcccgcctgcgcgctgtccagcagcttgcggaacatttcaatgtccgtcgccaccgtcttgcgcgtctcacgcaaccccacgatttccacttcctccatgcgcttgagcacaccgcgctccacacggccggtcaccacggtgccgcggccttcaatgttgaacacgtcttcaatgcacatcaagaacggcttgtccacttcgcgcgtgggcagcggaatgtaatcgtcaatggcctggagcaggtcttccacagccttgatgccctcaggcttcaattccatggcggcgcgggagctgccacggatcaccggcgccttcgctccgtcgaaaccgtacttggtcaacaagtcccgcacttccatctccaccagctccagcaaatccttgtcgtccaccaggtcaatcttgttcaaaaacaccacaatcgccggcacacccacctggcgggccaacaatatgtgctcgcgcgtctgaggcatcggaccctcggcggcatccaccaccagaatcgcgccgtccatctgcgccgcgccggtgatcatgttcttgatgaagtccgcgtggcccgggcagtcaatgtgcgcgtagtgccggttgttgctctcgtattccacgtgagagaccgcgatggtcaccgtcttggtttcgtcacgcaccgtgccgcccttggtgatgtcggcgtagctgatcggcttggccaaccccttttgggattgcacatgcacgattgcagcggtcagcgtggacttcccatggtcaatgtgcccaatcgtccccacgttgacgtgtggcttcgtacgttgaaattgctcttttgccatcgcagttcctacggttgatgtttacggtttttaacaactgtttcgggcggccatcgccgccacactttttttcatggagcccatgatcaggattgaactgatgacctcgtccttaccaaggacgcgctctgccaactgagctacatgggcatccatgtatcactttcctgtcattgtaaaagacaaaactcccgtcagaccctgtgcttcttcccgaaaaacccacagggactaacgtagtcgtcctgtaataggcccaatgacgccggggaaattacgcccctgcaaaaaaattgtcaaagctttttttccactttttttccctcaccttgccccacttccaccgcctccgccacccggccatcccaccgccgcatcaaatggttgcccgcccaaatgaccatccccgccatcaccaaccccccgggtatgtccaccgcataatggtagcggcaatacaccgtgctcaaacacaacaaaaccaccaccaccgcatgcgcccaccgtattccacgaatatagcgccatgaaaaatacaacgtcgtcaccgccaccgccacatggctgctcggaaaggccgcccccggcgtctcaaaatgatgataaatcagcgccatgatttgaaaaaacggccccttctgcaccgccgccggaaagtcaggcaccgtcgtcggcatcaccgccgccggcaaatcaaaatccccaaaatcccggtaaaaaatccgcgggcccaccaccggcaaaaagatatagaccagaaaacacgcataaaaaaccaccgaaaccagggtgatgtaatggaaaaattgcctccgatcttgccggtacaacgccagcccacaccccgttatcatgatataatacgaaaaataagacacataaaaaacctcactcacccacaggtacggcagtttgtccatgaacagcaaactcggctggcacccaaacaaccgttcctccatccggatgaaccacgggtccaacatccccgtggcaaacatctgattcaaatgccccgtctcattgtaaatcgggacatacaacatgatgggataaaaatgccggacaaaccgcagcaatgccccatgtcggcccgtcgcttcttcacatatcaacaaatgaatcatccccaccaaccccagatgccccaacaccaaccaccgccactgcggcactgtttcattgtgaaagataagcaccaacaaccccaccaaggccacatacccctgggtcgccacatcaataaaacgataatgcctcatgcctcccaacctcccctcatcccaaccaccccgcctcacgataccaatccaaagtggccggcaccccttgcgccgcagccgtgggcgcctcaaagcccgtcatctcccgcaaacggctcacatcacacacccaccccgccgcggcaagttccttgtatttctgcaaattcaccacattgggacggcgggtgatctgcgaaatgatttcctgaaccgcgcacaccggccacaaagccgccacaggcaaggccaggggaaacggtttgactccccaatgccgcgccgccaactctcccagttgccgtacattcaccacctccggatgcgccacgtgaaacacctgtcccaccgcaccctcatgcgtcaaacaatgcacaaccgccgccgccaaatccggcgcatataccaagctcaactgctggcgtcccccgccaaagcacggcaacacaccgcgccgcaccgccttgaacaacttgaaaaactcaccatcccgcggcccataaacacccgggggtctcaaaaccaccgccggcacacggcattgctcccgcaccacctgctcggcggccagcttgctcttcccgtaatcggtcaatggcctcggtggatccgactcccgcgccggccgcgccgccgtggccggccccgtaaccgccaaactggaaatgtgcaccaaccgttgtacttccgatgcacgacgattgatggccgccaccaagttcaaagtgccagcatgattgatttggaaataaccctccctgtccagcgccttggtggcccccgcgcaatgcaccacatgcgtcaccccctccagggccgaccccaaagattccgccgactccagcgatccctccccaatttccaccttccccaagtgcccctgcaaccacttccgcgggctgctggaccgcagcagcacccgcaccggccaacccgcccccacaaggcggtccagcacgtggctgcccaccagcccgctggcgccggtcaacagcactttcatggtcggctaaatcagccccagttcacgccccacctgggcaaattgttccagcgcaaaatctatttgcgcatcggtgtgcgtcgccatcaagctcaccctcagcagttccatcccaggcggtatgcccggagaaaccaccggattcacaaacaccccccgctcctgcaatcgcttgcaaaactggaacgtcttgagcatgtcccggatatacaccggcaatatcggcgtctgcgatcctcccaaatcaaaccccagcgacaacaacccccgcttcatccgctcggtgttctgccacaaccgcgcaattcgctccggctcgctctgcatgatcttgaccgccgccaacaccgccgccgcattggccgggctcatgctcgcgctgaaaatcaccgttttggaatgatgcttcagataatcaatcgtggctgcatccgacgcaatgaaccccccaagactcgccagcgacttgctaaacgtgcccatgatgaactgcacttgatcggtcaacccaaaatggctcgccgtccctgcgccattcactcccaatacgccgatcccgtgcgcatcatccaccatcaccgccgcccggtactcccgcgccaaacggcagacctccggcaaattgatgatgtccccctccatgctgaaaacaccatccaccacaatcatcttgcccgcatccaaaggcagcttttgcaaccgcgcctccagcgcacccatgtcattatgcgcaaaacgcgaataatcccccagcgccaatcggcacccctccacaagactggcgtgattgctcttgtccgccaaaatatattcatccttgcccgccatcacgctgatgacccccagattcacttgaaatcccgtgctgtacaaaagcacagccggcttgttcaccagccgcgccagcgcctcctccaactccaaatgcaaatccagcgtgccattcaaaaaccgggaccccgcacagccgctcccatacttggccaccgccgccatcgcggcttccttgatcttgggatgattcgtcagccccaaataactgttcgaccccaacatcaaaaccttccggccattcatgatgacctcggtatcctgcgccgaggaaatcgtgcggaaatagggataaagccccatcgcacgcacttgctcggcacttttgaacgcgcgcaccttgtcaaacaacggcaaatccgctgtttccgccgtgcacgccggcggatttttggctccaaggccctgttctatcatgggcgaataggtgtcccgactcatataagtcggccctttgtgtcgcaagttggggttatttattcaatcaaaattattgggagcacaaacacccccctgcctcccgcccccgttggaaaaagggcgcgcaaccggaaatactcatggaaatatcgtggtccccccctcaagcctcgccgttggcacggcggaaaatctcaaggtgatccaccacattgatattgtgctgctgcagagtttgcaccgcccgatccggatcatcaaaacggaacaccagcacgcctttgttctcctttttcaacgtaaaggcatacatgtactccacattgatgccggtcccctccaacaccgcaagcacctcggccagcccgcccggcttgtccggcacctcaatcgccaccacatcggtgaccttcaccacaaagccgttttgctcaagcaacacccgcgccttctcccagtcgcgcaaaatcagccgcaaaatgccgaaattttgcgtatccgcgatggagagcgtcgtgatgttcaacccctcggcggccagcacgcgcatcggcgcgctcagtgccccgggtttgttttccaaaaacagagagagttgtttcagtttcatggctgtggagcggttacattttgcgctggtcaatcacccgtttggccttgccctcgctgcgttgcaacgtgcggggcgtcaccagccgcactcgggcccgaatgcccaccgtgctttcaatcgcgtgcgaaagccgttgctgcagcgcctccaaggcgccaatcgtgtcgctgaaaacctcggctgtcacctccacctgcacctccatctcatccagccccttctcgcgggtcaggatgatttggtaatgaggcaacgtcccttccacactcaacagcgcggcctcaatttgcgagggatacacattgaccccacggatgatgaacatgtcatcactccgccggctgatgcgcttgatgcggcgaagcgtgcgcccgcaggcgcaaggttcactcgtcagcgccgtaatgtcacgcgtccgatagcggatcatcggcatcgcctgcttggccagcgtcgtgagcacaagctcgccctcctgttcatcccccaacacctcgccggtctgcggatcaatgatttccgggtagaaaaagtcctcaaaaatatgcggcccacactggcactgacattccatcgccacacccggccccacaatctccgacaacccgtaaatatcatacgcccggatgccgctctcggcctggatgcgctgccgcatgctctccgtccacggctccgccccaaaaatgcccgcccgcaaaggcagctcccgcaaatcaatccccatctcagacgcctgatcgagaatgtgcaaaaaataactcggcgtgcagcaaatcaccgtcaccccaaaatccttcatcaccataagctgccgctgcgtgttcccgccgctgatgggaatcaccgtagcccctagccgctccgcaccataatgcgcccccagcccgccggtgaacagcccgtaaccatacgcgttttgaatgatgtcccccgcgtgcaccccgcaggccgcaaaactccgcaccatcgcctgcgtccacacctcgatgtccgccgcattatacgccaccacaatcggcttgcccgtcgtcccgctcgaagcatgaagccgcacaatctcatgcatcggactcgcaaacaaaccaaaaggatacgtatcccgcaaatccgtcttgaccatgaaaggcagccgcgcaatgtcctccaacccgcgcaaatcagcgggcttcaccccccgctcatccatgcgctgacggaaaagctgctgatgatcataagcgcgctggacaatcgccttcaaccgctggaattgcaatgcgcgcaattgcgccggcggcaaaaaatccggggcgcttaccggatgaaacggaatatcggtaacggatttgctcatgaggaaggttacaggattgattgtccgcaaaacgcctccccgcccgccttccgcatcgtgcaaaaatcaaccccgcgggccaaccacccgcatggccacacagcaggcttgcgtttcgcgtgaacaccgcccccaccctaccccctccccacccccccggcaactccaaactgcacccttcgatttgcccctgagtcaattcgtaatcacctgatcaatttcgaaagtgaatcatgggtcgggacgtttcctcgatcatcagtctcggtttccaagttccgttggaaattggtttgaccggagcgtgggttcgcccaacatagccgcggcatgaaacctaaagcgtatgcggcggcgggggtggatattgacctgggcaaccgggtaaaggccactctacccaagttgctcgccgccactcatcggcgggaagtcctcggcaaggtgggcggatttggcgggttgtttgcgctggacacccggaagtaccgccagcccgtgctcgtttccagtgtggacggcgtgggcaccaaattgaaaatcgccttcgcgatggacaagcacgacaccatcggacaggacttggtgaatcattgtgtcaacgacatcgccgtgctgggtgctgagccgttgtttttcctcgattatctcggcaccggtgtgctcgagcctcgggtgttcaccgaaatcatcaaaggttttgccgtggcctgcgcgcaaaacggctgcgcattgatcggtggcgagactgcgcaaatgcccggtttctaccagcccggcgaatatgatgtcagcgggacgattgtgggagtggtggagaaaaagtccatgctcgatggccgtggtgtgcggcctggcgatgcgttggtgggactcgcatccagcggtctgcataccaacggctattcgctggcccgcaagattttctttgaacaaatgggcctgcgccctgacagccggttgccggagctggggcagactttgggggaagaactgctgaaggtgcacgtgagttacgggccggtggtgcaggcgttactcaagcgcttcaatgcgccaggggccccgcgccgcatcaaagcgctggcccacatcaccggcggtggttttgtggacaacatcccgcgggtgttgccatcgggatgcgatgcagtcattcgaaaaggtacctgggaagtattgcccattttccggctgttggcggaggtgggcaaggtgccggagcaggagatgtatcaagtattcaacatgggtgtgggaatggtggcgatggtggcggcggaccaggcggattcggtggtgcgcttcatccggcgccgggggcaccaggcttggattgtgggtgaaattgtgaagggccgcggcgtgacgcgagtggtttgacgctggaagtttaatccgccgggcgccagtcgagcacctggagctgcacttgagattgaccgttgtaccgattgatttggggaatcacggcaaggtcaaaaacgcccacaggccaatgtttgtcagcgcctttccaccacacggcttccatggtgaggcgcccatcggtcacccacagtttcaagtgctgttggtgggcgccgatgcgcagcgggacgcgctggttgaccaggcggtggacgcaaagatgcaccggcgggttgttttgcccaaaaggcgccaagcgttccaaggcggccaccgtctcaaccgttaattccgccaaagaggtgcctgcatccagacgcagagggggaatgagctgatcatgtttcaaccaacaacggcccaattcgttcaagcgcgtgcgaaaagcggggaggttttccgggcgcaaggtgacgccggccgccattttgtggccgccgtggcgttccaacaaatcgtgacactgctccaaggcggcggcgaggtcgaagccttcaatgctgcgcccggagccgcgcagccaggggccgtcgcccccaagaataatcgttggccggtaaaagttctggaggacacgcgcagcaacgatgcccaccacgccgatatgaaaatcgggatggccggccacgatgacgaaatccttttcagggttaaacgtggcttccagttgttcaaggagggtggagaggatttgtttttccaattcctgccgctcgcggttgcggcggtcgaggctggcggccaggggttcggcttcttccaaggtttcggccagtaacaagcgcaaggcttcctcggcggattcaaggcgcccggcggcattgacacgcgggcccagttgaaagccgatgtcgcgcacgcccaccggttcgcggacctgggccacagccttgagggcttgcaagcctgcgcggcgggtggtgttgatgtgtttgagccctgcgctcaccaagatgcggttttcgccctgaaggggtaccagatcggccaccgtacccagagcgacaaggtccaacaggggccgcaaatcagtttccatgaactcgggctgattcaggcggcgtccttctcgggtcaaggcgtgaacaagtttgaaggcaagtcccaccgagcaaagctcggtgaagggggcgtccacggcggagggatgggttgaaaaaggattgaccagggcggtggccggcgggagggctgccgcacattgatgatggtccagcacaatgacctccactccttcgctttggaggcgagagatggtttccaccgccgttgaaccgcagtccacggccagcagcaggtgggccggatgctgggcaagacaattgcgcgccgcatcctccgtcaggccgtaaccttcttccatgcggtgaggcagatatgtgcgcaccacccagccgtggcggctgagaaaaagttgcaacaaagccgtggcggaaacaccatccacatcgtaatccccgaagatgaccaccatttccccgcgttcacgggcggcccacaaccggctcacggcctcggccatgccgggaataagcaaggggtcctgaagctcgcgcaggcgcgggttgagaaaacggctggcctgcgcaggttccgagtggccgcggttgacaaggcactgcgcgaccaatggcggcagcgaaagctcgcgcaccaggcgttgcaccaacaacggttcggccggggcggtggaccaccggtatttcatgaggcacggccgaaaccggcagaaaagtttccatcaatcatgaagcagggatatagcaaacgaggctcaaaagtaaatggcgcgatgccgcggccaaatgttttcgggggggttgcacgaggccgctggagttgggccgccagcaaaattttcttccaagacttcaacgcgctccggtcccctgcaacacagcagggatggtgcggaagaggattttcaaatcgagccacaaagaccaatggtcaatgtattcaaggtccagacggacccattccttgaaatcgctgacgttgttgcggccgctgatttgccataggcacgtcaggcccggtttcacgctcaaacgccgccgatgagacaggtcatcaaatcgcgccacttccatgaccggcagggggcggggacccaccaggctcatctcgccccgcaacacattgatgagctggggcaattcatccagactgtatttacgcaagaagcggccgatgggcgtgacgcgagggtcctgggaaattttgaagacgggcccctgcatttcgttgagggactccaactcgtggcggagctgctcggcgttggtgaccatggtgcggaatttcaacatgacaaaaggcttgccatgcagcccgcagcgttcctgacgaaagaggatcggccccggactggtcaaccgaatcagcaacgcaatcagcagcatgacgggcgccagaataaaaagtcccaccagcgctccagtgtaatccatgatttgcttggccaaagattgccaactggcttcgggggcgctgcggaacaccacaaccggcaggtccatgaattcgtccagcgaagtccggtaggtctgtgttttgaagaagcccaccaccatccacgcctccacgccctccagctcgcaggcttggaggatttgctcggcttcccggaagttgctgtggccgcagtgcaccaaaacagcgtgggcggaatgttgatgcaaaaggcccgtgagaacttcgggtttattccgttccaaattcaattcggccaccaccgtggcggagccgggccctaaagatttgagcttggagcgcaggatttggaggtccccttcgttgccgcccaccacgataacgcgtttctccaattggtcgcggccatggctggtatggtagaggccgctgagaagcaattccttgcccatcaacaagagaaaactaataccaccatagagcacgagcacgccacgggccagttgctcgcggaacagaaacatggcgagaatggcggccagtgtagtaacaacgctggctttgagaatcatgagcgccgtgcgccgccgcgagaagaataggggtcgttggtaaaagccaaaccaactcaaggcaatccatgccgtgggggcaatgaccaaccaaagccacatgaaatcatcgaagggggcaatggggtcgcgtcccagaagatgctggtttttggagcgcagctcatgggccacccacaacgccagcaaatgcaggccggtgtccatcacttgatggacccgcgtgcgaagagcgctggaacgtcgcagcatgatattctttacaacctgatcgagccgagtcgtcgagccgggttgtccggcatccatttaagccccgatcggggcatcggcgtcaagtccccccatgccgtcaaggcagggctcgggcttgcgccttgaccggcggggccggtggcaactgaaactgaggcacggcttcttgaatccattgcaccatccacttcacggtggcctcttcctcacccggtgcgcaggtggtgaaaagggaaatgtaggcccagcgttgcagctcgccggtgcgcaacatgtgcagtgtttgagaccagacgcggcgcgtgtgcagcgccgaaatttcgccatcggctacaaaccagtaaagatacattccgcgcaaggtgacttcccctttgggggtctgcatggtcttagtggactggactttcatcaccggcaaggagtattcgatgggccgctgcatcggcacttgaatgatctcggtgtcgctggccttgtattcccaaccctggccgttgagacaaaactccggcttgtgaatgctggtgcggtcgccacccatgaggaccacactcaccaaaagtttccgttcatcaggccattcgtacaaacggcggccgtaggtggtgtcggagggcagccagatgagttcgagtttgctcaccggcaccgaagtggaggtggctcccatcacttcaggcggcaggtacacactttgtggcatgaccagccggccatcttcaccccaagtgggttcattaacgagtttgacccccggggcgccaagatgctgccgggttttggcctggttcaatgccatccccgtccctaccatcaacaatagggccgccacaaaaacctgcactgcgcgctttgtcatacgacttcaggaacacccgccggcggggggacgcggcgaggggtaaacagtttgccggtcaggtacaccattgcaaatcctaccacgtaaggtaggaaactcaacacggtgctgttatggacgtaattaccgccttcctgcccgaacacctggcctgcggccacaatgagaagcaaacgcaacacattgctgacaatggccgccggcacagccataagcacaatgatgccccgctgccacatcggtttgaaaaacacaaacccgtaaatcatggtcagcacaagcagcgcggtcaggctttgaatgccactacaggccggggcgatttcatattggaatttaccgctgggatcaaaaatctgcgtgccgttttgaatgaccggcacccccagcacgtgatgcgacaacgccacggtaatctgcgtggccactagtcgcagcggaaaggtgatggcctccgactgcgtggccaaaggcacgcaaaacaccagaaggcagaagggaaacacggttttcttcaaccacaaccatccccacaacaggcccgtgatggcgtaaatgcccaaataaaaacctaaaatggaaatgcgcgcctgctgggccaggtaaccgagcaggtgtagtcctgaggcgatggccagcagtcccagagccggccaccaaggcgctttgggcagaggcagtaattcctggcgtttccaccacaagagcatcaacaccagcaggggcatgtagtagccatgttggtcttcgggactccattcgtaggcgtgaatcatccaacccagaaggcttccggtcttgatgtagccgaaggtgctgttgccccaaaagtgaaacaacaaaatccacactgccagcagggcccagaagagttcgcgatggggaaattgggcccatgccgccgtcacgtccgcccagagttggcgggctgcagcaagcaaacttttttgctgttcggtctgttgggtggtggcttccacactcatgcgcttacgtaccgcgcattaatttagacaagcttggcacccaattcactcaaaaatagcgaaaaaaagatggtcttgtcctgaaacaggcaatcaaggtttaaaaagcggatcctccaccgtttgctgccattcttgcagggatttcttcaattgctccatcacatcggcaaaatttgcctcgccggaaagatcgcgtgtttcccatgggtccttgcgcagatcaaagagctgaacacggttggcctggggataaacgaggagtttgtagcgctcgtcgcgcaccatgcgttgatgttcccgataggcagcgtaaagcgtggtataaaccttatcttcgcgtccctgcataatgcccaccagactgcggccctccaccaccggcggcaccggcaggccggaaagctcacacaacgttggaaaaacatcgtgcaaatagcacagcgcagccgagcggcgattggacggcacaccgggcccgctgaaaacaagcggcacacgcacactgtgatcgtaaaggttttgcttgccgagcaacccgtgttgcccgacagccaaaccattgtcaccaccaaagaccaccaacgtctgccgccgaagcccccgagcctccaacgtgttcaaaatgcgcccgatttcggcatccaaatgcgatatcattccgtaataggctgcaatttcctgctgcaccgccttcggggtacgaggccaggggagcaatttttcatcgcggaccttgagctcaccattgtcgaaggggtgctccggtaaaaaattggggggcagtttgattttctcggggcgatacatcgcagcaaactccgggggcggcgttcgcggatcgtgcggcgcagtgaaagccacgtaaagaaagaaaggctgttccactggatgtcgctccaaaaattggatggctgcgttggcaaagagggtggaggaaaaaacacggttggtttggcggcggttgttcggatacgcgccagtgggatcgtagctgtgcaccggcacctgctcatgatcatgcatgccaccaaagaaaattgcgtcgcccgctgtaaaagcccgattgaaggaaggtttatcgttgtgccacttccccactgcaaaagtgcggtaaccggcggagcgaaagacctccggcatgagcactgcgggagtacggatgacatggtctgccgggcgtccctgcgcggcaggcaaagcagcgcggtacaaggtgcggcctgtcatcaacatcgcgcggctgggcatgcaaatcgccccctggcggccgcccatgatgtgggcgtgagtgaaggcaaacccttctttcacaaggcggtccaggtgaggcgtgcgaatggcggaattgcccagcgcgtggatggtatcgaaacgctggtcatcggccagcaggatgagcacattgggcggcggcgctgctgcggcaaccaccactattgttaaaaagcagatggccgccggaaggttgcgtaatcgtcggatcatgcctttttctatcaggctaccgccttgggggcaaaggcgaaaaccaagccaccaaatcaaggagatccgcgatttcaaggggtggctggcacattccagcgctcgcggtcggtgaggaagagttgctcaggaaagaggtcagcgtaggcatgtttgaggggaaagccttcaggaacctcccgccgcaaaaggcattgggcaatgaacatgccccagccctggttttcgccctgcacccactgggtgagaaagcggttgtccaaggtctgcggcgtcaaataaagcgccttgattggatgctgccggtggatcgcttggaaatcaccctcggaattaaggggcagccacacgcatgtgcggttgccgtaccatgccacggcccaagggatgtcactcatcatcaattcatccggttgcatccacgcggaaacagcctgaatgacccgcggcgcgtaaggcgggtaggccatcatgggcgagcgcggaggcagcagcttcaccaccaaaggtgccatggccaccaacaaaaacccgcccacgaacaatggccgcgcctcccataccgcggcgcgcgcctgatccaaaagcgtgaagaaaagtgccacaccgaacatgaccaccaacggtgtcatccaaaccaaaacgttttcggaggagacctcgcgcaacgtctggcgcggactgcccgacaacgcctgaacacccgtcaacaacagcaatgacagtagtacaaacaacctcaatcgcgacaacaccggtctgcggaaaggcaccagcaagccgacaagaaaaaaggcgctcacccatgtgccgccgaggcgcggcaaatcttccggcaccacctggcgcaggccctgcaccagtttcagcggcaaatccaacgcctccacgtgcgtaaaatcaggctccaaagaccgcggcaacgtgcttgcaggaaaactcggggtgccctcgtacaacacatagccggccgtgccgaagaaggttccgctcaattcataattccgccacaaccagggggccaccaccgcaagagacaccagcgaggtcataatcagcgccaaccagcggcgcacgccaagatgcgccagcacaaacaccaccaccggcaaggcaagccacgcgaaggcatagcgggtcaacacgcccagcccgagcaccaatccggtcaacgcgcccagccctgccatgcgccatccgctgcaaaactcctcggctccacgctccaaccacaccaaacaccagatcaaagccagcgcccacaccatgaccaataaggtggagccgccgctcatgctcacgcgccacaacaattccgtgcccatcaacaccaccgcggtcagccaggccaccccctcatcgaacaaccggcgggccagtgcgtaggccatccaaaccaccacgaaaaacaacacttgattgagaagcacgatggccagctcgggcaagggccgcgacggctttgcatccgccgcaattttgtcctccaaaggaaaaagtttcatcaagcccgacagcaacaccgggtaggccggaggataatgcaagtcgggcatgggctttcccagttgggcgggagccagcaggcggtcaaaggcctggcgttgttcgggagtccagcggctttcgtccggcggcaacttgcgacgcgcatcctcggccttgcgcacggcctgtttttgaagcagatgcacggccagcggatgaatgcttcgggtgacatacccttcgccgcgggccaggttgcgtgccaattgagcctgctccatggtctcgggcagttcaaagttgcgccaagcccgcacgtcataaatggcggccagccctgccacactgagcaataacaaggcaaacttcagcgaccggttgccggcgccttccgtccaatgataaatccattcctggatacccgacataaatgatacgctctttcggggcccgcgcctccacttgcgcaagctgtgcaagccaacatggagacagccccgccctcacgcaagttatttttgaaaaacttgaatttataaacgttctttgaaccagcgtcgcgttttttcccacatggccggcgtgtacacgtggccgaggccggagatgatttcattttcgaaatcggcctccgcatcataaaggcggtagatgggacgaacggcggcgtctatggcgcggatgccggagaccggagagccggcgtcctggtcgcccgtcatgaacaacatgggccgcggtgccgccaaggccacaacagcctcggtatcaaagtgccgcagcagcccgggcacataataataaatcccgtggtatttcagcccctcggcggcgatcaaatcttgataacgtgtgaggcaggccaccgccacaccggtcttggggcggtcatccaaagccatgatccaccaagtgcgcgtggcgcccatgctgatgcccgttacgccgatgcgtgccgggtccaccgccggatgggcggacaaatagtccaaagccatcaaatcatcccgcaccatcatcccccacaacgagcggccgtaccaaagttgaaacttgctggcgctcaattcaccagcgccgccccgctcggaggggcccccgggcccccggccattgcgctcgccgaaacaataagcatcaatggccaacaccacaaaaccatcgcgcaccaacgcggggccgggaggctccggcagggcgttggtgcggaacagttcttccttgcccacgtcgtaatgacctccatgccaatgacaatataaaatggccggtttgcgcgcagggccgtccttgggaatgaggaggtaaccggggacagtatcgccagcgccgttgtcaaaggtaaatcgctccaaggtgtagtaggtgcggtcttcacgcgagatggtttgaaccaccggcaccttgggacgaggcggcagatcccccaaggtggtccgaagggtggtgcggatttggcgtcgctgtttttcccacgccttgatgttggctggcgccttgaattccggcaccggcggcgccgattgcagccagtgctttccggcggacgactgaggttgtgccataagatgatgatgcaagagtccaaagacggccgacagaacggcccatttcaagtcaaggaatcgcataacaaaaaattacggtttgatcccatcaacgcaatgccaaaaccgaattaactcagaaatcaaaagtcaacggagccgggaggtgtacaagggcgttgccgattcattgaatcatatttgtggttacccaagcacagattttaaggctatctgccaatcgctaagagtcggccccctccctggccgcttccattgcgccttacatcgccaccagacgcacatgctcactttgatgttctcacgatgatgattgttttcattccgcgattaaagcttggcccgggcgatggcttttgctaacgtcccgcccatgccagagattgccaattacgtgagccacggggcgcgattgatcacgccggccatcatggagcgcgtgctgcgccaactccccatatggaaggttgagttcacccaaatcaacgcccccaagtatccccatctggtcacccagcttgaatttctggtggacgcagtggaggacttcgccgaaggcgcagacaaagacctcccctacgtcgccgtcgccgaggccctctttgccctcatgtatgcccataaaaaagtggacatcatccccgacttcatggcagccctcggccacgccgatgattccagcgtcgtccgcgccgccttgattcaaaacgaaaaggcatttgccgcctacgcccaacgccaaaagcgcgactggaaacgcatctccagcaagccttgagattcagcgcccctccccgctgcgggccggatcgcgtgccgccaaaaacgccaccaaatccgccgccatcttttcactaaaaccaggcacctcggcaatctcctccacacgggcgcgccgcaatcgctgcaccgacccaaactttttcagcagcgccgtcttccgctgctctccaatccccggaaactcatccaaaatgctctctgaaatcttgcgcaatcgcaactgggcgttgtatgcgttggccacccggtgcgattcatcccgcacccgttgcaacaacttgagcgccccccggtcatgcggcagccgcagcggctccgactccccgggccggtaaatctcctcaaattccttggccagccccaccaccggcacatccccaagccccagcgcctgcagctccttgaccgccgcgttcaactgccctttgcccccatcaatcaaaatcaactccggcatactcccacgcccgccctcccgcaaaacacgcgtgtaccgccgcctcaccgcctccgccatgcacgcaaaatcgtcctggccggtcacccccttgatttgataacgccggtaacccggcctgtcgggccgcccctccacaaaccgcaccaacgacgccactgccagcgtcccgctgatgttggatatgtcgaacccctcaatcacccgcggcggcctttccaatcccagggccgccgccaagtccgccaaatccgcctccggattcagcgccacaggaagattgtgcggcgtccgcgtaaatgtccgcgtcttgcgcgtggtttcctgtagagaggccagcaaatcccgcaactcggccgcccgttcaaactccagcttttgcgccgcctgccgcatctcctcctcaagccgccccgcaagctcctcacattgccccgccaaaaaatcacacgctgccaacacttgtgcgcggtactgttccaatgtcacgttcccaatacaaggcgcagtgcaaaacttcaaatgcccataaagacaatgcttgtaatccgcaggcccgggattcaacggccggcacccgcgcaaattaaactgtcgccgcaccagcgtcagcgtcgtccgcaacgcccgcccgctcggaaacggcccaaaataccgggccccatcgtccgttcgcagccgggtcaaagtgaaccgcggaatgggatcctgcagattcaccttcaccatcggaaaccgcttgtcatcccgaaaactgatgttgtaacgcggcctcaattccttgatgagccgcccctccaacaacaacgcctcaggctcgctccgcaccacgtgcacatccaaatccgccaccgcctccaccaacgcattcaacttcaaatcccacgccatccgccgcgacggttgaaaataggagctcacccgcttccgcaaatcccgcgccttgcccacataaatcaccgtccccaggcggtccttcatcaagtacacacccggtttgtgcggcaactgggcgagcttctgtctaagcgcttccgacaccggcatgcctccattatgcgccccattcccctccccgacaaccgcgattccacgcctattggccaagtttattcagaatttggctttacccttaaagcgattgacaaagcccctggagatgggaaatatgctcatcagttgcggttaatctcgcactgacgtgaattagatttgtccaacaacacaaggcgggattggctgtttttttgctttggcatttgacagaaaaataagagctattgtttgaactaatatcggtatgaaaattgtctctccacaggaagcggtcaaagtcattaaatccggcgactgcgtacacatccacgccatcgcctgcgtcccccacaaagtcgtccaggccatggtggaccgcggtcgcgccggtgaaatcaaaaacgtcaccatccgccacctccacaccgaaggccccgcccattatgtggagcgcgacctcgaaggcgttttccagctcaattcctacttcgtgggccacaacgtgcgcaaggccacccaggaaggctacgccgattacattcccgtttttctcggtgaaacccagcgtctcatccgtgaaggctacaccccggtcaacgtcgctctcatctctgtttccccgcccgacaaacatggttttgtctccctcggcacctcagtggaagccaccctcgccgccgtcgaatgtgccgacaccgtcatcgccaccatcaaccccaacatcccccgggcctttggcgatgccatgattaagaccgacatgattgacatctggtgcgaggacgatgcccccctcgtcgaggccaatttcgccgcacccaatgaagtcgaacaggccatcggcaaacacgtcgccgccctcgtcgaagacggcgccaccctccaaatgggaatcggcgccatccccaacgccgtcctggcccagctcggcaatcacaaaaacctcggcatccacaccgaaatgtttgccgacggcgtcctgccgctcgttgaaaaaggagtcatcaacggcaaggaaaaagccattgaccgcggacgcatcgtcgcaaccttcctcatgggctccaagaaagtgtacgacttcatccacgacaaccccgaagtcatgatgatggacgtcggctacaccaacagcctcgatgtcatcaaacgcaaccccaaggtcaccagcatcaactccgccatcgaagtggacatcacaggccaggtctgcgccgactccatcggcaccaaacacttcagcggtgtgggcggtcaaattgacttcctccgtggcgcctccctttccaagggcggcaaacccatcctcgccatgccctcgcagaccgacaagggcatcagcaaactcgtccccaccctcaaggttggcgccggcgtcgtcaccacccgcgccagcatccactggcttgtcaccgaatacggcgcagtcaatctttacggaaaatcactccaggaacgcgcccgcctcatcaccagcatcgctcaccccaaccaccgcgaaatgctcgacaaggccgcctttgaacgctggggtccccatttccactacatcccggccccctggaaaaaatagaaatcctcaatcattcaccccgcgcccggcccccaaagccgggcgtttttttatgcccacacttgcccccccgaggctggcctcaactttttaaaattccatttgatgaaatccgcccccgcattcgtctaatcccgtggacctatgaacaaccaaatcaatcgtcgtcgtttcctcaaagccggtctctttaccacggctgccctcaacattgtccccggcggagtcctcggccttaacggccaaacccccgccaacaaccgcctcaacatcgccggcatcggtgtcggtggccaaggccacagtgacctccgccaaatgaaaagcgaaaacattgtcgccctctgcgatgtggactggcggcatgccgctggcacttttaaagaatggcccgacgccaaaaaatacaaagattaccgcaagatgctcgacgaaatggaaaagagcattgacgccgtagtcgtcgccaccccggaccacgtccacgcctttgcaagcatcgccgccatgcagcgcggcaaacacgtctattgcgaaaaaccgctcacccattcggtgtgggaagcccgcatggtcgcccaggtggccaaagagaaaaaagttgccacccaaatgggcaaccaaggccaggcctccgaagaaactcggcgcttgtgcgaattcgtttgggacggcgccatcggcaacgtcctcgaagcccacatctggaccgaccgcccctcgcaaggattgtttaatgaatactggccccaaggcgtcgcacgccccaaagaaaccccacccgttcccccggatttggattgggatttgtgggtcggccccgcccccatgcgcccctaccatcccgcctatttgccgttcaaatggcgcggctggtgggacttcggcaccggcgcgctgggcgacatcggctgccacgccattgaccccatcttccgcgcttgcaaattgaccgcccccaccagcgtccaagcttcctccacccgagtcaacaccgagacctaccccctcggctccatggtcacctaccaattccccgcccgcggcaacatgccacccatgaaactggtctggtacgacggcggtttgcgcccgccgcgcccggacggcttgcccgacggcgtaaccatgggcgacaacggccgcctgctcgtcggcgacaagggtttcatcctcggcaaccgccttttccccgaagctcgacgcaaagaatacaccgaccctccgcgcaccatcgagcgctcgcccggccattaccaagaatggattttggcctgcaaaggcggcaaaacaccaggcagcaacttcgcctttgccggccccctggcagaagccgtgttattgggcaacgtcgccctccgcgtccaactccgcgaggaactcacccgcaccaagctgctttgggaccccgtcgccttcaagttccccaactgccccgaggccgacgcctttctcaaacgcgactatcgcgagggctggaaattaatctaaagccggagcctgttcacaccgccttcaaggcggcttgcaaatagcccagcgcatacgccatgccggcgtgccagggcgcagcacaactcatttgcggggcgtgatcgggaatgatcacccccgcaaaaccgtttcgcttcaaaatccgcaaaacctccaacacatccacatccccctcgtctataaaggtttccttgtacgtcggcaccttgccccgcacattgcgaagatgcacatacgcaatccgcccctgccggctgtacgcatccaccgcctcatacacatccccctcggtcatttccgcaagcgtccccacgcaaaactccagttgattccgcgggctcggcaccaaatcaatcaaccgctggtataaatgcggttgatacaccaaccgcggctgcccgcgcaccgtcggcatcggtggatcatccggatgtgccgccaacgtcacccccgcctcctccgccaccggcaacaccgcctcaagaaattcacgacaccgccgccaaagctcctccggagtggccgggggtacgttacccggcggcgcgttcggatcgtaaatcatgttccaaaccatccctctcggcatgggcttgtccatcggcccattcattcctaccgcctccgcccctccacgggcaaacggccccttcacccgcccggccacccccgcgatggaaaagttgtaacccataattggaatgccggcggcaccaagattgcggatgataatcttcaagttttcaagctgctctgccttgcgcggcccatccaacaaaacgtcgtgccagtgcgccgggtcaaaattttcaatggcctccagctccaaccccgctgcgttgacccgccgtctcagatctgtcagctcctccaccgtccacaggtgatgcgggtccccagccagcccccaaccggtgtcatcgcccaccggctggtcgccgggacgattgctgcgcgaagaccggaaataatccaccaaatgcgccacgatatgcgtgcagccgcattggcgcgcaaaacgaaaatgctcgtcatccaactgatgccggtaaagccccagtccaagtttcatgcgaagtcagaattaaaaaccaatgctcgcccccccatccaccggcagaataattccagtgacaaattgcgccgcaggcgaacacaaatacaccgccgccatgcccacatcttcaggcttgcccagccgccccatcggagtacggctcaatattttttgacgacgcgccggatcattcgccagcgccttctcagacatgtccgtctcgatccacccgggcgcaatggcattcactcgaataccgtgcggagacaattcagttgccaacgcccgcaccatccccacatacgcactcttggctgcactgtaggccaccacatacggaatcccaaacagcgatgccatcgaagcaataaataacaaactcccccgcccccgctccaccattcccggcaccaccgcccggctcagcgcatgcgctcccaaaacatgcgtcgtcaagacctgcaaaaactcctcctcagtcgtttccacagccggttttttcaaatgaatgccggcattgttgataagaatggtgatggagccatgcttcttttgcacccgctccacaaacgccggagcctcccccaattcatccacatcatgcactgcatagtccgccagcggcccaatcgtccgcacagccgcctccagtgcagcctgccggcgccccactaaaaccacacgcgccccggcagccgccaaacaccgtcccatcgccaaccccaaaccgctccctccccccgtgatgaccgccagctcattttgcagccggaaaggacaaggccacccttccaaatcacactcggacaccttcgtttgatgaatgttcagttgttcgttcatgatttcagcgccgcccgcctatggcgaacagcatcgggccggtaaatgtgggcacgttggcttcatttggcaaatccgaacctccccaccgcccccatccttcaaacctcatccccgcggccaaagtcgaaaccaaaacttcatcggcgcccgcaacaacaaatcccgcaaaagatcctcaaaccccgccgccttcggttccaccagccggcgcgtgctcaacaaagccgccaacgtcaccaacgccgccgccgcaaaaaagatgctataccgattccattccaccccggttgtttgatgccggaaatcaccgatggcatcaatcatcatgccccacaatatcggagccactccttgcgtgacgttccacgccacagaaaaaatcgcaaaaaaatggttgcgccccatcaccggcaccgacgccatcgccagccgcgtaaaagccatgttggccgaagccgcaaacaatcccatcgcgcccaacagccccatcaacaaaaccggcgacaccgccacgacgttggccgccatcaaccaccagccgcccaaaatcaaaacaaataccccaaacgccaacgccatcaccggcctgctccccagggcatccaaccggctgccaaacaaccaaagacttcccatccccccaaggtacaaggccgatgatagcaacaaaattcgcccctcggtcagcgctgcttccgtcttcaaataagccaccggaaacgcctgcatcccaccatacaccaccgcccacaacatcaccgtcaccaacaaccgctgaaacggtggatgccccaaaatggccccccacggcacttcccctgtccccccggccggttcttgcggcaccggcacatccggcatgcgcttgagaaaagtcagactggccgcccccgccaccgcgctgaaaacaaaaagcaaactgaaatggacaggttgaggattactccccaaaaacaaggcagccaccaaaaacaccacaatgctccccaagttgaccaccgccgcatcccgcgccaggtaacgcccccgaatctcttccgggacaaggctggtgatccacggcagccacgcacaactggaaatgccccgcgaaagattaaatccaaaaagcaaaaacaacagcagcgcaagctgcgtgcccttgtccaaaaatgcacccagcagcggcaccgcggccatcccaaaaataaacgccactcgaattccccatcctgcatacacaaaccgccggaaaccaagccggggaatgtattgcgcagccggtatttgaaaaataacgagcagcggcatcatgctgaccacaacccccaacaccgtggcgctggcccccaaactccgcgcatacaacaccatcgggctgctcagcacgatttgaaaggacagcgcgttgaacaacgcaaaccagtaagcgttacgaaaacccggaggcagtcgcggcgtttctgtcgttgttgatgttgaaacaggcatggaatttttggacaaagacgggcgcccacccatcaatatccccgcaaagccgtgcttgaccgcgcaggcaatccgggcgctggcgtccggcgaagcaccacatactcaatcccgttggcctcgcaaaacgcccgcttctccggtttgtcaccatcttcattgacggcgtaaatgtccgggcgcaaccgccgtatctcgggctcggcatccaaccacccccatcccgaagtaaccaacgcctgcgtaacgtgccgaatgctggccaccatataccgccgctcattctccgtctgcattggatggccttcccctttcaaatgccgcacattcgcgtcattccccaccgccacatacaaatccccaagcgcagacacctcctcaaaaaaccgcacatggccggagtgaagccaatcgtaacaacccgttacaataacctttttacgccccggctgaatcacccccattggcacctcgggaaaaccagccaacgcctcctcaggcaaaacatccgcccgccagccgtgctgctcacataactgccgccgctcacgcgaatcttcttccaccgggtaaacccaagccgccgcagccttgggtgccgcctcgggcacccccacattagcccccacaacttccacggcgctgacaaaccgaatggcttccacaaaataccggcgctcagccagaggaaatttgggcggacgccccgtcgcacgcaccaccgacgcgtcatcccacaacaacacatgcacccgcccccggcgcgccgcttcctgcaacaaccgcacatgccgggagcgcaagtcatcaaaagtccctgccaccaccactggaagttgctcattcatgcgttaaatccggatgcatggatgaaatgcgccgggtaccggttcctccgacaccacatacaaataaccaccaccacaccccgaatacatggccccggcataacgcgcttggtaatacttcaaaatggccttcaaatccaccgtcaggaacggatgccgcaccgtgttcggcagcagatattcccaacaatccatgcactcgttgagcgagcgccccaaggcccccgcatcccgtgcaagaatggccgcataacaatccttgcccgtttgcccaagccgccgcacccattccggctccaaacgctgctcgcccaacggatgataaccggggggccgcggcgcgatgggaagaatatgcaggacatgagccaaccactgcgcaatctccgaatcccggcaactttcaatgtgtttgggaaacagccccccttcatgcccggcatcataatccaaacgattgatcccgggataaagcagtccaatcatgtcctgcgaaccggaaggatcacttttgccttcgttttcggcgttgtaaagttcacgcaccaaaacggcaggctccccctccggcaggctatccccccacaattttcgcgccacagcacgtgtgcccgtggccaaaccagcccggtccatccaaggcggcaccggctccagattcaccaccaccatggagccgggcggcgatggattccaccgcgacacaaagggctggtcaatccaacccccggccaaggccagccgatagggcaggtttccccaaggtggtgttggtgtggccccaccggcaggcccggcggcatggcaaaagttggattgggagctgcccatccgttaatacaaatcccgtacggtgtcctcaccggcctggcgtttccggtattgatcctcaatccacttgtaagtggttttcaacccctcgcgcagcggtatggaaggctcccatcccagcatttgtttgatgaaagtattatcgctgttgcgccccgccacgccgcgcggagcattgagatcgtaatgacgcttaagtttcacaccaccgatttcctccaccaacgaaacaaggtcattgatggaaatcatctcgctggttcccaagttgaccggagtggccttcagcgcatcggtgtgcatgatcatgtcaatccccaggacacaatcatcaatgtacatgaagctgcgtgtctggttgccgtcgccccaaatttcaatctccagctttcccgtggccttggcctcgatgaccttgcgacaaatggccgccggcgccttttcacgtccaccatcccacgtgccccatggcccgtacacattgtggaaacgcgcaatgaacgtcgccagcccccgctcggcggtgtactcctggcaaaacatctccgacatgagtttttcccacccgtacccccgctccgccatggccggataagcatccgactctttcagcgcacggcagttgggatccttctgcaattcggtgttgtacgcgcaggcggagctcgaaaaaaaataccgccgcactcccgcccgccaggcatgttcaatcaaatgcgtgttaatcaaaatgctgcgcagacattccacgcgaaaccgctcaataaaacccattccacccatgtccgcagcgagattgtacacttccgcagccccttccacggcgcggcggcaattttcctcaaccttgaggtccaagctcaattcctccaccccgggaacccgctggtaccaatgcggcagcggcttccgatccaccgcccgaatccgctgataacccaagtctttgaagtatcgcaccagcgcgcccccaataaacccaccggcacccgtgacaacaatcaattcatccttggcggcacggttttccatccacggacgttcagttttcgcacaaggggctgagctggcatcagttttggtttgtgtttgcatagcctgtatccattcaaaagccgcgccaaactatcattgctcctccccgcttggcaatgaaggagatttcctcctttcgttcacaccgccgccctgctatccctctgatggcatggttgcgcgcgtgacacttgaaatcgccctgcgcaaagagttcgactacctcatccccgccgacttggaaccattggtcgaaatcggcacgcgggtgaaggtcccctttggcggacgcgaagtctcaggctgcgtcacagcgttgctcgatcaatcctcccacccacgcctcaaacctatcatcaaaatcctcggctcccccagcctggtcacccccaaagtgctggcgttggcccgatggattgccgagtactattgctgcgcaccggaagtcgccttgcgctccgttttgcccgaggccgttcgccgtgaaaaagcgggatggcgcgagcgcctctgggtccgtgtcatcccccgcttgggcgaaatgcccaaattaactgcgcgccaggaggaagtctggcgcgtcgtggaagaaatgcgcgccctgccaatgcaaaaattggcagccttgaccggcgccacacctcaaaccatccgccgtcttgaagacaaaggtttgattaccatttcacccgaagtggacgaacgcgacccctatgccaccgaactgattctgcccacccaacccctccccttgaacgccgagcaggcgcgggccttggaagccatcacccgctccatgggccagcccggccaaccgcccccggacaaacccacagtctttctgttgcacggcgttacgggcagcggcaaaaccgaagtttatttacaagccatcgcttacgccctcagccagggccgcggtgccatcgttctggtgccggaaatctcgctgacgccgcaaaccgtcgagcgtttcaaggcccgcttcagcagcggcccacatcaaactctcgtggccgtcctccacagccacctctccgcgggtgagcggcatgacgaatggcataagatccgccagggccgcgcccgcatcgtcatcggcgcgcgctcggccatctttgctcccgtcgagcctctcggcctcatcatcgtagatgaagagcacgaacactcctacaaacaggaggaagcccctcgttaccacgcccgcgatgtggccgtcgtgcgcggaagccgcgaaaacgccgtcgtcgtactcggctccgccacgccatccctggaaagtttctacaatgcacgccgcggcaaatacgtcctcctggagctgccccaccgcgccgacaacaaaaaaatgccggtggtccgcgtcgtggacatgcgggccgagctccgccgcgaacgcggacagctccaggtcttttcacaatcgttgcgcgatgccatcctgcggcgcctcgaacgccacgagcaaatcatcctcttcctcaaccgccgcggttacgccaccgccctggagtgcccccaatgtggctacgtcgcccaatgtccccattgcagcgtggccctcacctcccaccgcccacaagcccacctccgctgtcacatctgcggttacaacgccgaagctcccacggcctgccccaacgcacaatgccgcaaccccgccattcgcttcgcaggcctgggaacccaaaaagtggagcacgtcctcgctcgcctcttccccaccgcccgcatttgccgcatggactccgacgtcctccaaagaaaagaggactaccggcgaatcctcggaaacttcaaggccggcaaaattgacatcctggtcggcacccaaatgattgccaagggcctgcacttcgaaaacgtaactttggttggcgtcgttcatgccgacatgggattgcacctgcccgacttccgcgccggtgaacgcacttttcaattattgactcaggtggcaggccgcgccggacgcggcgaagtcgaaggcgaagttttcgttcaatccttcaccccctttcatcccgccattcaatatgcgcgccgccatgattttgcgggtttcttcgagcaggagctcgagttccgccaacaactgcgctaccccccctttacacgcatggcccggttgctttggcgcggacgcaacgaagaaaaagtggccttttttgcagagcaatgccgcaaaaagctcgaagcgttgactcaagagctccccgacttgatggtggccggcccagccgccgcacccctggcgcgagcggagactttttaccgttaccatctgacgcttcgcacccgccaaatgaccaagctcagctccgccctggcaacgttgttgccaaccatgcccttgcccgaagacgtaagccttgtcgtggacgtggaccccgtcacgttgctttgactcaccttctttaactcacagctcacctcttgggcaaccggtcgaaagcctccagcgccacctcccgcgcaatggcatggttgacaatcggatgaggataagtccgccccaattccacaccggcctgcttcagaacatcagcaggcgcctcccatggccggtgaatccatgtctccggcagaccggcgagctccggcacccaccggcgaacatacgcgccacccgcatcaaatttttccccttgggacacaggattgaacacacggaaatagggcgccgcatccgcgccgcaacccgccacccattgccatcccagcgtgttgctcgccaaatcggcatccaccagcgtgtcccaaaaccatcgtgctccgtgccgccaatccaccaaaagatccttcaccaaaaacgatcccacaatcatccgcacacgattatgcatccatcccgtagcccacaattcccgcaaacccgcatccacaatcggataacccgtccgccccttctgccacgcccgcaaaacctccccaacatcctcccgccacggaaattttttgaagttgggccgcaacggctcctccggtgtatggggaaaatgccacagcaaatgatacgcaaactctcgccaccccagttccgtcataaacggcgaatgaagccacgccgcatccgcgggacgctgcgcctccgcccaccgacgcaaccgctgcccgatttggcgcgggctgatttccccaaaatgcaaatgcggcgaaagccgcgaagtccccacctctgccggcaaatttcgtccctcggcatatcgcacaaatgccgactgcaaaaaccgctccaactgccgctccgccccctccggcccgggctgccacgtagcgcgcaatccaccggcccaatccaccttgggctccaattccaactcttccaacgcaaccgatttcggccaccccttgggcgcaggcaattgctctggcgccggcagcggctcggaaaaaagtgtcgcttgcgtcaaacaatgtttccagaaaggcgtgaacacttgaaaaggttgcccgctccggtttttcaccgtccacggctccaacaacaaagcagcattccagctctccacctccaccccttgagcacgcaacgtttccttgatgcccttgtcccgcttgatgatcgcaggctcataacgccgattccaataaaccgcatcagcgcccgtttccttgatcaacgcttgcaaggtggccaagctcccccctctccgtatcacaagcccactgccccggcggcgcagtccatcctccaaagctcgcaacgatggatgcagccaccatttcgacgcaccccccggcggccaatctccctcttcctcaggcgcccaaataaaaactggaatgaccggctgcccccgtcgggccgccgcgtgcaaagccggctgatcttcccaacgcaaatccagccgaaaccaaaccaaggtggcactcatgatttcccctaaacaccaagccaatggataattaacaaacgccggttggatacccgcccatttcaaaaacagttcccacgaaataatactagtgcctcaacgtcgcttttccaaaccacgcccccgttgtatgagcagctcgcggctgtcgggcggcacgtcatatttctgtgtctctccccacggccaccgcacttccactgcttgagtgtccgccggcaataacaacaccgcgctgtcctgtgaataccatcccccgcccgcatgaacttcccataccggccccgccgcattttgacgccacgcacgcacctgcgccccaacacctgtcggattcatcggccccgccgataggcgcactcgcaaaccaggccgtgcactgacgttccgataaagccgcgtttccgccccgttctgagtcacggccaaatccacccgcccatccccgtcaaaatcagccaccgctgcgccacgctgttcaccatacactttcacgccggtccgtgtgccctcagccggttccagttttccctcgcccgtgttgcgcaaccacaaaccgcggccggcatccaatcgcgtaacccccgcctgcgtggcaaaaaagttctgactcaaaaaaacatctggccatccgtccccgtccatatctgccgcgcagacactccacaccggcgcccattgagccatcggtggcaacggcgcaacttcccagcgttgggcccgattgaggaaacgatgcgtctcaagcgtcaccgctttgagctcatgcgccgtcttgaatttttccccaagcaaatcagccacagtggccttggcgtacaaggcatgcttgggatacttaggcgcaagaaaaggcagccccactttgttatccgtcaacggcctcctcggcaccacccgcccgggtgtcagctcctcgtaagcctccaacaaatccacctgtcccaaaccattgaaatcgccgtaataaagccgcgcaggaaactttggcgaagcctggtagtggctgttaagcccccaatttccagctacaagatcaagccgcccgtccccatccaaatccaccgccgccaaacccgtccaccatcccgtccatccctccaaccccagctcccgcgtcacttccttgaatgtgccctgttcattgaagaaaacccgcaccggcccccactcacaactcaccgccaaatccggacgcccgtcttgattgaaatccgcaaatatcgccgccgtcaccaaaccaagctttcggaaaaccgccgcatgacgtgcatccgctttgagcaccccttgctcattcaagtacaattgcgaatccaccggctcaggatatcgcccgggggaaacacgcccccccatgaacacatccaaatctccatcgccgtccacatccgccgcagccaacggccccacactttgccctttttccgcaggcaagacggtggaggcccccccttgcacagcaatcagagccttgctgccctgccccggctccaactcccaactggacatccccaccaccagcgcccgctgtgtcggcgcaagctggatgcccaacagcgacgtcgtatcctggttttggattccgcccatgtccggcaacagcgtccacccccctttaccgtcattccggtaaatgctgattttccctccagcgcccgtacccacaatcagatcatcccaaccatccccatcccaatcataccacgtcacccccggcccggattgactcagacggttgggcaaaagcggctgccgcgcaaaatcatcgtaagccacttcatgatgacgatgccccagtttctccgaaacatcctcaaacatcaacgccggcggcgcagcccgtggtggcgccggatttgccacggcgctggattgggcaatttcataaacccgattgggacgcgcatccgcaatcaccgaccgctgtcccccgggccacaccacttccacagtcagacgctcagccgagcccgccgcaaatgtgcggaccgtatcatcacatccgagataacgccccccggccaacatctcctgaaactgcatcggcaccgctccgccacgcaccgttacccttgcattgatgccataggtattgggcgcaagcccgcgcaaacgcaccgccacccgcggcgccggacaattgttccgataaaccagtgccggcgcattcaaacaattcaccaccacatccaaatccccatcgttgtccaaatccgccatcgctatcccatgcgaaatctcttcggcatgaaatccccattgcctccccacttcttcgaaccgcaggttaccaagattccggtaggcgtaattcggacttaaatacggtggtatttccagtagccgcgcccgaaattcctgcaggttgcgctcctgcgaaactgtccccgctgcatcgagcatgtccatgtcattcacattgtgggagtagccggtggtcaccaaaatgtcctcaaacccatccaaatccacatctaaaaacgccggcacccatgtccaatccgacgccgccacctgcgccgcatacgccaattccgcataggtgccatcaccccggttccattgcaaaacattgcgcgttgtcagtatccggttttcaatcgcacccacaggcggatggacaaatttcatgccggtaagctggcgcatcagacggtcatgcgtggtgggtttcatctccgtacagaacaaatccagcaacccatcccggtccaaatccccgaaatccatccccatgctcgcaaaacacatcgtccgcaccgccagccacggcaccgcccgaaacacccctcccccttgattcaaccaaaacctgtccggcgtgtgaaaatcattggccacatagatgtccacccgcccgtcgtcgttcaaatcacgcaactgcaccgtaaatccgtaatccatcaaattggtccggatcggctgcccattctcatcaagaaaccagttcgcccacgattgaaggacaaaacgtcccccgccttcgttgatgtacaaatcatcctgctcgcccacctcaatcaacatgttcccctcgattttcaatcgccgcgcccaacgccccgtgaccacaggacggccattcacataacgcaccgagtaattgcccccgccgcgaagtatggtctcctccccgtaattggccacatacaagtccaagtcgccgtccccatccaaatcccccaaactggcactcgtacccccgcgagtattcgtgaatcccgtatccgtcttctcggtaaaatgtccgcgaccgtcattcagaaaaagccgggcgccccgtccattgaatgtcacaataagatcaaggtccccatccccctccacatccgcaaagacagccccgcggctcaactggttcaccagccccaacccgctgctcgccgtcacatcttcaaatcgccagcctcccaagttgcgatacagggtattggtgccattaaggctgcacaggtaaatgtcacaccacccatccccatccacatcccccaaggccagccccgaaccattgatcaaattggcatttcgggcgtcactttcgggagtaagcaggttgacaaatgcgatgctggtttgttggggcggcatccgggtaaatccggcggagaaatttgtggcaaaagacaaatcgcgatacttgtaaccgttggcgactttccagtccaatgccggagcacccatcaggccatcgctgaccagaaggcaacacgccaacatcgcccattgtccggccttcccggcagaaagccgccgattgcgcaccattttttgcatcattacgggtaagtagcgcccgcaaatatgcccaatcgcaagggaaagacaatgagatttggtctctttccacgcacaaattcactgttttccgcaaaaacgcccccttcaaggggccaccgtcagaccagagggagccctcaagcggtagccatcggaaaacgtcaccgtcaacggcgtggtttgaaaattataaaccgcatacgtcttgcgcccctccttgcggtacacattgaaaaaaggataatccgccgtcactcccgtgtcattgagccccaaacggtcaagggtgtgaatccattgatacataaaggcgcgggtattgccgctttcaattttgttttccgggtgcgcctccaaatacgcagcagcagccgccggctccgccaacgcgcggaacatcaacaccaaatccccccaacccgtgttgtaatcgctcccccctttgcgccgcgccacaatccgatcatggttctttttcacatacgccggagaccgccccatataaacactggccggcgtaaacggcaaccagttgatgccgtgaatgcaatctatgtccccggaaaaccacgtggcaaatgcccctttgccgccccacaccatccccaacgccacctccggaaaatcctttggaaaattcgtgcccgccacgtcaaaccagtattcctccaccgcagtccgctcgatattgaacaaggccaaacccgtatcccgcaaagcacgattgccggtggcctccccccacaacatcactccataccacgcattgagcgactcactcgatgactcctgattgttgccatcggcaaaattcgcatcgcccgatgcccacgagtgccccgcgtatttgtcaaaacaacgcaaataaggaaacatggcatcccgcctgtcggtcgcggcaatgtcacgaatcaacatttccaccatcggcccccaacgccgcgcccaccccgcatccttccgggccacctccgctgccgcgcggatgaaatagccgtaatgaaaatgatgatcattcagtggtaaatcgcttccgtaagatggccggctcccaaccagcgttccccaacgtgcattgtaatagaataccacctgctccttcccgggcatagcgctaaaccattgctccaaacgccgcttgagctcgccaagaaagacctcctgcaattccggcgcccccgcagcctccgccaccccgctcaaagtcgccagcttgccaaggtgcttcccctcccaataagtatccccaaacccggccggtttcttgccggcctcagcccgcaaaagctccaccgccttctcgcggctggccagcccctgcccgggtaaaaacggcagcaatccctgcacgggtatctgcgtggtaaatccagccccctcgcccactttcatcaatccccgtaccgaattgtagctgagctccgtcaacggactgcgcacatatttccactgatgcggatacaaggcaaaaatcgtccccacgtcagccccctcctgcggtttgaacgcataccggtaagtcgcgcgcacattcccgccttcatgcacatactccaaccgcgtatccaccacgtggttgtgggcaaacctggcaaaacgcgccaacgtctccggcttgtcatccggcaaaaccgccaccgtaaaatacgttttgcctccggcaaaattggtccaacttcgcccctccaatcccgcccaagtcgagcctcccggaccaaaaagcccgtaatgatgaccattcaccgtgatccccagcgttgcctcccgccccgtgccgctccacaaccgcggcgtctgcgaaaatgtcaccaccggctgcccatcgctataaacacaatagacatacggactgccatgcccaaagctcgtgcgcaaccgcgccttgttggtctcaaaaacaacgctcacaaaccaatccgaccaccccccgcacaacgcctcgggaaaattcgccgcagccgagtgccccaacattaaatcgccctgccttccgccgccgctgccaaaaatccccgccgaggttgcgctcaccctggccccatgctggcttattgccagtccgttggaggtacaacgcagcaccaacggatgcgcaaaaagattctgcgaatacggctgccacaccaaagaactccaccactgccctgtaatcatcgggcctcgcaaatcctccgtgcgatatatccgctccggcagtgccttgcagggacgcggcgccgaactgaggtaacctccctcacccactttgatgaccgccgacccgtcgggcgtcgccgaaaaacctggagcccctcccaccaaaagcactacccaccccaacaatccaaaacgcatcacacgcagcagactgcccccatggtgaatcataaaacagcggatgttcatggcgcctacctttaagaatttcggcgccatttgtccaaacaaaccaaaaaagccagcggcccacctcccccccgaagacctcaaccgccctgctcagccctcagccaccggccacaatcttgactatctccagcctgtcgccctcctgcaaccgccgctgcccaaactccgagggcgcaagcgcctccccgttcaactccaccaccacactgcgcggatagaacttttgggccaccaaaaactcttccaccgtgcagggaagcacggcctccacagactgtccattggcaataacttgaggcatggcccactcacacccccgccagcgcctccgcaggcgcagcggcaatttcatccatcgtcaaatagcaacccggatcttccgcccacggatccccaaatacctgctcggcacgcacccggaatccgcccccgcaaatctcctgaaaacggcaaatcccgcaccgtcccttgagcaaaggccgccgattccgcaaaccattcagaatcggatgatccgttcgtgtccaaatcttgctaaacggcgtctccttcacattccccaaggttaccgactgccaaaactggtccggatgaacattcccctgcgtgtcaatattcccaatccctacccccgaactgttcgcgccgccgccgttccacttcaacaaatcataaacttccttggcccgcggcgattgctcccgcaagagccgaagataaagaaacgcattatccgccggctggtccaccgtcagcacctcccgcgtctttccgttctgattccattgcatcgtgcggtcaatgatccggtcaatcgccgcccgtgtccgggccggcggcacactcacaaggttggctccccgcccgctgtacaccaaatggtaaaaacaaacccggtcaatgttctcaaattcaatgaaatccaagatgcgctccaaatcatccaccgtgttgcgcgtcagcgtcaatcgcagccccaccttttgccccaccgccttgcaattccgaaacgcctctatcgtcttttcaaacgcccctttcttgccacggaaataatcatgtgtatccccaatgccatcgagcgaaatccccacgtaggaaaaacccagttccttgatttttttcgctgtggacaggtcaatcaacgtcccgttggtcgaaagcgtcaatcgcagtcccttctgcacggccctcgaagctagatcaaaaaagtgcggatgtatcaacggctccccacccgacaacaaaaccgccggcaccttgaactccgccaaatcatcaatcaccgcgttgcattgctccaacgtcaattccccgggatacacctgtgccgtggaatccgaatagcaatgaatgcaattcagattgcaccgccgcgtaatgttccaaaccactatcggccgccgctcagacgcagaacgcggggccccgtggccctggccatatcgaaggtgatcggcgggctgggccacgccacaatacaaacgtgtcagattcagcatggtactaaaatactagacttcaacagtgccctccttacgaggccgcaggcgcaggcgcagccgcaggatggtattgcggtgaaacgtaggcgcacaacggctcctccccaagataatcgccggtcagcgcataagcacgagcgcgcgagccgccgcaaatgtccttgtactcgcacaccccacatttgcccttcaaaagactggaattgcgcagattgcggaacacttcatgattccggtacacctcaatcaattcatccgtacgcgcattcccgcccgtaatcggcaaaaatccgctgggctgaatctccccaatgtgggagacaaaaacaaaccccttcccatcattgatgccaatcggagcgcgctttttcagggccttctcgtcatgcaattgctgcaacaccacccgccggtagtgatgcccctcggttgtcttgatgtcgtacggcacccgcgtggacaaatgcgccagcttgacgaacaactcctccatctcaaacgcattcaacaaatccgccaccttcccccgccccgtcggcacaagctgaaatacactccacaacaccggcttgatttcctcaagcagcttcacaaatccgtcaaactccctgaagttttgcttcgtaaaggtcgtgttcacctggacttctatcccagcctcacgaatgttctgcagcgcctgcatcgtcatgtcccacgtccccttgatcccgcggaaacgatcgtggctctcacgattggccccatcaatgctgatggaaatgcgcgcacaacccgcctccttcagccgcttcaaatcggcctgcaaaaacagcggcgtcacactcgggctcaacgccacccgcaaccccttgcccgtcgcatacgccacaatgtcgtacaggtccggccgctgcatcggatcgccacccgtcaaaataaaaatcgccggacgcgcccgcaccacctgatccacaaaacgatacgcctcctcaccatccaactcctgcgggtgacggtggaccttggccgccgcacggcaatgccggcacaccaacgcgcaggcgcgggtcatttcccataccaccaaaaacgggtggtcgttaaaatcaaacatcggttgaccgagcatcggtatcatatctacttcgtcggccgccaaacggccatgactcacatcaagcttaacgccgaatagtttcgcgtgcaatgaaatgagtcgaattcgccaaaaaatggtcagccacctcatcccctgcttctaacaccccccacaagaggccagatggagaagtgaaaaaacataaaaaaaaatttttgacaaaccgagcaagcaagccatattaacgacagatttagtcgttattaggctaaaccaattaatatcaacgcatggccgaggggcttacggggccttcggctcatttaagtcgtctaatgacgacataattagtcgtatatgcagaacaacgccattgagccaaagctctcgccaaacgaggctctcaaagcctcttcccccaccctcgcaggcacgttggcccaaaccttggccgaccctcaagccgaccatttctccgaggaagatgcccaattcctcaaattccacggttcctatcaacaagacgaccgcgacctccgaaagcagggcaaaaaatttattttcatggtgcgtgtacggatgcccggcggcgttttgaaacccgagcaatacgtcgcactcgacaagctggccaccgattacggcaacgattccctccgcgtcacctcacgccagggcatccaatttcatggcatcattaaaaccggccttgcccgcaccattcgcggcatcaacgaagtcatgttgaccaccctcgccgcttgcggcgatgtcgtgcgcaacgtcgtaacaccgccgccggtgctgcacggtttggtcggcgagcaggtcctggacgatgcccggctgctctccaaatctctcttgccgcagactccggcttaccatgaaatttggctcaacggagaaaagctccaactggaatccgaagccgcaaagaactttgaagaccctctctatggcaaaacctatttgccacggaaattcaaaatttcctttgccattccaccggtcaatgacgtggacatctttgcccaatgccttggcttcattgccatccaagaggacggcaaggtcagcggttacaatgtcgtggccggcggcggcatgggccgctcgcatggcaaccaccagactttcccaagactggccgatttaatcggctacattccccgtgaggcggtggaagccacggcctgggcagtcgtcggcatccatcgggatttcggcgaccgcgccaaccgaaagcatgcccggttgaaatacgttctcgctgatcgcggcgtggactggttccgtcaacaattggagcaacgcctgggcttcgcactggaaccggcacgccccttcgtcttcacccgccagggagacctctacggatggcggcaacaacccgacggcacttggattttgggcatgttcatcgagaccggccgcatccgtgatacagaatcgcgccgtttgaagacggccctgcgccaggtggtggagcaatttggattggaagtccacctcacccccgccaacaacctgctgcttgttggaattcaagacaacaaacgcgcagacgtgacccgagtgttggctgagcacggcgtggaccctgcccaacgtgtcagcgccgtgcggggcgcctccatggcctgcgtcgccctgcccacctgcggcctggccttggcggaagcagagcgttttctcccccaattgatgacgcacattgaagaagccatgcaagaaacaggcctggccaacgatgaaatcatcatccgcatgaccggctgccccaacggctgcgcccggccgtacatggcggagattgccctggtgggcaaggcgccgggacgctaccagctttttgtcggcggcaatcccgccggcacccgcttgaaccgtgtgtacaaagacacggtcaaagaaactgaaatcgttgccgaactaaaatccctgttcgagcgttaccgccgggaacgcctggccaacgaacgtttcggcgacttcgcagcacgagtcttgtggcttgagaacgccgctcaaaacaatcaagcgcccgcggtggtgggctaacccatttcgaccatgttaaccgaagtagaaataaaaaactggaacgaccactggaagggcaagccagtccaagaactggccgagtgggccatcgtcttgggacgcggacgcgcagtggtcaccaccaatttccgcccttacgaggccgtgctgttgcatctgctcacgcgtatccagccggacatccccgtcatttgggtggaccacggctggaatcgccccgccacttatcgccatgctgaagatgtaacacgccgcttgaagctcaatttgaaagtgtacacccccaccatgaccgtcgcccgctatcaggccctgtacggcgacccgccccaccccgaccaggaggaggccctgcgccaattcagccaaatcttcaagctggaaccctttcaacgcgccatgcgcgaaatggctcccctcgtctggctgacagcgctccgccgtcaacaaaacccgcatcgcgccggcatggatgccatctcactcgatgccaatacggggcttttgaaaatcagccccctcctggaatggacggattcagaaatggacgactacctcaaaaaacacgatttaccggtggaatgggattacttcgacccggccaaaggggaagaaaaacgtgaatgtggcctgcatgtccggtgggaccacgcccaaacggggcgttaaacctcccgctcattccttgaagacactcggcccatacacagcaagcacatcgttaaaccctgcacccaaacttttcgatccatgaccagctatcacttggaccatttgcaacacctggaaacggaggccatccatgtcatgcgtgaggtggccgccgagttcgagcgcccatgcctcctcttctccggcggcaaggactccatatgcctgcttcgcctcgcagaaaaggccttccgcccttccgacatccccatgcccctcctcaatgtggacaccggccatcactttccggaattgaacgaattccgtgaccgccgcgcccaggaattgggagccaaactcatcgtccgtaaagtcgaagacgccatcgctcaaggtctggccacgcccgcccccggcgaaatcagccgcaataaactccaaatccctacccttctggccgccatcgaagaattccgtttcgatgcctgcatcggcggcgcacgccgcgacgaggaaaaagcacgcgccaaagagcgtttcttcagcttccgcgatgccttcggccaatgggaccccaaaaaccagcggcccgaaatctggaatctttacaacgcacgcgtcaacccgggcgagcacatgcgcgtctttccgctcagcaactggaccgaactcgacgtctggcaatacatccgtcgcgagcgcctggaagtgccctccatttatttcagccaccgccgcctctgcgtccgccgcaacggccaatggctgcccgtaaatgatttcttgcccccgcgccccaacgaagaagtgcgcgagctcgtcgtgcgcgtccgcaccatcggcgacatcatcagcacgggcatgattgaatcccgtgctgacagcctcgaagacatcatcgccgaaatcagcgccgcgcgcgtcacagagcgcggctcccgcgccgacgataaaacctccgaagccgccatggaggaccgcaaaaaagcaggctatttttaagggttaaccaagggactgaacatgcaaacctcattgtcaacagaacccaaaagcgccattgccatcggccactccgccgaacactcacgccccgcgggacacgccgtcgaaatcctccgcttcaacacctgcggctcggtggatgacggaaaatccaccttgatcggccggctgctctacgattccaaatccttgatggaagaccagctcgaatccctcgagcgttccgccgaaattaccggcggcggtcaaatcaacctggccaacctgaccgacggcctccgcgccgaacgcgagcaaggcatcaccattgatgtcgcctatcgctacttcgccacaccccgccgcaagttcatcgtcgccgacacgcccggccatgtccaatacacccgcaacatggtcaccggcgcttccacagccaacctctccgtggtgttggtggatgcgcgtcagggcgtcaccgaacaaagccgccgccacaccttcatcgcgtccttgttgcgcatcccccacctcatcatcgccgtcaacaaaatggatttggtggactggtccgaggaccgtttcctcgaaatccgcgaggcctttgaggcattcctgccacgccttgacatcaaggacgtgaaattcatccccatcagcgccctcaacggcgacaacgtggtggagccctcccgccacaccccgtggtattgcggccccacccttttgggacacctcgaaaccgtccacatcgccagcgattacaacctcaacggcttccgactgcccgtccaatgggtcaaccgcccccaagccccccgggacccgcgctaccacgacttccgcggttacagcggccagattgcaggcggcattgtgcgggttggggaccccgtcctcgtgctccccgccggcctcaaaagccgcgtcaaagaaatctggacctacgacggctcactccacgaagccttttgcccgcaatccgtcaccgttttactggagcacgacattgatgtgagccgcggtgacatgctcgtgggctttgatcatctccccggaatggacaacgatgtcagggcccaagtctgctggatgaatcaccggccgctccaggccggccgcaaatacctcctcaagcataccacagccacggtccaggccgtcgtcaccgacattgaacaccggatgaacatcctcgcctttgaaccggagccggccaccgagcttgctttgaacgacattggccaggtccgtttgaaaacctcccgcccgctcgtctatgacggctacgccaccaaccggctcaccggcgctttcattttgatcgagcccggcaccaacgccaccgtggccgcaggcatgttgctcccgccccctcgggccatcaccccggaataccacgactttattatttaaaactaaggattgggcgcagtctcccgcagcggcagcgccccgggcacgttggaaaaatcaaaatccaccaccgcctccgcggcaagagtggccaccaccgatcgcaatttgaccacattgccaccggtggggtgattgcggttggcatacaacaggacaaaagtccgcgaaaacggatccacccacaggctggtgcccgtccaccccgtatgcccatacgacccaatcggaaacaccttgccccgcggccctgcataaggcgaatcaatgtcccatcccaatccccggcgcgcactgccatccgccggcgattgcaccgacgtcatcaatttaatggtctcttctttcaaaacgcgccgcccatccaattcgcccccattcaaaagcatgcgacaaaaacgcgcagtgtcggccaccgtcgtaaaaagaccggcatgcccagccacgccccccatccgtcgtgccgtcgggtcatgcaccacgccgcgcaacaccactccccccacccgttcagtcggcgcaatttcccttttccattcctccggcggcaaaaaccgcgtctgcttcatccccagcggctcgtaaaatttttcgcgcgccaagtccgcaagagattttccggaaacccgccgcacgatttcaccaagcaggatgaaattgacatcgctatagcgaaacaccttgcctggagccggattcggccgctcgctcactgcctgagcaatcgcgcccgtgtaaccgttgaaatcacggcgcgtcaaccccgacggcaaccccgagtaatgggtcagcaacagtcgcaccgtgatcgcctcccgcccttgtccgacaaattccggcaagtatttggacaccggctcatccagcccaattttgccctgttcccacagccacatcacgcagggcgttgtggccatcaccttggtcaacgaggccgcatcaaaaatggtgttggtggtcatcggctccggcgcaggaatcacggcccgctgcccgtaagccttgatgtacgccgtgccctgccgttcaatccatacaaccgctccgggagtgtcaccgttggtaatggccgccgtgatggcctggtccagttcaacaagtttctccgcgcgaaaaacttttcccgacccttccgccgctggcgcaacaggcgtgctcaacacccagagcaggccgaacagaagttgaagaaaagcccgccggctcaggcttggttgcgccttttgctcatggtttgaaatcggcatcattcaatagattagatgttacgcagcctgaataagttaccatttttcaagctgttggagctccttcgcccaagccgccttcaatccccctccccctcgtcctccccggctccgccgttgccgctgccggcattgtactcgtgcaacttgttgcgcaacgtgcgcacactgatccccagcagcttcgccgcgtgggtccggttgccgccgcacttttccaacgcggccaaaatgtgtcgcttctccagctcggccagcggcaccacttcaggagtggtggctgcagcagccgatgttggggcaggagccgctgccgctgcggcgggagaaggctccacggatgctggcgttgcgctcaacgccgacgtccgcatcaaccccaaatgctccggctcaatcatcccgctgtccccgcacagaatgacggcccgctcaatgacattctgcaactcacgcacattccccggccaatcatgctccatcaaggcggactcgctggccggggacagtcccgcaagtttcacaccgtgcttgcgcatgaagcgttgcatgaaatgccgggacagcagcaggatgtcctccttcctctgccgcaacggcggcacaagcaccggaaccacattcaaacggaaaaacaaatcctgccggaactccttgcgggcaacactttgctcaagatgccggttggtggtggcaatgacccttacatccacccgcaccgtgcggttgccgccaacccgctcaaactcacgctcctgcaaaacccgcagtagcttggcctgcaccgccggcgatatttcgctgatttcatccaaaagaatcgtgcccccatgcgccagctcaaaacgtccctcacgcttgctcaacgcccccgtaaaggcccccttttcatgcccgaaaaactcgctctcaatcaggttttccggtatcgccgcgcagttgaccttgatgaacggcgcgccgttgcgtggactttgctgatgcaacgctcgcgccaccaattccttgcccgtcccgctctcaccctgaatcagcacggtggcctccgtgcgcgccacccgccggatgagctgccgcaaatcctccatcgccttgctctgccccaaaagctgcgacgcatcctcatcctccgcctgccggccgtaaaattggttgacccgcagcaactgggtgaactctgcagccttccgaatcaccacctccaactgctccgcgctgaacggcttgataagataatcaaacgccccggccttcatgcactccaccgccgattccaccgtggcgaagcccgaaatcatcaccaccaaaggccgcacgggacgggtgttgagccgcttgagcaaatcagtggcatctccatcgggaaggcggatgtccgcgatcaacaagtcgaaattgtcccgcgccagataatcctccgccgccgctatggtttccaccgcggccacgtcataccgacgtgaacgaagctgctgctcgaggtttttgcggacaatcaggtcgtcttcgagaacgatgattttctcgatcggcatgaggccattatatcaagcgacctggtgtcggcgatataattctgaaacgtacccctgcccggataccggcggcggcgtgggccagtgttgcggcggcaccaaccccaaacgcaaccgcgcttgttgattctcgcggtccaacgtcaaaagccgcaacaccagcccctgagtctcttccaacagcgcccgcagctccggagacatcaagcgcctttcctccggctttttctcccatgcctgcctctgctcccgcaggtgccgcgtgacttcctccagccggggcagcaattgccgccgcaccgcatcggctctcgccaacgcctcaacatcgccgttttgcaacccaccggcctctgtctcaaaagccgccagcaattcccggcacaattgccggtgttcctgcaaattttgaacaaccgcttccatcatgaagggggcactggagtggacatttccggtggcgtctgactggcatttcccttgggcagggaccgcgtcggcagcatgtgctccgcctgagaacgccattgcaaaaattgaatccgccattgcgccatttccatcaacgccttcaaccccggcgtcggcgtgtcgctcattttacccgccagcgccactacctgttgataataatcacgcgcccgctccggctgtttcatgtgctcgtacaccagcccgatttgatacagcactggcccctgccatcggggcgacggatccaaattcaaaaggctcaagtaaatttccagcgcattcagaaaatcgccctcttgatacaattggttggccagctcgtttcccgtccgctgctgccaataggcccagttctgcgggtttttcgctgcatcccgccgctgcttctccaacagcgccaaggtctgctgcaacgcctcccgattccgccccaaacgcttgagcgaagtggccagcaaaaaccgcacttccgcttcatcaccgcttcccccgtacttctgcaggtactcctgcgcctgcgccaccagcgtctcgtgctgccccagatttgccaggcacttcaaataacgaaaatgcatccgctccttgttcaactcctgcgaatccaatcgcaataatcgcgcataaaactccgaggcttcagcatactgcccgcgcccaaaataagtctcggcaatttccgtctgcgccaacaacaccagccgctggtaatattcaaattgatcgagccgcaacgacaacgcactcgacagcaccgcgtaaaatttactcaaggccagcgctcccacacccatctcccgatagagaataccctgccgcaacaatatctccggcaccgccgggtcatcgtggtaacgcttgacgtactgggagaaaatctgctgcgcgcgccccagttgtccctcctgttgggccaccagcgccaactcaaacaaggctggccgtttcaactcctccggcgcgtcggactccaaaatcccaatcaaaacagccgccgcctgccggtgatcccgcatcttccgcaattcccgccccgcctccaactgctcctgaaactggcgcacccgaaagacatggttggaagtctgcaacttcaccgtcagcaaattgctgcttgttatctgcccgggtgccggtgggttggtcaatgttccagctccccagcccggcggcccagctttgatcagccgcttgacataatcatcaatcaaaccggctgccgggctgttggtgacgacttttaagttttcattcgtgccggccaccgacgaaggaggggccgaagtcgtcactgccgtcggcgcattggatgcctgcgagcctgagccccataaatgagcattcacccccgccatcccaaacaccgcagccaaaatccacccccaccatcgcaaacgatggcctgaaaaatagccccccctgatgtctgataaatccctcatggcgaagacggctttttaggttcaggggtttcgtaacgggccgagctgggcggaatgcgtgcaggttgcggtggctgaaacaatggcaaggtgacaattacccccgccgcattggtacttcccaccggcacaggtgttttgaaatattgcaccaacatctgcggagtgatttccggctccgaggaagactgcaccgctgaagccgccggcaacgtcacttgattggtggccacctccaccgaagcggccggcggctctgaaatcaccggcacttcattcgtggcaggcggcgccaccaccacaacattggttggcggaaccggcggcggcactggattcggcggaatgatttcggccgcggcccccgggccgcccaccgtgccgggaatagccgcctccgccgcagccaccggtgccgccttggacgcacgagcaggccgctcaaaccgcaatggtcccggccccaaatacggcaaataagccgctggcgccggccatatcgcagccacactcacggccactatgacccagcttcgtaacacaaaatcgcccagttcgttggctcttttccaagctccctcgcccctgcaaggcaggaagcccagtatctcggagaaattatcggcaggattcggtgaaaactttaatccaatttcactcctccaaaatttcccgccttcgagagaaagttttccctaatttttccatttttggcgtccaagttccatgcagaagtgcctgcacccgttaaggttgcaaccagccatattctcacctgacatcccgcccgcaaaaagctacactgcccgcacgatgcaaaccttggacaccttgggcattattgccggcaaccggaaccttcccctcacgttggcgcgggaagcacgggccgccggcatccggcggctggtggcagttgcctttgaaggtgagaccgaccccgccctcgcccaactggtggacgaaattgagtggctccgggttgggcaactgggacgaatggtcgacgcatttaccaagcgcggtgtccgccactgcgtcatggtgggccagattgccccccgcaacctcttcgatttacgccctgactggcgggccgcaaaactgctcctgcagctcaaagagcgcaacgcccacaccctcttcggtgccatcgccgatgaattggcccgcgagggtgtcaccctcatcgaggccaccccttggctccaatccctcatgcccgaccaaaatttccatgccggcccgcgcctgagcgacaatcaaaaagccgacatcgccttcggccatcggatggcgcaggaaatcgcccgcctcgacattggccaaacagtcgtcgtcaaaaatggcaccgtcctggcagtcgaaggctttgaaggcacagacgcctgcctggccagaggcggggatttggcgggcaaggacggtggggccgttgccgttaaagtggccaaggccaaccatgacttccgtttcgacatcccatgcgccggccccaaaacagtggaagtctgtgcccaacacggagtggccgtgctggcagtcgaagccggccgctccctcctgttggaccggactgaaatggaagccctggcaaaacagcgcaaggtgaccctcgtcgccgtgccacccacgccggccacaacataaactacggcgtaagcgccgtcttaaatcgaagtcgaggtctccaggaagccttgcaactgccgcaaccgtgtcggatgccgcatcttgcgcaacgctttggcctcaatttgccggatgcgctcgcgggtgaccttgaactgcttgcccacctcttccaacgtccgcgaataaccgtccaccaatccaaagcgcagctccaagaccttccgctcccgctccgtcaggctggccagcacgtcgttgaccttttccttcaacaaactgtaactggtcatgtccgatgggttctccgccgttttgtcctcgatgaaatccccaaaattggtgtcgtcactgtcccccaccggcgattgcagagagatgggttgctgggccatcttgagcaccgcacgcacccgctccaccggcatctgcatttcatcggcaatttcctccggcgtcggctcccgcccaaaatcctgcaccaactgcttctgcacccgcatcaatttattgatggtctcaatcatgtgcaccggaatgcgaatggtgcgcgcctgatcggcaatgctgcgggtgatcgcctgccgaatccaccacgtcgcatacgtgctgaacttgtaaccccggcgatactcgaatttctccaccgccttcatcaagcccatgttcccctcctgaatcaaatccaggaaggacaacccacggttggtgtactttttagcgatggatatgaccaagcgcaggttggcttccaccatctccgtcttggcctgcatcgccttgcgattgaaatgctgcaattgcttgaacgcctccaggtattcctcacaactcatccgcaccatctcctcaagcgcctgtttcttccggatttccgcctgaagaatggactgtatctgcggattcttcttttgagcctcaagctcctgaatcgtgcgcaaacacgtctggaatttgtccaccacgttttccgccacattggcgatttcctcgatcaccttctgcttgtaataaaacttgggaaaagtcgcctgaagcttcgcatcgagcttcttgaattccttcatcaacttttccttcttggcgggcgaggtcgcagccaccatttcccggtacttgtcatccacctcccgatccatcgccatcaccgttttaaccagccgccgtaaatccttgaggtgattttcccgtccctcaatctttttgtccacaatcacccggtcaaaccgttccttgggcggctcgctgatgagtttctccgccaaagccacgtgctccttggccgtaaagccaaagctgtacacgatccgcttgacctcgttttcagcgtcttcgattcgcttggatatttccacctcctgctcccgcgtcagcagcggcacctggcccatctgcttgaggtacatccgcaccgggtcatccaaaatgtccagccggtttttatcgtcgtcttcctccggctccggctgctttacccggtccacctccgcctgatctacaatctccacctcaagattccgaagcttggtgtagatgtcatccagctcctccggtgtcaccaccgaatcaggcagagcgtcattgatatcattataagtcaggtatccctgctcctgcgccaatcgcaccaattccttgaccttttccgccaggtcaatcgtctgcggttgcttgttgggatcctggttttcatccaccgcaacaggcgcagcttcctccatcgccgtcttcgcaatggattttgccgttttcacctcgcttttagccgcggccttggcaacagcctcgccgcctttcttcgtttgcaactgctctgcctttttgctctcagccgtttctttaaccttcaaagagccgggctttttatccttgttttccacttcggcaggcttgaaatccttcttcttcggtgggacgccatctttcggcttggcctgggcagaagcagacgctgccggtttggagcccttggcctgggaaggttgggcgtgggccttcacttccttattggacgataactttcccttgccagccttcgcggctggctttttcacctgaggttttgccatagatgcgttttagaactatcggctacaaattctcgttataataaatagccttatactttaacgcttttctgttgtgtagtcaatctttgcttcaaaatcaaactttgcccacccttgctgccctgttgaaggcgtaaggtaccacgtaaaaaacactacatttccacaaaacacgggcctgtcttccccccctcccctcgatatttccacccggttataatccatttgtaaccttttccgccaaaaatgctcttggtatagtgtttggaacgtaggcggccaaccaactgcatccgccgcctaaacgccactcatatctgtgggcatgaccgaaacggtccataccgaagtgttgccgctccattcgacggcggatttcaccgccgcagtggagaaagccgccgctttgcttcaggctggcgaagttgtagcggtccccaccgagacggtgtacggcctggcagctaatgccctcaacccacaagccgtagccgccatctacacagtcaagggccggccttcccgcaatcccatcatcgttcacgtggccgatgaaagcatggcccgccaatgtgtcgcctcctggcctcccgctgctgccgccttgtcccgtgccttctggcccggacctctgaccatcgtcctgcccaaggcagccatcatccccgacatagtaactgccgggggccccaccgttggcgtccgctggccgcaccatcctttcatgcaagctttgattcaacgttgcgcctttccactcgctgcccccagcgccaacctttccaatcgcgtttctcccaccaccgccacccatgtgcgccaacacttggaaggacgcatcccccttatcgtggacggcggcccctgccccgtcggaattgaatccaccgtggtggcccttaaaggtgatgtttggcgcatcctccggcccggcatcattcacaaggacgctctggccgccgtcttgggcaccggctctgctcatgaggccgcctcacacgatagcaaccgccctgctttggaaagccccggccttctgccgcgccactacgcccctcgcgcacaagtgttggtttgggcctgggaaaacgaagactccctgcttgcgcagattcgccgcatgggggcaaaaccggaggaaacttacgtcttggcgcactcctgtgcgccccgccaaaaggactggcttgaagtcagcgttgcaccgcgtgacccggaagcctatgcacgcgccctttacgcggaattgcaccgggcggatgctcacaatgcacggtggctggtggtggaacagctccccaccgatggcccatggcaggccatccatgaccgcctccgccgcgccgctcaacatgaagaaacttgaattttacgtcggttgttgattgccatgcctcaaccgcgttacgatgaattgacgttttgatgaaaaacttgcaagctcgaccaatgacacgactgggaatcatcgcaagcctggtggccgtcctcggcgccacggcctggggtcagaccaaccatctgacggaacgcgccatttctttggatgaatgtctggaaatggcattggaaaacaatttcacccttcgcattgagcgccacaacatcgagcaagcccgcttcgacctcaggcgctctcaaacagcctacgacccgcagcttttctttggcctcacccgggccagaaacaccggcctcaaccaaaacttcgatttattgggcaatcgctccgagaactcctcccaaaacacggtggacaccctcgaatacggagtcagcgggctggggcccatggggtttgaatactcggtgccagtgagattcacccgcagcttcggcgacggctacacgtacaacaccctcgatctcaacaccttcaccttcgtgccggtgggttacgacgagtacgctgcccgcttcaacatcgaaatgcgtcagccgttgctccgcaacttcgctgtggacaacgtccgccgcaccatccaggtcaaccgcaaactgctcaaaatgtccgagcaccagtacgaagcccgcctgatggaaatcatcaccttggtggaactggcatactatgaactgatcttcgcccgcgaaaacgtcaaagtccaggagaaggccctggaactggccgaaaaactcctcgataacaaccgcaagagtttcaatgtcggaagcatggccattctggaagtgcaccgcgccgaatctttggtcgccagcacccgcgccgacctcctggccgcccagcaattggtcaaagtgcaggaaaacgtgctgaaaaacctcatcaccaaagacctggccgagtggaaacaagtttccttgagacccaccgaatccctgatggccattccgcaagccctcgacgtgcgcgaaagctggcgcaccggtttgaccaaacgccccgacctcgcccagttgcgggtggacttggaacgccaggacattgacatccgttacttcaaaaaccagaccctccccaacctgaacctcgtcggttcttacggacgggatgccctcggaacgggctttgaaaacacttggtcagacctccatttccgcgacaaagccgtggactactattacggcgttgaactcagcttcccatggggccgtcgcgaggccaaataccgtctggcgcaggaaaaagaccagcgcctgcaaaaggaattagtcctccaaaaactccagcaggacatcctggtccaaattgacgatgccatcgaagccgttaaaaccagttatgaccgcatcgccgccacacgccaagccgctgattttgcccaaaaagtcctccaatccgaggaatccctcatgcgcgtcggcatgagcacctccttccaaatcctgcaataccagcgcgacctcaccgcagcccgcacccaggaagcccgcgccatcgcggattacaacaaggcattggctcgcctagcccaggcggaaggctccaccttggaacggcgcaaaatcaaattacaattcaaataaaaccgccccggaaacgcgaaggttaaaagcctctcttgcagtggctgctgctacctgctgccaattcgaaaccaaaagcactgcgggaaaacttcccgcaattacaccagcccctccaaaatcatcggcaaccgctccaagctgcggttaagccctgcccgcgcaatggccttggcactgtcggtttggttggggaacaacaaatgccatgccggcgtttcaaaccacgcttccgccgccacgctctggtaattcccgctggtcccgatttgggcatgccgcaacagcagatccgccacatgcaccgccgccacaatttgaatatgctggctggcgcgctcgggcgcatggtgaaaccgggccgactccaccatcacctgcggcagtcggtgttgctccaaatacaacccgcccaactccgcgtgatccatccccagcacctcaatttcaatcgcctgcaacggcgcttttgtctcggatgaacgccggtgaatctcggcaaaatgctgcggaaacaccgcggccatcacaattttgcccacatcgtgcaccaatcccgccacgtaatccgcctcgtcattgggcattcgcaccgccgacaacacttcccgcgccataatcgccgtgccaatgcaatgacgccaaaactcccgccatggaaattccgtgttgcccgccatcttctgaaaatcctcgatcaccggcgtcaccatcgccagttgccgtatttgcctcagccccagataaaaaaccgcctcctcaatgctgttgaccggcacattcagcccaaaataaaccgagttcaccaaccgcaacaaccgcgccgtcaaactagggtcccgccgaatcacctcgctgatttgcgccgtataactctgatcagccgccaacaactcccgcagcgcactgttgacagtgctcagcgatggcagacgcgggcaggaatgtaaccgcgccgtgatctgttgccggttcagcggcgtcagccggttcgtagtggccacttgactcatactcatcttccctatcggcagtcagaggaaccaactttaataaataataaaaaaagacctctggttaccctcccagcgtccgatttttagacctccacaatcaaacagccttgggtagatacacagaagccgcgcttgacggcctgccctgctttggttaccaaagcatcaccaatacagcacaatacattcgcgggccgggccggtttggcgtccctccccgccttggaaaatcacatgaatactgagaaaaaaggcctgtttgtcaccgccgacggcagaaacgtcgccttcacctttgcgctggtcagctcgttgtttctcctctggggattctgcaacgggatgattgacgtgatggacaaacatttccaaaacgagctcaaactcaccctcagccaatccgcctgggtccagtttgcccattacctcggctatttcatcatggccctgccggccggctggctggccatccggctcggttacaaaggcggcattatcgcaggcctcttgatggtggccgtagggggattgtggttcatcccggccacacacatcgccaagttctgggcctttttacttggcgtctgcaccatcgccgccggtctgaccttcctcgaaacggtggccaacccatataccaccgtcctcggcgacaaacgcttcgcagccactcgcatcaacctggctcagtcctgcaacggcgtcggctggatccttggccccatcgccggcggcctcttcttttacggtaccgatgaaacaggacgcagcaccggtgccgaaaccttgtggatcccttatgccggtgtggccgtggtggtcatcctcctggcggtgattttctttttcgcccccatgcccgacatcaataccgaggacgactatcacctcgacgataaaaacaatgacaaaaccaccgccattaaaccggcttcccgtgggctgacctacgggttgttactcgtgaatatcgccatcctgcttttggtgtttggaatgataacatggctcattctcagcgcgaccaaagttggcgaatccctcaaaggcctggccgctgccctgccgcatccttcctccttcaccatcaacgcagaccacgccttgaccgtcgtcctgttttgggcgggcgtcgccatcatgatcgtagcggccattgtcatggcccccatgaccaaaaaaatctcccaccacagcatctggtcccacccccatttctccggggccgtggcggcgcagtttctatacgtggccgcccaggcgggcatcttcagcttccttatcaattacgtgacctcagaagtcccggacctccccgcctcgtggcaccgcgacagcaccaaaaaatggattgaaatcaacacctccttcacacgcgatgacctcaaggatttgcctgcgctggcggctcgattgaaaaaccccaccgaccccgtgacagccatggtggccggcaaattgtcctccgacactcaggcagccctcgcagagtacgtccccgacaaaaccaaccccaaattgctcagtgtgcccttggtgcaggatttgaaaagcattgtccgcggcaccaacatctacaatccccagctcttcgctggtgtcaacctcagccccgccacccgcgaaatcctggccctccctgaaaaagaacgaaacacacccctcctcaaccgcctgctccttacagacgcctttgccggtttacttaattataccccaggccgttattgcatcagtgacgccggcgcttccaacctcgcctctttcggattcttctgcttcttggtgggccgcttcaccggagcctggctgctgaaacgtttctccgcccaccgcatgttgggcctctacggcctcatgaacgtgctggtctgcctgctggtgttcttcaagctcggctggctgtccgtggtgtgcgtcttcctcagctatttcttcatgtccatcatgttccccaccatctttgcactggggattttcggcttgggcgtccgtgccaagcgcgcctcggcttacatcgtcatggccatcatgggcggtgccatcctgcccaaactcatggggtacgttgctgaccaaaccaacatgtcccgcggtttcatcgtgccgatgatttgcttcgtggccattgccctttacggcttcggttggagccgcctcagccaggccgaatccttaagcggcctgaaaaccaccgccggccactaaaaacaaggctcccattcttgcaccacccccctgcgctggggccggggctcgtcttgtcttcaaccaatccgcgctcacactttctccggcaccacaaacggcggacggtactcgcgccgaagcagccgatccgcctccggattgttcacaaacttttccttgtcggcatcaaacatcaacttgggccccacccacaacgtcgccttctgcgggtccacaccaatcgccttggtgttttccaaagtcgtcatgatgctctcgcccaccacctcgttatcgctgaaatccttcggcttctcaaacggtcgctccttggccaaccggtaggatatattgcccaaatgacagcacgcgctcgaaaggtgcccctccaaaatgtctgcgtgcagattttcccgcttgcggctgcgcacgcactcgatgaaattggcgaaaatattacccgagcgcgacggcgcatccaccttggccaacggctccccttcggttttgtctttggggaaaaacttcccatccttcaccacaccggcctcaaagaaatattcattggcaactttgttgggatactccttgagcttgcccacaagcccccgcgtctcaaacaacagcaatgtcccaccaaaatcgagcaccgtcaccatctgattcggcgtctgcccttggtccttgtgatccggcccctcaacgtaccgcccgcccaaactgatgaccgatcgcggcaacgtcccaccaatcacccaccgcgccacatccatctcatgcacaccctggttgccaatgtccccgttgccgaagtcccaaaaccaatgccagttgtaatgcaccaaattccggtgaaacggctgtttgggcgcaggccccagccagatatcaaaatccaaattggctggcggttcctccacaggcttgaaaccaatgctccatcgtggcttgcaacaatatcctttggccaccaacaacttcccgtaaacaccgcttttggccaacgccaccatccgcacgtccccaccggcgcgccgctgcgtcccgtgctgcacaatccgattgtacttccgggccgcctccacacatttgcgcccctcaaacacattgtgactgcacggcttctccacatacacatccttgcccgcctgacaggcccaaatcgtggccagcgaatgccaatgattcgtcgtggcaatggagactacgtcgatttccttgttctccaacatcttgcggatgtcctgataagtctgcaccccctgcaacttgctcgcacgtccctccaacaccttcaaatccacatcgcacaacgccgtcactctgactcccggcaatttctgaaactcgctgatatgattggccccacgcccgtttattcccaccaccgccacacgtatggcctcattggcacccacggattgcgcatacacacgcggcgccagccagatgccggcggcccccaaagttgcggttttcaaaaaagcacgacgcttcaacgacgaagactgcatgtaggctttcatgcccccactctaatctctccgcgccccgcttcaatcccaaactccaactcccaccaaacaccgactaattatagatgaatggcagtgcaggtcttcccaacataagatgagcttgcgcttgcccttccacgccgcggccttacattgagcgtgtgcatgatgcttcggatgattggcgccggcgttttgaacgcctgcaacagttataccacgtcagccaggtgctccattccactctcgaacctcagcgagccctggaactgattgtggaacaagccgtgcagctcaccggcgccaccagtggttcgctggttctcctgaatcctcataccggttttttggaaattgaagcctctcacggccttccacccgaggctcaaaaactcaagctccgcgccggcgaaggcatcaccggctgggtcgtccgcaccggccagccggcactcgtcggcgatgtccgcaaagacccccgctacatcatggcacggcccggcgtccgctccgaattggccgtccccctccaagtcggcgaagaaattcgcggcctcttgaatgtggactccgacaaacttaacgccttcaccgccgaagaccaatccctgctggaagaactctccgctcaagccgctctggtcatccgccaaacctggcaatacgaacaacaccggttgaaagcccggctgtttgaaagcctcgtcgccgtcagccaaatcatcaattccaccgtcaatctggacgaagccctcgccgccatcacccaacaggcctgccaactcatgcaggcacgcctcagctccttgctcctgctcgatgactccggacgctggctggacctccgcgctgcgcacggcgccggccccgactatatcaacaaaccgcgcctggcagtcgaggacagcctggtgggctccgttgtgcgccgccgcaaagtgcttcaggttgagaacgtccaaatctcccagcgctatcaacacgtcgaagtcgccgcccgcgagggtctggtctcgctgctcagcgcacccctcttgtttgaccaacgttgcatcggcgtcctcaacgtctacaccggccggccccacgtcttttccaacgaggaaatccgcatcctcaacgccctggcgggtttatcggccgtcgccatcgaaaaagcccgcctctacgaacgggtggtggacctcgaagaagccctccgccaagctgaaaaattcagcgcactcggcctcttggccggcgaagtcgcccacgaaatccgcaaccctctcaccgtcatgaaaatgctgtttcattccctgaacctgcactttcctctgatagacccgcgcaataccgacgtgcgcatcatcgccgacaaaatggaacaattggaccgcaccgtcgaacgcgtcctcagcttcgcccgcacagccgagccccagtttggccccgtgcacctccaacacgtgctcggcgagctggaactgctggtccgccacaaattgcgccagcaaaacatcctttggaaactcagcctcgaacccgccctccccgccgtttggggcgatgccacccaactggggcaagctctcctgaatcttgtgctcaatgccgtccaagccatgccccaaggcggagaattacgcatctccgcccgccgcctgccgcgcgaccccacccgccccgccacccatgtagtcttggaagtagccgacacaggcgaaggcatgagccccgaacaatgccgccgcgcctttacccccctcctcagcaccacccgcaccaagggcaccggccttggactggtcttggtgggccgcatcattgaagctcaccacggacgcatccaagtcacctcccgccccaaggcaggcacacgcttccgcatcacgctccccgttgaaaaccaaaatcctgcgtaattccccccaatcgcctccggcggcccccttgacatcaagttgaacgtgggacaagttgccattgttgtattatgaattttgcgtggcttagcctggaccttgttttgattgtgctgtttgccttttcgctaccggcacttttcctatatgtcatccgccggtggctccaaaacagcgaatcggcaaacccatcggtggacaaccaaacaccggacccaggcaaccattcatctcactgaatgaccaacggattttttctcgccttcttcgcggcttcctcaaaacaggctttctaatatgcttaagccctaaggaggctcaagccatagggttgtatgccgctcactctttgctcgggaaaaaacagctccaccgattatttcaccattagatctcccttgggcactgaaaaactttttcgctctatttttgctgtaaccgccttttttgatttgttctgaccccgcggctgggcttatcttgaagcagtatagcgatggaccctgcccactcaacgtccagccgcaaccatcgggccacgccacacgcgtggaggaggtgttcatgttgacctttgaccccacgcgattgcaagcggccttgcggttggctgcttccgagctggtcaaagctcgtccggcaggttctccctggcagggtgaaatttccagcagccccacagccaccgctgccgccatctgcgccctcagcctggcggataccgagtggaaaagcgccgaggacaccctgcgccggctcgcgttacatggggcggagtggttgagccaccacgccaacggcgacggcggatggggcgacaccccgcgcagcttcagcaacctcggcgcaactgccctcgcttgggcggccttcgggctggcaccgggaggcgaagcagcctttcaggaacccgcccgtgccgcagagcgctggatatgccaaaaagcgggcaataccgcccccgccatcttggcccccatgattcgcacccgcttccgcggggatttggcgctggccggtggcgttttgatgtgctgcgcactggcgggacgactcggcagtgacattcgcgcctggcgccacgtcccctccctgccttttgagcgtggagcactccctcccgaatggtgggcgtcagtccaaccgcccgctgccagttgggccatgcccctcctcctcgccacaggccaggctcgccatcacaatctcgcaggcggctgtttcgtggtccgactgctgcgcgaattctttcgcaataccactctgcgccgcctcacggccttgcaagcagaggacgggaattttcaaacctcccccctcttaactgccctgaccaccatcggcttgctcgccgccggctacggtcgccatccagccacagaaaaaggcatccgcttcctggtaacctccgcacgtcccgacggcagttggccgctgattacaagccaggacgtccgccttaccgcgcaagccacgcaagcctgcaccaaccccgtccccgggcagccgtggctgccgggcctcgacgaacttcatgccttgcgccattggcttctcgcccatccgcaacacgatgacccggagggactccgcctcccagccatcggttggtcggccagctcacaccccggcgcgtggcccgacaccgtttccaccgcagaagccctcttggccttgcgctcgctcggtgacccgggccctgaggtcattcaagccgtcctcggcggcgtcaattggttgctgttgacccaaaaccgcgatggcgggctgcccccttatcgtcgcggctggtgccacccggaacaagaaggcagttgcgccgaggaaaccgcgctgaccttgcgggcttggctggcctggttgcacgtccttcccccggaccaacaacaccgtgttcaaacctccatccaccacgccatccgttttctcatggacgagcaacgtcaagatggcgcctggcgttcacactggtttggcaatcaatacgcgcatcaggaggaaaacctcaccatgggcaccgccggagtcctcatggccctgcccgaactggtggcccgctcctatttcgagttggtcgaaccactcaacagcgccgtcctctggctcgtcaaaaaccaaaacagcgacggcagttggggcggtggccacggcggccctccctcagtcgaagaaactgctctggcactcgaagccctggccgaaacactcctccaacctggccccctcttgctggaaactcgtgaacaagcacgcaacgccgccgcctggggcgccaactggctagtccaacatatcgaagccggcaattggaccacacctgcccctctgggcttgctctggggacaattctggttctacgaaaacctctggccggccctcggcgtcacccgcgccctggcccgtttgacacgcctggtttaatcccgccaccccccggcgttgtcatccgcggcaggcggctcatgtgccgaaaaaccatccgcgacaatggcttcttcggcgaataatgcaccatcatgtcctgcatccgcatcaacacccacggctcccgcggcgcataaccgtttttggtgaacacaatgtcatcagccacgtacacacacatgtgcacagtccggacgtcctgccccatcggctcatacaacaggatgagatccccaaacaaatccgccttgggcacaatccgatactcgctccgcaacacctgctcctgaaatcgtgcatcaatgaaccggtcctccaccttgtcccggtgaaaattatacgacgaccaaaaacaatccggccacctccccgcaataatatttgtgggatgcggatacgaataaagcaacagccgcggcaccggcggaaaaaaccatgccacattcacactccccccctgcggcaggcgcttcaatgactccaacaacggccgcacctgaagcattcggttgggcagcccccaatagcccatcagccgctccacatcgctggtgggagtcacccgcaaattcaccataagcgtcggcactcgtgccaccgtccggctggcttgcagataatcctctctcgttaacagttttggcaggacatgccggtccgcaaaacacagcaaaccatctttccggtacatcatccgctccatgagcttcagcgcatcttcagacaaactgcattgcgaaaaccattcggaaaactcagcattaaccgcaaacggataacaataagccacattttgttcatcctcggccaaaatggagtagatcttggcccgcggctccggcggcatgtcccgcagcacttcaactgtcggctccacataaactcctcctgtcgtcgcctgccaacggttcgtgtccaacaagctcgcctccaacaaactcggcaacccgcaactttttatgaaatccctcaaagtctccggcttataaccggcaaaaaaccacctgttcgaggaagggggaggcggatcgtacgcaaaatattccactggccgctccaaccaaattgggatgatttccaatattccccagcggtttgttgaggcttcatccttcgccaccaaaccgttgttggatgagcttcgatcagagcgcgaccataaagtgcgaccaataaattgcgcacccaacgtaatcaatacccctgcaagaaccagccataaacttgggagaaattgccggcgaggcacggccccattctgccgctcgctccgtgatgaagtcttggctgggcgcattttcataaacagcctcccttaccactcaaacagcgcccaaagaccagccggcccaaaaacacccctctcccgtcgaagtgtttgcctgttattcgccggatgtattaatcgcccgcccttaaggacgttattcccttgcagccatcccattcaaataaagagacgggacattacctgcgaaaggttacaaggacaacggttttgtgaaaaaaattagcctgaaaaccctcacattgtgaacttacctaccagacggtaagttccgccagggacgcaaagggttgacggtcaaatccgctcacagcctccagcttcaaataacggacctgtaccggtgccggaaacgtcaattcctttggattggcatcggcggacaatgtgccccgcatcaaaggtgttccccagttttgtccgtcgctgctcgtgtaaatggcaaactcgcgtatccacccatttttattgttgtcctgcctcggcgtcagagtcacaccacgcagagtggccgattgttgaaactccaaaaccagccaatgcggaaaagccggagcttcctccccccatggcgtgtgccaaagcgtttgcacgtccccatccacgaccaacttgcccggatgctgcggatgttcactgctcacccgcgatacccggacccccagtttttccatcaaggaaggcggcctcaacaacttttgcacatccgccggcgtccaccgatgcgcgggtttgaaacgtggaccgctcatgtaattcaaaagactgcgccgaagctgccttgccaccggacgctgctccaagtctgtattcaaatccatcgcacacgccaacaaacgcccccgtcccacttgcgcctcgatgattaaccccagtttgcgcgacgtaaaccaatcgtctatcgcatacaccaacggccggaatgtcgcctccgtgcccgtcaacacaaacggatgcgcccgcgacaccaactcccaccattgccagttggaatgatattcagtcggaaaatccgccagcgccggatgcctcggatcgcaataaatgcccaaagtatgcggcgcctgacgccgcgtccacgctgtgttccaaaagatgctcgaaaaaccaatttgcacccgccccaacgcatccccgcgaatggccgatggcggcggattcaacaacaccttgcctccgcgctccaaaaccgccaaggccgccgaatccaaatcagtcgcccaatgaatatcctgcggcacactcacatccaccttggccggatacacccacacatcccaatcattcgcataaggcgtgccttccaccgccagctccaaattcaacttcgcaggcgcaggcatccccttcaatggcacctcaatctgccccaccggactgcagattccagtcggcaacggaccagtgaacatcgtccccgtcgccaactcacgcttcccctgccgcaaccgccagcgcaccacaccctgcggcaaatcctgcggtgcaaaccatcccaactccaccccggcctgcagcgtgtcctccgtggtgaaaatccgtctcggcaatcgcgcaatcggcaccaccggcccggcaaaccggtgatactccgcagccgtgatatagcccttgccatcccaaaacggatccaacacccccaccaacgccgtcccctgcccaggaaaatcatgcaaatccaacaactcgaatccccccatccccggcgtgcgtatcgccgactcaatatcctccttgtaacaaagcgcctgcaatttccccgacgccagcaaaaacgcccgcgccataggcgccaaaccgttctgcttcaaaaagtcctgaaaaatctcaaaattcttcggtttcagccagcccttgtatttcggcatctccgcaaagttgggaaacacacaccattgcccaatctcatgactcaccaccggcgccgcagcccgctggataaacgcccggtaatctgtcaccgtctcaggcggacgcgcattgatgcgtgaattcaatcccccgccccatgcctgaatgcgcggctccggtgtgatgtgaaaatcattttccggaatcatcggccaacccgccccgctggtgtaaagccgccgcgtatccaggcccttgcaataattgatgaaatcccccagccaccgattctgattctttcccgccggttcgttgccggctgaaaacatgataaacgacggatgattgcccaacacccgaaagatgcgcgctgcctcctcgtgcaaccacgcatccaccttgcgcccatcccccacactgctccccgaattcgcccaaacaccggcctccacatacaacaacatccccgtctcatccgccgcctgaaacgccgcctccgggggagtatgcgaatgaaatcgcaggtgattcaacccatgcgcctggcaaatccgcataatgcgcttccacgccgccacatccgtcggaggatagcccgtcaaagggaaaatgttgcactcaagagtgccacgcagaaaaagtttgcggccgttcaaagcaatttgcgtcccctgccgcttcacctcccgcaatccaaacgacacctcccgttgatgacgcaatacccgtccttcatccctcccctccaacgcagccgtcaattcatacaaaaccggcgaaaattcatcccacaacaacgcatcctcttccatctcatactcacactccaccaccccaccctccggagtccacgaaaccggcacagtcaccggcggcacccgatgctgccgtggtccattgtaacttcgcgccgtcaacgtcaacgtcccactgccggagcgccctgtgagattgcccaaccgcgccttgataaccgcacggcggcgagccacgtccggatacacctgcaaatcgtccaaccacacagggtccgtggccgttaattccaacacccccacaatcccattccagttgccttgcgtgtgatccgaaacactgtgcgcattgatccccacctccacatgaagccggttgtccacacgtaccgtcagccgatgccgcccaggcgtcaacgccgcagtacaatcatattcatgcggcgtccccaaactgttccgcgacccaatccggcgctcatccacccacacagtagtctcccaatgcggccgctccaaccgcaacaccacccttttgccctgccacgacgcgggaatctccacctcccgctgataccacgccacccccacataatgccgctccggttgcaaccaaaacggcaccttgatattgcccggttgccggtagggcgcataacgctcatccttgaaaaaggatcggtctatgatttggcctgtccactgcgtctccatggtcaccgggtccccaaatccctgctcctgcaatgaaccaggcaaccgcagccgctcctttaacacccggccatgccacccctcccccacaccggcatcctgccggtccagctcaaaccgccatgtccccgccaaattgatgcgctccgcagctcctgcgtaaaagttggccaatgcaaaaacaatgcatccaaaaaatccaactgccagcctttgggcgcccttgagattgaggtgttgggtcatcatgttgcaagggcagtattgcaaatgccgcactccagtttcaacacccaacaatcacccctctccaacggtggacaaaaccaaacaactcggaaatacttccaccatgaaacatacccttgcctgcatcgcactcctggcttggctggccacggccctgcccgccgccgaacgtttccccaacctcgcagccggtagcaacctcccccaaggccccggctttgcaagcaagttcaaagcagactccggcatcgccaaccatccctccgtcatcttttccgatgattttgaacagggcgatttaggggcacgctgggacgaaaaaggcgccggcaaaggcaaggccctaagcctcgtcccaccaaacgatacacgttgtggccgccgctgcatgaaagtcgaagcccgactcggcgaaaaccagggcgacggcctcaccaaatggttcaaccccgtggacaccgtgtacatccgcttctacgtcaaatttgaccccaactgcgactatgttcaccacttcgtcacacttcgcgccaaccgcggcctccgcggcgcagaccgctggagcggctttggcggcgcaggactcaaaccacgcggtgacgagcgcttttccacagccttggaaccttggggcaattgggccaagtggccgcccccgggcaaatggaacttctacagctattggcacgaaatggatgtctcccgtgatggcaaatattggggcaactccttccaagcagaaccccaggatgtcattcccaaagaccgctggatttgcgccgagttcatgctcaaacacaacacacccggcaaacccgacggcgaacaagccttttggattgatggacgcctcctcggacattggaaaggcatcaactggcgcaccaacccctccctccaagccaatgccctgaccttggaaagttacgtcaccgaccgctggacaaaaaaccccaccaacaccgtctatttcgacaacctcgtcatcgcccgcgaatacatcgggccggccaccgccccctaaatgggcagcgtgggctgcggatttgccgtccctttgtccggcactgcggctgccgcagcttgcgcagcgccattctcaacctgcaccaacgccggccgcaacaccttgccctgatacgtatatcccggcgccagcgtcaaaaggatgcgcgtgcccgcagccggtggctccgcacactgatgggcctgatgcatctgcggatcaaacccctcgcccgcctccggagaaaacgcttgcagccccacccgccgcgccaaatcacgacaaacattttggaacaacccgatttgctccaccaaatgcggctgcccgctctgccgcgccgccatgtacaacgcaaacacctggtccagcagacgcaacgtcaactgcagccaatcctgctcctgccgccgcaacttgtccgcttccaaccgcaacgtcgccttctcggtatcattggcctgccgcagaaaatccgtgaatgccttggcctcagccgccatcccgtcggccacttccttcgccgtttgcaccgtccgcgcacattcgccctggatgttcatccacgcgcccgtagcctcggctatctgctgcttgatggcctccaaattttgaatctgcgccactgtcgaacgcaacgcatccgcctccgccagcttcatctcagcccggtgctggagaataaacggcgtcaccaacaaccacgccccggcagccaccgccgccgtgcacagcgccatattcgccgtgctcaacggccactcgctttggtacacaatgccaccggccaccgctaataaaagcaggtcgcccaataaaaacggcaacaccgacggtctgggagtcgcaacgtcactcatgcgcccgccagcttatgtccttaggcacaacccatgcaacagcgttttaccccacccacaacatcgccactccttttgtccaaatcaaagaacccccaccccaaagcaccccgcccctctcacaccccctgccccactccttttccccgcaaaatatggccattccttgccaaagccggtgtagcaaacaaccgccggtattcataagtttttcctgccatgctgagacaccagcctgtgcgtgttttatgaaaacagtccccttccccagaggaaggggcgaataaccggcataccgccacaaccaacgcacaggcccggaccccggctggccatgcaaatgagcggaagtcattccatgggcgcgcccacggccgcagccaacgtccccgaccttcaggggaacgggatcgaaggcttggcaagccccttgccggccatgtccagcgcctacgacttcctccaaaaccaatacgtttacgtcatcgtctccgcccgcgcccgcggattatccgttggcgtcaacctgaaccccgaacgccgctgcaacttcgattgcctctactgcgaagtcccacgccccatggccggtggaaacccgccggtcaacgtcgaagtcatggcccgcgaagtcgagcgcaccctcgcctacgtccaatccaaccgcctgcagcagcaccccgtcctcggcacgctcccacgcgaatttgtccaattccgccaccttgccctcagcgggttgggagaacccaccctgtgccccaactttgtcgaagtcgtccaaacactcgtccacctccgcgctttagggcggctgccctacttccacctcgtcctcgtcaccaacggcagccagctcgaccaccccagcgtccaggctggccttaaatactttaccgccaccgacgaaatctggatcaaactcgacgccggcacacccgagtacttcctcaaaatcaaccgcacacccgtcccctacgaaaaaatcctcaacaacatactcctcgtaggccgacagcggcccgtcgtcattcaaagcctcttcgtctccgtggaaggcgaggaaccgcccgcccgccaaattgagcagtacgccatgcgcctcaaacaactcaaacaagacggcgcccaaatttccctcgtccaagtctattccgccacacgccccacccaccaacccgcctgcagccacctccccttgaaatccctcagccgcatcgcccaaatcgtccgctgcaccaccgaactccccgtagaagtcttctaacccccccgacctccgtcccacttgacagcccgtggcaaactcctacgttgccaaccatgcatcgcccttccgcttcatcctttggcatcgggcttattctggggttgctcctgaatgccccggcacccaccttcgccgcgttggatactcgcgagctgcacacagaagtcaaaatcaccattcaactgaaatacctcatctggctgccggaaggttatgccttgccccaaaaccgctctactcaatacccctgcatccttttccttcatggtgcagaaaaacgcggcacaaacataaacgctttgcaggaccttggaccgctgaaatatgcgcgcacacatcctcaagccttcccttttatagtagtagcccctttgtgtcccccgggacgccaatgggagccgttggcgttactgacattgttggatgaaatccagcgccagtatcgcatcaaccaacacgccatttacctcacaggctacagcatgggcggtgccggcacttgggccactgccatggcggctccagaccgctttgccgccatcgcgccattgtgcggcagggtcattccactgcttgcaggcaacttgtaccgcacgcccgtctgggtctttcatggtgaaaaagaccaggtcgtgcccctgaaccactccaccgaaatggtggacatccttaagaatcgcaataacccccacgttaaattttcactgctgccgggaaaagaccatgaaatatggcacgatatttacgataactccgccctctactcctggttcatggaacaccgccgcccctgacttgagtacaaccccacgccgcgatccatctaggtgaggcaaaaaacaattccccgcgcaacaacacctttgcctccggagacacgccttcacaatccccgctgctccttcctctgcccataccggccaccatgccgaaaagcaaaattcgccccccttataaattttccatttttcttttgacaaccaaacttttcggcctagagtgacctcatagcttggcaaaccacgtggattaacttcgaggtttcccaacatttaaaatttaaaaggcctgcttatgaacgactttaacctgatagaggagccgtggattcctgttatttaccacaatggcaactattgccgtgtcggcatcaagcaggctctttccgatgcccatctcatccgcgacatcgccacctccaaccccatggaccgcgcgggccttctacgctttctcctctctatagtttattggtgccatggaatgccagcccctcaagaaacgtctcggctaggtgatcctttaccggattgcacaccacatcttggtgcaaagacaaattttttctgccttttcgggcagaaacaccgtttttaccaatcaccaacggcaaaccgagaagtaaaaattggtgaactgtttcaagaaattccatccggaaacaatttctggcattttcgacatgtcaccgataaagaacatggatattgcccagcctgttgtgctctaggcctgctgcgccttcctcttttttcagtcagtggattgccagacttgaaatcggggattaatggaactccacccatctatgtctttcattatggcaaatctttagctcaaattctccgaaaaaactggttgccaatgaagcaaaacttgctgggcacgccatgttggatggaccccaccttggttccaccaatcggagaccctatcccgctgttaatcggattaaccgtcccagcacgcaaagtttggctcggacaacccattcaccatggccgttgctctttgtgcgggaacccatcaaaacacctggttttcgaggctcacattcaatccgccggtacgttggaaaattcaaattggcaagacccacatgttgtttatttcctaaaccaacaacaacgaaagtcatgcaaagctcccaatctcgtcgtaggcggtgaatttcaaatggaccgcccttatgccgatcttatggcatgtctcttggaacgggtccaatttcccgcaactgcgacaagccaacttctaattgtcggttttgccacggacaaagctaaaaatatagatgtttgggagagaactgtaactttggtccttaacgaaatgcagacaaccgcagccacagctttttccacctggtggcgaagtgtaagtgcattgtccaacaatgtttacactattattaaaacaaccccctacaatcggcctcgtgggtccaaaccctcgtatgttcactgccatttttcccacatcagaccccatgtggaacatataatatcatctaacatgcatattctagtaagtgaaccaaacgaaggttggcatgaagcacgccgtgagttcagcgcttttttgccgatgttggctcaatccctctctcccggcgtgacctcccaagccgttcaaaagcgccgtgccatcgctcaggccttgccacctaatccctgcccgaaaccggaaccatccagttcaccctccactcaaaaccccaacttgtaattatgagcgccacccttgaatacattacaaaactgtcccatataaaggccggctcccgcactttggttcgcactcatgccaatctctcattgaaccattccgtggatgcctttgatttgttcaccggtctttggtggcccttgcgccaacaatcacaatttgcaccccgtcgccgcgtggcctggctggtcgccaaacttcacgcagtcagtcctctgccacaccaaccaggccagaccctccccatccagctcgcgaagatttggcataggcagccagacaccaatacaaaaaacaggttccagcgcaaattcgatgatctcctttgccgtcccctggaccaaatggaacccgctttgcaatgggccttgagaacaattggctctgcaaatgagccatccttggactgggtgcaactcaccgacgacctctcccggtgggaacaaccgcaagttcgcgaaaaatgggccgaagtctttttaggcaggtaaactcaaaaccaaaaaagaaaggagcatactcatgaacaatcaaaataccacacgcatacaaatccatctgcttcaaaaccacgcaccggccaacttgaacagagacgatttgggagcaccaaaaacctgctacttgggcggcgtcctccgctcccgcatctccagccagtgcctcaaacgcagcatccgattgagcccctacttcaaagacctctgcggcggtgttcgcacacgccgcctcgcaaaactcatcactgaccaggttgatggcaacaatgcgacgaagaaaaaagtggccgccatcctgaagaaatgtggtttggaggccaaagagaacgacgaaacaaatatggtcgtttacaccacaaaagaagccatcagggaaatggcaacagccttgagaaacggactcgaagaacccgacattatcgccagattcaaagagcttttgagcacgaatactgctgtcccggacatggcactgtgtggacgcatgttggagacaggagaaatcaaggacaccaacgtcgaagccgccctgcaagccgcccacgccatttccacacacgaggctcgccccgaagtggattactatgtgacggcggatgacatccccggaactgatgccggcgctggttatgtggacgaagccatattcgtttccgcctgttattacaaatacttttccattgattgggcacaattgctccacaacctcaagggctacccgggcaacagaatccatctcgcagcccataccgtcggcgcctttatcaaggcagctgccttggtgactccatccggcaaacaaaacagctatgccgcccacaatccacccgatggtatcctcgtggaaatctcccccacacccatcaattatgccaatgcctttgccaaacccgtggacattggccaacgtgatttaatcggccaaagcattgctcaactcgcccagtacatccacgagatggatgccggtttcaaagtcgttgacccgtccaagcgcttctggttttcgccgggcatgcgcaatcgcttggagacctcacagcgcgccggtgatacagcaggcgaccgccaaaccatccgagtccaggcggtggaggttgatcaactcgaaaacctgatccatcaggtcatcaaggccattgacccgatcctcgactggcaggaagtccaaagaaccattctcaataaccatgaagcctgacacacttcttcttagactggaaggccccttgcaagcatgggggcattacgagtccaaatttgccatccgccgtgccgccgaggcccccaccaagtccggtgtcatcggccttctgctggcggccctcggcatcccgcgcacctccgctcctgatgattggttgggccggttaaactccctcctcatgggcgtgcgcgtggaccgtccaggtgtccgttggtgggactaccacacagtgggagctggccttaaaatgagaacagccgagggcaaaaacaaggatggccccctcctcacacgcagagaatttctctgcgatgcctcattcttggtagcccttaatggagagcccgcccttataaaagaactataccaagccctccaacaacccaaatggactctttacttgggacgcaagtgctgcccgccttcaaggccaatactggctcacgcccccggctgtcacaaagatctaccatcggcactacagtctgttccatgggaaaaacggtatgcagacgacaccacaccggaaaaacttgaagccctgctggagtggcgtccctccgaccaacaacccaatgcccccgatgacgccgaaatctggtatgatgccccccaatgcttggaacctcccgctcacggtccccgttttattacgagaactgccttctcagtcgctccagacggccaagtcaccgtggcgccccaacaccaacagcagcttcctttgccgcctccacgcccaagagcaaattacaacaactcagcataccaacgcgctcgtgataagcgtctgcacgccgatcatggcctgtgcgtgttttgcaaaaatcctgccaccaccgtccaacacatcacctaccgccgcgccggtggcaacgaaacaacagaagacctccgctccctctgccgcctttgtcatgatgccgtcaccatgatcgaatacggtttgggtttggagatgggccgcatcaacccggaagacccccaatggcgcgatgccatactcaagaaacgcaccgaaatcatccaattccgttcactcgaaaaccgcagacgttttttgcaaccagaggaggtttaaccatgtatttgagccacttattgattgatgtcggcaccaaccccgaccggccacgccccggccgactttggctgcgcaatatttaccatgtgcaccaacgcctgagcatggccttccccaccactcagcggaaaaccaacgacccccacttcttgaaaccctacaacccggccgattttcccctgcacaaccttggcaaccatgtttcccgcaacgaaaacaccggatttctcttccgcattgaccccgtgccggggggcaatcccctgatcatcgttcaatccagcctcaaacccaattgggactacgccttcaacaatgcggcattccttctggcagcccctccccaatgcagggacttcctgcccaatttcaacaaaggcgatcacctgcgcttccgcatcctcatcaaccttagcaaaaaagccaggacaagccatgacggcacccctctcaccaaagtcaaagaaaacatcctcgataaccaaaaccgccctaaatcccagtccaaacgtgtcgcgctgacatgggatgcaaaccaaaatccacaagatgtcatcattccttggttttcccgcaaggcatacgtcacatgccaaaaccaaacccaacccatccaggcatttcatctcaagcaatgtgaaatcctgcgcatgggttggattatcggatggaaaaaccaccatgcagccccggaaccgacctcacaaaaaatgaaattccgctctgcccttttggagggagtcttggaagtttcccatcctcaagccttcgccaaactagtagcctcaggcatcggctcggccaaagcattcggttttggtttgctctcgctctccccggtttcctccgctcaatgaaactggacgacctccatatcctccccaaattctccgatggttggagctacctctatgtcgagcattgtcgcgtcgaacgagaacaaaacgccatcgccatctatgacacagatggcatgatccccgtcccttgcgccaacctggctctcttgatgcttggcccgggcacctccatctcccatgcagccataacagttctggcggaccacggctgtttaatcatctggtgcggagaacaaggcgtccgcttctacgccaccggtatgggtgaaacccgcaatgccgcccgcctcctccatcaagccttcatgtggagccacgaaaacctccgtttcgaagtcgtccgccgtctctacgcaatgcgttttacagaaaccctgccatccaacctgtcattatctcaaatccgcggactcgaaggccgccgcgtccgcctggcctatgacaaagcggcccgtgccagcggcatcccctggaaaggccgccagtatgaccgccatcattggacccactccgaccccgtcaaccgtgccctttccaccgccaattcctgcctctacggcctctgtcactccgctattgtctcctcaggtttctcccccgccataggctttatccatactggcaaaatgctctccttcgtctatgatatcgccgacctctacaaaaccgaaatcacagtccccatagctttccaagcggccgcccaaggagacaccaacctcgaacgccgtgtccgcatctcatgccgtgacgcctttgccgaatctcacctcttggcccgtattatccctgacattcaaaaagctcttgcttggcaaccatcccaaaacgaaaactccccccttgattcagaccccgcccttccctctcacctttgggacccggatttaggggccgtgcaaggcggaatccaacaacctgccacatcccctttgcccccaactataccagccccagccccggaatctcatgatggtgctaatccttgaatcagtcccaccttcactgcgtggagaactcacccgctggctcttggaactcaaagcgggtgtcttcgtcggccgcgtctccgccctcgtccgtgagcgcctttggaataaatcctgccaccacgcccgcaatggcggctgcctcctcatctaccacaccaataacgaacaaggctttaacatcctctcctatggtaatacatccagaactatcgccaacttcgatggactcctcctcgtcaaaatcccaaaataaccccattttccaagggttttccccacgcacgtgggggtgaaccgcgtggtgcgaggtgaacaagaagatgccaagcgttttccccacgcacgtgggggtgaaccggccgtcacctgcccctcccgatccgtccccacgttttccccacgcacgtgggggtgaaccgcggcaggtggtgaagagttcggcgaagtttgcgttttccccacgcacgtgggggtgaaccgtccacccccatcaccagccgccgccccgccgcgttttccccacgcacgtgggggtgaaccgcttccgaagttctcacggacgaagctcaggcagttttccccacgcacgtgggggtgaaccgggcatatttacggtttcacaatgaaccaactcgttttccccacgcacgtgggggtgaaccggccgctttcgaggagctgacgcggctgaagaagttttccccacgcacgtgggggtgaaccggtggcgcgccggtcaatgcagtgccatcttcagttttccccacgcacgtgggggtgaaccggggacagaatatattgtcgagccgctcaacctgttttccccacgcacgtgggggtgaaccgtccctgaccgccatgaactccacgcccgcgccgttttccccacgcacgtgggggtgaaccgccattttgatcaaattccctgcacctcaatccgttttccccacgcacgtgggggtgaacctgaggttgaggccatccgccggcgctcgaaagcgttttccccacgcacgtgggggtgaaccgatttcgctgcggctatcggcctgaacctcaaggttttccccacgcacgtgggggtgaaccgaacctggccatcgagaagaacctggccatcgagttttccccacgcacgtgggggtgaaccgtagtctggccacagcatttcttagagacaactgttttccccacgcacgtgggggtgaaccgtcgatatagccgggttttccagcttcgagggagttttccccacgcacgtgggggtgaaccggcatcgcgctttgatttcgaggaaaaatacgagttttccccacgcacgtgggggtgaaccgcctgtgcgccggtctcggtctgaagttaatacgttttccccacgcacgtgggggtgaaccgttagtcgttgtctcaccgccaccgctcgcgctgttttccccacgcacgtgggggtgaaccggcctcattcccggttggcttaaaaacggtgaagttttccccacgcacgtgggggtgaaccgtgacttggagccaccaacacacaagccagcgcgttttccccacgcacgtgggggtgaaccgacgattgcaacagcggcgttttcggacgcttcgttttccccacgcacgtgggggtgaaccgtggaggtctgaggatggcgagcacgttgggccgttttccccacgcacgtgggggtgaaccgattgttgaaaaccagagccggagcattaatacgttttccccacgcacgtgggggtgaaccggatgtactcggtgccggcgatcgaaaacgggcgttttccccacgcacgtgggggtgaaccgtccaaaccgataagaacatgaagaaacacgaagttttccccacgcacgtgggggtgaaccacgcagcgcggcgacatagtggtgttcaatggcgttttccccacgcacgtgggggtgaaccgcaatgaggtccgagggctggtcatcaacaagagttttccccacgcacgtgggggtgaaccggtcattggcactcttgaccggcgtggccacacgttttccccacgcacgtgggggtgaaccgctttccaggcaccacatcaacaattccccgaagttttccccacgcacgtgggggtgaaccggaactggtggaaatctctacgttgcgcttagtgttttccccacgcacgtgggggtgaaccggcaagcctgacgccaccaccaccgccgacggggttttccccacgcacgtgggggtgaaccgcgccgccatggccggtcatctggccggccaaagttttccccacgcacgtgggggtgaaccgtgtgatccgcaggcgccggccccaacggcggtgttttccccacgcacgtgggggtgaaccgtgatgcccgcggccgcgggcaatgcagtggccgttttccccacgcacgtgggggtgaaccggtccagccggctttgcgcggggccggcgaggggttttccccacgcacgtgggggtgaaccggttgccagacaatgttgacgtagccacatacagttttccccacgcacgtgggggtgaaccgtttgttccagtgaaataccagccaccgtcactgttttccccacgcacgtgggggtgaaccggcggcgatggagctggcgcgggttgaggcggagttttccccacgcacgtgggggtgaaccggtctgcgccagaaccactagctcctaaaatatgttttccccacgcacgtgggggtgaaccagttagttccgcggcccccgtgttcgagacgcgtgttttccccacgcacgtgggggtgaaccgctatgctggccaatgtaggtatgatgagtgatgttttccccacgcacgtgggggtgaaccgtttgtttaactctttagaagaaaccgaaatgttttccccacgcacgtgggggtgaaccgaaaccgaaatggaacgcattctgcttgaacacgttttccccacgcacgtgggggtgaaccgaggtcgaagcggagcaaaaacgggccgctgaagttttccccacgcacgtgggggtgaaccgaaaattattctctgacgtcatcatattctgaagttttccccacgcacgtgggggtgaaccgtttgagtcggactgatgtggtggcggacagtggttttccccacgcacgtgggggtgaaccgttttggatcatccggcgagtaaagaagttttcgttttccccacgcacgtgggggtgaaccgccaccacctccacgatggtgcaggttggaaaagttttccccacgcacgtgggggtgaaccgagggcggcggcattgccgcacgccacgagtgcgttttccccacgcacgtgggggtgaaccggcataaccacgagcccactcttcaaacttttcgttttccccacgcacgtgggggtgaaccgatcgtccagctttttgaagaagcggacgagatgttttccccacgcacgtgggggtgaaccgaaacggctttcgccgcaacgaccacaatctaggttttccccacgcacgtgggggtgaaccgctggtggacacgacccgcaaggaacgcaacgcgttttccccacgcacgtgggggtgaaccgataccacactgtctgccgacgaagccgcccgggttttccccacgcacgtgggggtgaaccgcagattgcggtgtggttcagccgtcaccaaccgttttccccacgcacgtgggggtgaaccgtttcatggcaccgaagaccacgatgtggacaagttttccccacgcacgtgggggtgaaccgaagggctggcgtgccggtaagtaacatcatcagttttccccacgcacgtgggggtgaaccgatggaaccgtagccacggagtttgagtttgttgttttccccacgcacgtgggggtgaaccgggcaggcggacagattgccacgcctcgcgacagttttccccacgcacgtgggggtgaaccgttgttcggcccagcgctccggcagcatccggtgttttccccacgcacgtgggggtgaaccgctcggtttcacgtgcttgtcgttcacgcaaaagttttccccacgcacgtgggggtgaaccgcggtactgacgggctggtctcacgcccaagccgttttccccacgcacgtgggggtgaaccgaattgcgtataatccggaaaataacacacggagttttccccacgcacgtgggggtgaaccgaagcggaggccaaggcattggctgaagctgaagttttccccacgcacgtgggggtgaaccgagacggcttttcagccgcaacgaccacaatctgttttccccacgcacgtgggggtgaaccgatgcaatctcggctgctacgaagcgtggcacggttttccccacgcacgtgggggtgaaccagggggcaccttgaaaaggttgacatctgtggcgttttccccacgcacgtgggggtgaaccagtagtcgcctagttggattcgttgccgaatccagttttccccacgcacgtgggggtgaaccgctggtggacacgacccgcaaggaacgcaacgcgttttccccacgcacgtgggggtgaaccggcgcacataaagtgcgccaatgaacgcaagaggttttccccacgcacgtgggggtgaaccgctctttgccacagcgcttgcggccagggcagggttttccccacgcacgtgggggtgaaccgaaggaaacagcttccaaaatgccatccttgcggttttccccacgcacgtgggggtgaaccgtcttatgccagacccagacaacagccacgaaagttttccccacgcacgtgggggtgaaccgaaaagcgcggcgccgtattgttctcctgccttgttttccccacgcacgtgggggtgaaccgactcaaccaccagcccaaacactacccacgccgttttccccacgcacgtgggggtgaaccgaaacagccttttggctgcaacgattgaaagttgttttccccacgcacgtgggggtgaaccgaaagcatttgtctcgtatgttgttatttggtggttttccccacgcacgtgggggtgaaccggcaagcacggatgtacagtcggctgtggccaagttttccccacgcacgtgggggtgaaccggcgatggcggttcggtcggacagagttgctgcgttttccccacgcacgtgggggtgaaccgtgtacatcttcacacttgcatgtcattgccaggttttccccacgcacgtgggggtgaaccgtctgtccacacattgcccattgcagtgtggatgttttccccacgcacgtgggggtgaaccgtggacgtagctgcggcaaaaaccgcagacggtgttttccccacgcacgtgggggtgaaccaggttgacacgaccccggtcacgttgccgccgttgttttccccacgcacgtgggggtgaaccgtttatttttcacggttcggaaacatatagcttgttttccccacgcacgtgggggtgaaccgcttgccgggttggaacgtcgcgaagccggtaagttttccccacgcacgtgggggtgaagcgctttgtgtctttgtgcctttgtggtttctcctggtttccacgcatgcaagggtgaaccaattcgcgttcatccgcgttcatccgtggttccgatttccccacgcgcaggtgtgaaccgttccccccaaaatttcatcctgaaaatcagctccagcgtatttctttcttggcagcccaagttttgcggggcatacacactctcaacgacacacaacccatgaacttttacgatgtcatcaaagtccgccgcagcgtgcggatgtaccatcccacacccgtcagtcccgacaaattggaacgcatctgggaagcagtccgctgggcgccctcagcctgcaacttgcagccttggcgttttttaattgttaaaagcgatgccatgcgcgcccgcgtcagccggtacctgcaaccgtgggtcatgaccgcaccactcatcatcgtcggcctgggccatcgcaaactgggctggcgccgcgacggccaaagttaccacgaagtggacgtggccatcgctttcgagcatctcgtcctggccgcagcagccgagggcctcggcacctgctggatttgcgccttcgaccgtcaaggcatgcgcctggccctcaacctcgacgaagactgggaccccgtggcggtaacgcccctgggctaccccaacgacccttcgccccggccgccgcgcaaaaccatcgcggacatcgtaggcgaagtgtagcctccgtttccaatgcggcccgaacaccttgacctcctggcctgcccgcaatgccggagcgatttgcgcctccacccggatgcccttatcgcagacggccgcgtggaaactggccgcctcgaatgcacccgctgccatcaacactttcccatccagcgcttcatcccgcgtttcgtcccctcggaaaattacgccgccggtttcggcttcgaatggctccaacacgcccgcactcaatacgacagctacaccggcgtgcccgtgagcgaaaaaagattcttcgaggaaacccgctggccccgccaactgcacggcgagcgcattttggaagtcggctgcggctccggccgtttcaccgagcaggccgcgcgcaccggcgccatgattgtttccattgactacagcgtggcggtggaagcctgttacgcctccaacggtcacctgcccaatgtcttggtcgctcagggtgacatctaccgcctgcccgtgcgccatgacttctttgaccgcctcttctgcttcggcgttttgcaacacacaccccgccccgcagaagccttcctcgccctcccgcctcatctcaaacccggcggctggctcgccgtggacgtgtacaaacgcaacgacacactccgcggccacatcggcaaactttttggcaccaaatacttcgtccgccccctcacccgccgcatggcccccgagcgcctctaccgctgcgtcaacacctacgtccgcaccatgtggcccctcgcccgcctcatccaccgcatcccaaaaatcggccgctggctcaactggcgcctcttgatcgcagactaccgcgacgtctatcccctctccgaaaaacacctcctcgaatgggccatcctcgacaccttcgacatgctctcgccccgctacgacttcccccaaacactcgaaaccgtccgccaatggttcgcccaggccggcttgattgaagtggacgtccacttcggctacaacggcatcgaaggccgcggacgccgtcccctttcctaattccccaccggcccacccctcgcccccgcttcaacgctccccatccacatccaacgccccaatcgccagcggcccctccgcactgcgccgccgcaacttgaacgtctccctgtccgcctcccgtgccggctcaaacaacggccgcggcaaccctgtgtccgccacccccgcccgcctcaccaacgcactctcccgcagcggacgccaatcccccctcaccgcccccgcaaacccaggctcccgccccgtcaacgtctgcttccaaccccgcggcaaatgcgttgaccccgccggcacccaattaaacgcccccgcagactcatacctcaacccgggatcatacaacatccgcaacggcctgcccccgccgtaaaacacacaataataaacctccaacccctccaaaacatcctgcaacttgaacacacccgcccgccccgcctccgcgctcaacacaaaagtattgtgcacaaactgcgcccgcccccggctcgtcccgctcccatcgccccccaccctcaccgccgaaactgccaccccgcccgacttataaaacacattccccaccaccaccgcatcacaccgcacccccgccccaccttccccggcccgcccatgcctgtccggccccaacaactccagctcccgcccccacgccccctccacccaattataaaaaagctccgtccgccgcgccctcgacttgatgttgttcccaccgcgcccgtccaacacatgacaaaactccatccgaaacaccccctccggatgcttctgcacatccatcccaatatacacttgatgaaacgcctccccctgcccgcaacgcgccacagtcacccggctcaacgtcaacgaccccgccgcatccgaattcaaaaccccgagccccgccacatcatacaccgccacacgccgcaacacactcccatgccccacattcctcaccccccgcgtcgcattcgtgtcccccccgcccgtgatctccaaatcctccaacacataataatccccgctcacccgcaccaccgccgcctcacgcccctgcaccccggaaatcactggccgccgcccccccaccggcacgccccggatcacgatcggctgctccgccgtcccgctcacatccaaccgcacatcccccggataaatcgcgccccccatcacctccaccacatcccccggccgcaacaacggcgccacactctgcagcctcacatgctcccgcccaggccccacctcatacaccgcggcccccaggctcaccgccgccgcaacaaacagcccaccacaaaaaatctgaacaaaacgcaccacccgcccacctcatcgcaaatccaacaccccaaaaaacacatcatccggcaacgcactgaacaccgccgtcgccacctgcggattcccccgcgccgcctccacaaaatccatcatcggctccaaccgccgactgtaattgtacgccagcaccacacccccggccctgaccttccccggatacaacttccgccaataatccaaattccccgacttgtccgcattcaaaaaaacaaaatcaaacctccgcctcaaccccgccaccaacacatgcgcatccccctccaaactcgtcacacgccccgccaccccaagcctctcaagatgcctcaccgccttcgcccgccgctccggcacaatctcaatcgtcgtcacacgccccccacgcgcctgcgccgccagcgccagctcgtacgtcaaataaccgtgcgccgtcccaatctccaaaacctcccgcgccccccgcaacctggccagccaatacaccagcgcacgctcctccccaggcacacgaaacatgctctcatcctccgcctcaagctccgccaacaccttgtcctgcgccgtgcgcctttgcgccgcaacctccgcgcccgccgcatcccccggactcatcccccacaccccacacaccgccgccaacaccgtggcacgcccgagaaaatcccggcgccccgtcgctccgccctcaaaaacatttgcattcataaaaacatcccacatcctttcaccccccaatataaccccaccacccccacctgacgacaccattaccacaccccccgccatcgtaaaaattctaaaccttcacattcggatgacctcttgttacattttctacaaagatgtcaaacgcaaccaacactccctcctctttgcgagcttggtacggggcccccattaaagcatttcttgcttccgactcccaaaagattctaggagaaatcacctccaactgtgatcgcacattaatttcaacacaacgagacgcctggcttgcggaaatcgaaatcctcagaaaccaactccaaggacttgagggggccatcttctttgaattcaacatacctcgcatggggcgtcgagtggattcaattctcgtgattggtcctgttatctttgttttggaattcaaagtcggtgagcgcaactttgaccccgccgccattgaacaagtttgggactatgcgcttgacctaaaaaatttccatgagggaagtcacgatgtctttatcgctccgattttaatagcaacagaagccgcctctcccgcccattttgaatatgtgcacgaccctgacaaagtctttcgccctctcttgactaacgcatcatccctccgtcttgcaatagacaccggacttaaagctgctaatggaactcccatagacgtggagacatggtcacgagcttcatataagcccacaccgactatcatcgaagcagcacgagccctttacgcccaacactccgtcgaggctatcgctcgttttgatgccaccgctcaaaacctgcacaccacttcaaatcgcattgaagcacttgtggacgaagcccaaaccaaaaagcaaaaatatatttgctttgtcacaggtgtcccaggcgcaggaaaaaccttagttggcttaaacattgcaacacagcgccgagccactgaccaacctactcatgcagtctttctttcgggtaatggacctcttgtcgcagtacttcgcgaggcccttacacgcgatgaattagcgcggagaaaaaaagaaggtaataaagtcaggaaaggcaaaattgccgaaagcgtcaaagcctttattcaaaatgttcaccactttcgagatgaaggactcattgcgtccaaaccgccccctgagcacgtggtgatctttgacgaagctcagcgtgcgtggaatctaaggcaaactgctaacttcatgaagcgtagaaaaaatcgtcttggcttcgctcaatccgaaccggaatttctaatttcatacctagatcgccacaaagattgggcggtcatcgtctgcctagttggcggagggcaggaaattaatacaggcgaagccggcattgaagcttggttgtatgccgtccataattctttcaaacattggaaaatgtttatttccccacgacttaccgattctgaatatgcggcaggacgggcattggaaatcatccagcagggcaacaattatcatttcgatgattccttgcacctcgcagtctccatgcgctcattccgcaatgaaaatgtctcggcctttgttaaagccctactggattgcgaaaaacaaaaagcgcaggaaatctatcgacaagtaaatagttgttacccaattgttttaactcgagatttaaccgccgctaaaaattggattcgtacacgtgccagaggttcggagcgctacggtttggttgcctcctctaaggctatgcgtcttaaaccccacgcaattgatattcgagtcgctgtaaatcctatccattacttcctcaacgaacgagatgacactcggtcaagttattacctggaggacgccgcaaccgaattccaagtgcaaggattagaactcgactgggtctgcgtcgcttgggatgccgatttgagacactcatccaccggatggaattattatgatttccgtggtaaacgttggtgcaatataaacaatcaggagaaccgcacttatttacgaaatgcctaccgagtactactcacccgcgcccgccaaggcatggttatttttattccaaaaggcagcactcatgatcctacccgcttacccgcctattatgactcaacctataattacctaaaaagtctaggcgtccctgaagtcatctaaagcacatcctcatttacactattcatgcatcaactccacggcacagttcagaggtcgttataccaagagccttcgccagcttggcgacgtttttaatccccggattacgcaagccacgctcgattccactgatgtaagtcggatccaaccccgccaattcagccaatttttcctgcgtaagcgatttcacttcgcgctgacgccgaacgtttcgtcccagcgtaacgaggatttcatcgcgttttggcattaccgtcattccacgccatttttcccaaaaaatctatggactatcagtcaagtccccaagtcccgccaaaaccgccaatgctgagccgctttaattcccactccactggggagagaaaaaccaaggtgaggaaaaaccctattttttctctctccttcatggagagggttagggtgagggaaattccgaatctatcccctctcccgttggaagagggccaagggtgaggggcaattcataaaaaacctttgtgtctttgtgtctttgtggtgataaaatccgcgtccatccgcggttcccactcttttgaactccctttactttgaagtcataggtctggggtgaggaaacccaatcactccccctccctccccctcagggggagggccggggtgagggaaacctaattatcccctctccttttaggagagggcaagggtgaggttccttccccaaaaaatcaccgctcccagaacactcccccacctccccctcccaccccatccttcccaccgcatggcacaccgccatccacaaccaaccacacagcacaccgccccggcggccaccgcccccactccaccacccctcgacctctccaacatcccccaactcctccaacaactcctctccgaccccaacctcgatccccacaccctcgcccaagccatcgaacgcctcctcctcgcccaaaccctccaaaccctcgccgaccccaccaccccacccccacaacgcgccgccgccctccaaacctaccaccaatggcgcaccaccgacctccaacgccaacgccttcaaatcgctcgcgaacgcctggaaatctcccgccaacgcctcgaactccagcgccaacgcctcgccacccaacaaccaccccccaccgacacccccgaccctcaagttcccaccgaccccgaagaactcgaccgaatcatcctcgaccagctcgatcaaatcctcggcctcaaaccccgcacccccaaacccatttcccccaaccccgccccgcccccgcctccggctcctccccccgatccccaaaaccctccctaaaaccttcacctccctcctccaccaaagcgcactctgcccaaaaaccacttccgattgagccgccgccaagctctgcagccgggcctaatttttattgagaatgcccgctgcaacccgctatgctcgccagcttatgaatgtgttggtgacaggcggcgccggttacatcggcagtgtgtgtgtggagcaattgttgaatgcgggccatcaggtcacggtgttcgacaacctttccgaaggccatcgccaggcggtggacgagcgggccacgctcgtagtcggcgacttggccgaccgtcaggccatcatggacgccgtcaaccagagccgtcccgcagccatcctgcactttgccgccaacgcactggtgggggaatccatgaccaatccctccaaatacttccgcaacaatgtcgccgcaggcctgaacctcttggacgctgccgtcgccgccggaatcaaaaagttcatcttcagctccacctgcgccacctatggcgtaccagagcgcctgcccatgaccgaggatttgccccaaagaccggtgaacccctacggtgaatccaagctgatgtttgagaaaattctccattggtaccatcagattcacggcttggaatttgcggccttccgctacttcaacgccgcgggtgccagcgagcgtttcggggagcatcaccgcatcgaaacccacctcattcccaacgtgttgaaagtggctctcggacagcgcgaatgttgcgaaatctacggcaccgattaccccactccggacggcacctgcatccgcgattacattcacgtggtggacttggccgacgcccacatcagggcgctggagccgggcaaggccggtttcttcaacctcggcaacggagacggctattccgtccgcgaagtcatccaaacctgcgagcgcattacgggcaagcccatccgggcagtcgaaaaaccccgccgtccgggcgacccaccgcgtttggtggccggtgcggaaaaagcccgccgggaactggggtggtcacctaaatacccacggttggaacaaattgtacactccgcctgggaatggcaccgccgccacccccatggttataccgcttgaaacaaacgggtgaaaatcacgcaaactgagcgaaccggcttcctgcaatgagtttgggcaaatcaacggtcttgacagatgccactaaaaaccggcaaaaaaatcaggcgcaaaaaatctgcctgggatggcatctaaattgctattgcttaaaggattaaagtgccctttccgggcgtccgaaaccttggaaagagccgtccaaagacctcgaaaaactgcaagtccgggtgccaaccggtacaaggatttgaaaaaaagtcttggaaaagttacaattcggtgaaaaataaaagttcgtttggcatatgttagagacgtttttacgcggtgactacgccgcgcagccaatggatttgccagtaatgattctggcattgtgtctggcctttttgggcgggcatgtcatcgcgtggacctacatggccacccactccggcctctcctattcccgcaccttcgtcaacgccatgatcgtcctgccgatgatcgtgacctcggtgatgatggtgctgtccaacaacctggtcaccgccttcggtttgatggccgttttcgccatcgtccgtttccgtaatatcctccgcgacaccttggacaccacctttattctcgccggaatcgtggtgggcatggcctgcggcacgcaccgcttccccgcggcggtcatcacatgcatcatggtgtccattgtgctgctgtatctgaacatgaccatgttcggcgcacgccatcgttacgacatcatcgtcaacttgcattgggcccgctccctcaaggatttgcccgaactgcgccgcttgctggaccgccacagccgcatcactcattgcgccagccagcgcaccagcgaaggctacgaaggcgccgatttaagctaccggcttttgctgcggaacccggaacgcgaacaagacctgctgaccgaactcaaagccatggagggggtctcccgggtaaccagcatgaaggccgaagacgaatctgaaatctagtagaaggaagcacgatgaccgcactacccaaaatcccgagtcccccgtcccactactggcgggagttccggcatggatacctgccgatcattgttttcctgggcgttctggtgttgtccgtcaacctttggaaccgccacatcgcacccccaagcatcgtgggcgaggtggagtccatccgttccaacattaccgccaccgaacccggggaaatcaccgaactcagcgtggacttgctgacccgggtggagcgcggggaccccatcgccaccatcagcgtcatggaagacgaagctgtgcgggcgagcatcaattctatgcaagccgacctgacaattctcgaggagcgcctgcgccaaagcagttaccgcttccaggaaaatttggaaagccttcgccataacctgtggcaacgcaagattgaactggccaacgaccgcgcacaacttgtgtacgccgaagccactttcaaacgcatcgccagtcaagtcaaagacggtgtgaaaagccaggatgaatacgacttggcaaacgccaatgtacaagcattaagaggcaaggtttccgagctggagaccctcatcacaactttggaggaaaatgtgaaacgcttggaaaaacaagccctctcctcccaagacgcggctggcaatgaagcaattgccaaagccattcaagccaagcaggcggaaatcctggccttgtccagccctctcgtcatccgcgcccccatgtccggcgtggtgagcgcagtctataaacgcaagggagaacgagtggtgcgcggtgacgttatagtggtcatcagcaccatggaagccgagcgcatcgtggcgtatgtgcgccagccgttgaacatcaagcccaaagtcggcgatacagtggaagtgcgcagccgctctcaaggccgggccctggcccaggccaaagtaatgaaagtgggaacccaactggagcccatcaatccttccatcctccccatggccgtccaaaacggtgtgatggaatacggcctgcccatgctgattaccctgcctaaaggcctggccctgatgcccggtgaaatcgtggacatcagtctgcctgccggtttccgctaaaaaaaattttttacaatggccgccctcccgggcggccttttgtttttcacgcaaagaccaggccatgcaggttttcaaaccaaaccttctgaccagcctcacaacaaaggcttgagtcagaaacctcggcccggttgaataacgcccatgagagcagtgcaattggtggcccacggaaaaccgggccgttttgaactgcgggacctgcccgatcctcgtcctgccgaaggcgaagtcgtcgtccaggtcatggcctgcgggttgaatcatctggacttgtggctcgaagaaaacggtctgcccatccaaccttcactcccccgcacagccggctgcgaaatttccggccgtgtcatccaaaccggccctggagtcaccgcctggcggccaggggaccgtgtggccattcaatccaacatcttctgcgacgactgtgaattttgccagcgcggcgaggaatccatgtgcctgcgcagtgagctcctgggcatccaacgtgatggtggttttgcggaaaaagttctcgttcctgcgcgcctgttggtggcgctgccggccacggtggatttccccacgtcagccgcactgacattggccggaagcaccgccatgcacatgttgacccagcgcgtctcggtcaaggccggcgattgggtgctggtgatgggcgcagccagcggtgtcggctctgcggccattcaaattgccaaaggcctcggagcgcgcgtcatcaccaccggctccaccgaagccaaacgcaaactgggactccaattgggcgccgattacgccctcgaccccgccgaaccgcgctggacggcggaagtgcgaaaaatcaccaacaaacgcggcgttgattacgtggtggaacacgtgggcggcgacgtgctgcctcgtctgatggaatgtctggcgcgtggaggtgccatcgtgacctgcggcgccaccgccggacgccaaatcacctttgacatctggcccttctttgtgaagcaacaaagtctcatcggaagttatggccgcaatcgcgccgatatgcgtgccaccttggactggaccgccgccggcaaactcaaacccgtcatccatgccatttaccccctggaccgcgtaccggaggcttttgctgctttgcgacaacgccaggtcctcgggaaaattgtaatccaaccctgaaccgtaacatccatcttcgccatgaaaaaactcctcctctggctctccatcagtctgggcttgctctgcgcaaaacttggggccgcagaacccaacacgttgaccgacgccgagcgcgccgacggctggcggttattgttcaacggtaaaaaccttgacggctggcgcggcgtgcgacgccccaaaccgcccaccacaggctgggtcatcaccaatggatggctggtcaaagtcgccggccaacgcgggggtgacctcatcaccacccaacgcttcgacaactttgaactctcctgggaatggcgcatcccgcctcgcgccaataatggcgtgaaatacatgtttttggaggaccgcggcgtgggccacgagtatcagatgattgatgattccattctgagaaaccccaaacagcagacggcttccttttacgacatattgccgccgcgtccccatgcacccgtcaaactagccccggaaatcaaccacagccgcatcattgtccgcggagcacatgtcgagcactggttgaacggagagaaagtcctggaatacgagtgcggcagcccggccgttctggaagccgtggcgaaaagcaaattcaaaaattcgcctgacttcggcaaaaaagtcatcggccacattcttttgaccgatcacaacgacgaggcggctttccgcaatatcaaggtgcgtgaattaccagccccgtagaaggggccggctcttccgccatggccgtggtggacgtcatgccccccgccaaagaacaaagaatcaataacaccgccgctgccagcagcgccagaagggcattccgctcgcgggagtcaaaccaccgcaaggcgccagtccccggaccctccgacatcggtgctgttgatttgttctgacccataaacatccgttaacaataagacggtttttagggcaaaatgttggaaacttttttcaattttttttggaagaaccagatgcacccctcaccgccgcaaccggaaaaagcgtttttccccgcccgcttcattggtccaggcacgccaaccgccgacggctggcggcaaggggataacaggttgccagacttccgaagtcagatggtgggatgtttccaatcccatattatccgcatcctgccagcgtaaaacaaggtggccggattgtctcgagatgaacagtcgcggaggtggtggcacaacatcttcaaaagcagtccccacccacaagcgctccaccatgaccccaccaatattggccgcctgccgaaaagcccaagccacaaccgtgctgctgccggcagtgtcaccggagacgattccagaatcggattccaaagcaggattcacccacaacacacatcgccctgtattgatgtcaaagcgggtcacaacggtatgcagtttttgagtagatagagcatgaggcgtttcagacgttggcagcgcagccgaactgctcaagcccagccggaaatgccccggcggcgcttgattggtggtgacaaacaaccgacaacgaaaaccattacccccatccttgtagtgtgcccaatatgcaggcaccgaattggtcggcaggctcaaaactcggaaatccatgcgcgcatacaatacatatccactgccggaagtaattggggagattggcaatggggcattcacatcctctgagttctccatgcttaatcgcaggctgcctcgctccgcgacagcttgtccagcctggccgctgtgggtctgccatttcgcagatccgacatccaccaacggcccatctgcataatcaaactcctcggtcaacaatcggccgggatgcggagccaccgtcacatggaattgattggtaatacgatgataaccatccgtgatcaccatgctcatgatggcatgtccggcacgatcggctgcagggcgggcagtcaaacggcgttcatattccgtgccggacactacgagatttgtcgcaggaaataaaacgcggtccgacgcactcacggaaatttgtaaggggtcaccttctgcgtcctcaagtcgtatcggccacaaatcaagtgtctgattaacacgaatgatttgatccggaatgctttcgcacttggggaccccaagcctcaccgcaaaggcacgctgggcactgaggccggtatcatccagggcggtgattgtaatacgcgcggtgccttgcaagccttctgaagcttgcaatacaagcgtcctctgtcctgcgactccaccaaaaataaatccttcaggtgggatcaattccggcggctcgcaaacgccataaagataaataaacggcaacggcgtgtcctcgtcggtcaaagttaatgacagtgttggcgtgcgtccccctgcaggcaaatccaagtctggaattgccgagagagttggcggcgctccaaaaggctgcacttcggcaaaagaataccccactcgcaaaccatccaaccaaagctcccccatgccactgctgctggccaaagattgccgcaatgccacggcgtggatggccaatggagctgttccgtccgtgggtatttccaaggctgtgtcttgttcccctgctggattcacccacaaagttgcggcaggcggctgaagttgataacgcatcaccaccacctgttcctgctgtgtggaacaagcttgtggatgatattgtgcgtacaaaggcgatgttacaccggtcaggcgaagtcccaagcgaaactgaccgggcggggcgtccatcgtcgttgcataaacacaggcgcggttgttgttcacgcctgcatcttttaacagcagaaagcacccaccgccgccggagggcaaacgggagaaattaacggtaaacctcacatacaacaccccgctggtgtgcggacgtcccggcaaaaacacctgcacatcctccgtcaacgtttcggacaggcgggcgcggccttgaagcacttgaagttgattggatgtgccgctgtagttggaccatgtgtccggcgccagttgcaccagcggaccatcgtcgtagggaaaagtttcgtgcaacaacaaggccgctggaagctgtggcacaccgcccatcccaaagaaaaggacaaggtgccaccaagcccaaaaggatcgaagaagtcggaaagaattgaaaagcgatggatgcgagtgtcggtctgtgtgcatgaacgcccgttggacgcagcgtcaatacacaacagttcccatgctgacaagcctcctttgcaatgagatcagtacgggcgtcattggcaaacaacagaaatagagcaagtcctcagcccccgatggctgtcatgggacggcacggagtgaatccttgcaggaaggagtgagccaagggtttgcgggccatggcctcgcggaaaaattcttccagctctgcatcacttgctcctctgcgcaataaagctcccaaatccaattccccatgatcccccaggcatggccgtatttttccgtccgcagtcaggcgcattttattgcagtgctcgcagaaatggggcgtggtcagcgcaccgatgaatcccaccaaggcacccgtgcggcggagccggtaatatttggccggcccccaaccaagtcgggggttgggcacgggcgtcatctcatcatgttggcccaacaatttcatggcctctccgatgctaaagaagttacgctcgtccaagacatcgctcgaagtgaccggcatcaattcaatcaaacgcagcggcaatccaagctcggcggcgaaaagcgtcaacggccatatttccttttcattaacccctcgcattaaaacacaattcaacttgatgcgttcaaacccacactgcaccgccgcttgaatcccgtccagcacccgctccaattggccgccggtgattttgcggtaaagctccggattcagagcgtccaggctgatgttgacagtgcgcaaacccgcatcacgcaatggcggggccagcgcggccaaacgcaaaccattggtggaaaggcccacacagtgcacccccggcatggccgccagttcacgagtgatttccaccacatcatcccgcaccagcggctcaccgcccgtcaggcggaatttcctgaagccgagccgtacggccacgcgggcgacacggacaatctcctcccgtgtcaaatggtccggccgggtgcgccagccgcggtatccctccggcatgcaataaaggcaacgctcattgcaccgatccgtgatggacaatcgcaggtaatctatggtgcggccaaaggcgtccatggtttaatgtgtttggtgagggtcccgtccctgcaaatgctccacggcctctatgatggcctcacacaaaaagcccaaacattcggccactgcacgtggtttgccgggcaggttgatgatcaaggtggtgccgcgtgtgccggccacggcacgcgaaagaatggcagtcctcaccttttgaaacgattgcatgcgcatcacttccccgaagcccggcaattctttgtccaagacccgccgcgtggcctctggagtaacatcccgtgcagtgatgccggtgccgccggtggtcaccaccaattcacatttttcttcatccgccaacctgcacaacgcgccggcaatggcctcctgttcatccggcaccaccatcgcaacgaaggtttggtccggccccaaaaattcctttaacacccgttcaatttcagggccgctgacatcgtcatagactccgctggcggctctgtcgcttatggtgaggcgtccgattttcatggaatgtcccttccccatcatccaccggacaccggcggaatgagggccacctcatcaccgggatgaaacaatgcctcaggcgttgcatactccccgttgcgcgccagtcggacggtcgcccgatggggcgtgagggcggggtgttctttcaacaaacgctcccacagctcagcagccgtcatgacgcccccaatcggccattggatttccccgcagcctgcggcatctttcagttgagcaaaaagcagtatgcgcataacgctcttgaggtgccggagacagcgcctcgatagtggacgttattactttaagctgttctaaaccttgacttcaggcaaggttttttaacggcgggcaaaccaacggcgtcgttgcaaatgctgtactccattctcaggtcaccggttcaagcgtgccatgacggacctgccagcgatgcaatgtgcggcttaattcccgcggccaattttcttccgtgcacgtcatgaagacctgtccgcgggcctgacggctgcgttcgagcaagggaagaaaagcagtgcgccttttcaaatccagttctcccatgacgtcatcaatcaacaaaatcgggggtgcccccaacaccgaggtcaaatactcggcttgggccatcttcaatgccagcgccaaagtgcgtttttgcccctcactggcatattgcgaggccggtttgccattcaatcgaagttccacctcgtcccgatgtggtcccacaagcgtcaaacgggtggcccgctcctgttcacgcgagcgttccagcgcacgcgccaaatcaagctcgccagtggagggttgataagccatttgcaattgttcatcagcaggagcaacccttgcatgagcggcacagaccagcggagcaatgcgagggatgagttcctgacgcaaacgcatgatctcagtaccggccgccaccacctcgcggctgaaacctgccagtgccgtttcatcccagtgccgtgcccgcaacaaggcattgcgggcgcgaacggcgcgagtataacgctgcaataatggcaggtaggggggatgcgtttgtgccagcagcaaatccatgaaccgccgccgcacgcggcctggtcccttgacaagctgaacgtcctcactgcaaaagacaacagcccgacaggtgccatagtaatccatgagccggcgcacgggctggccatccagcagcaacttgcgctggcgcggggaccaaaacattttcacctcgtgccgtaacgtgcccaccacggtggcgcccacccaatagcctcgtgcaccgtgccggatgagctgcgccccgccgacaccgcggaatgaccgcaacgtggcaatgaggtagatggcctccagaaggttggtcttcccttgggcgttgtctcccaagatcagatgaaaacccggcgtgaacgccgcgtccaatcgggcgtagttccgaaagtcccgcaatctcagccgggccagatgcacgggacaaggttagaaggctgcaggccgggcggcgagcaattttggaggagcccaagatgctttcttgagctgctgcacattgaaaaacggacatgaaaccggcgctattggggattcacggctggacaaggcccgatgatggggtacgtttgtttgaatgatggtgttaccgaaacccgaggtcatcctgacgcatgaaagtgacctcgatggcctgatggccggtgtgttgttgcaacggctcgcccgcaagctctttgggggttatgtgcccctggaggcatgtcactataacatctggcgaaaccgggacttgcgtgaacgttcggcctgggtggcagattttgcctttgaacctcggctggatcgcgccaactggttgcttgtggatcatcatccctgcgaagcacagcccaagcatttgatgttcatccacgacaccaccaaatcagccggacgcctctgctacgaattatgctgcgagcatggcatggcctccccggaattggagcggctggcgcatttgaacgacgtggctgatttatttctggaagatgaccccgattttgtggcggcctgcgacgtggccaacctcgtcaaggtgtatggtttttggaatctgcacgcgctggtggagggccgcattgaagcccttctaaaccatccattgctcgaggtcatggcggtcaagcgccggatcgaggacccgctcggctacgaatggagcaaagagcacatcatcccgctgggcgcaaaaatcggtctggtcgaaaccgtcatcgggaataacaacgcgatcatctatcaactgctggagagcaaggccaccccttatgaagtgttggtcaccttgttccgcaaaagcaacggcgtaatgattgccagtttccgcagtcaaaatggccaagccctcaaggccgccgagcgcgtgcaaggtggaggtcaccccaatgccgccggagccattctgccgcggcatgtgcgcaatctggccgatgccgtcacttatctcaccggtatcttcaaccctgctcctgcaaaaggttctcccctgaacagtttggaggcgctttttgccgaccttgataccaagccataaacagcacggattcggcagcaggattcacaaacacattggccccgaggcgtgcctggactcacggcctcggcacgccggtgtccgttgacactggcgccgcggcaggctggttgattgtggccgctttcaagtcctcacgcagcatgtccaactgatccagttgcaatttggtgcggcgcgccagtgtgcgtggattgtcgctcatcaaagcctggccatccgccgcaaaaatcgcccgctcgcgccggctgagatatgtttggagcactcgcaggtaatcctcggtgaggcgcaataatggcggtgccacgcgggtacgcagcagttggagttggccgattttttggcgcaccatcgggcgttggcgccccaagtcccattgttcaatcaccgtttgaaggctcacgctttgccttgcgagacgcccatcctcagttttgatttgcacgggacaggcgaggatttcttccagcttacgccagctttcagccacggaataaaggttggcttggtcccggcccgtgagggtggtgatttgaagattccaccatttgtccacatcccgcatgtttttgaagtggccggcaaaagcctgaaggaaacccatctgccagttgagatgacgggcagcgtgatcctgcaaaaaacgccgcaagcacgccgggccgtccggcaaccgcaagaggctccagacaaaaaaatgcgagcaatgatcataatatccccccggcggctcacccaacaaaacggttgaaggccagttcatttcatccagcggcatcggctcgcgcccatccaaccgctgccggatgacggccaaggggtccacgcgccgctcgacgcgtatcaccgccgcgtcccgccgcccgggttccacagtcactcgcaagctggagccgtatcgcagctccaataactcggccatgccgcggctcaaccacggcggaagttccgctggacgcgcccccgcctggcggtcggccatttcctgcaacaacaccgccaccaatgcccggttgagccgtgtgggttccacctcgcttggaacatggatttgataaaaccagccttgcggggtgtattgggctttgacggccacaggctctcccaagtctgccgcgcggtaaaggttgatatagatgcgccccttccaaccgtcggcgctttgcaattcgcgcaaaagggcctgtttcacgcgctccgcccaaacggccaactgggcctgtgtgaccaaaacaaagttggtgcgccgctcatcattgatgtaggccggcgagggcagaatctctggcggcccttgcaccacccattgccgggactggctttccaccgataacaacttgggaagccctggagccggcgcagcccccaccgtggcccacgcgcaaaaaagtattggcaaaagcacgctggacaaccagccggtggagcgaaggcgcatgcgtggctcaagtttttttggcgctgcccccaccggcgccgttgccgcttcccgagccattcgagccgcctccggtgctggaacttgaactcgaactggacgaagcagtggacgccggagccgcctccttcttggcggcggccttgtagctttcgctgcggtaatcggtgatataaaaaccattccctttgaacaggagtcctgcaccggtgccgagcatccggcgaactttgcctttgccccaccgcttttggggacaccggtctttgggacaaaccgtcaaaggttcgtctttcatgctttgaaagacttcaaactgatgttggcatttctcacaaacgtattcgtacgtcggcatagatcattcccttcatcaaccagagccgtattctatagagcaaagccggcacaagggccaagagataaatcatgggtgccttttgcttgaaaaggaatggggatggtgtcagcctccaaggtctgaggtatgcgcggcggtatcggcagcgcaaccccctgataccctatggaatatcgcgcctggtttcaatgcatcaacgagggatgtggcgccacctatcccttgaaccaaatcatttaccgttgcgagcggtgccaatcgctgctggaggtacggcatgaccttgaggccctgcgcttgcgcagcgcggcggcctggatgaaactttttgacgaccgctaccgcagcaatcagtggccctacggctcgggcatctggggcaaaaaggaatgggtgctgccgggcatcaaagatgaaaacatcgtttctctttacgaaggctgcaccaatcttttttgggcggagcggctggggcggttgcttgggttgagcgagctctgggtgaagttgtgcggcaacacccacagcggctcattcaaggacctcggcatgacggtcttggtgtcgcaggtcaaacaaatgatcagcgaaggggcccccatcaaggccgttgcctgcgcctccaccggcgatacatcggctgccttggccacttactgcgctgctgcaggcatccaatccattgttctgctccccaaaggcaaaatttccaccgcgcagttggtgcagccgattgccaacggggcgttggtgctctcattggacaccgactttgacggttgcatgaaggtggtgcaggagatcaccaaagacccgaacatctacctggccaactccatgaacagccttcgcgtggagggccagaaaaccgtgggcatcgaaatcgtgcaacaattcgattgggaggtccccgatgtctttatcattccgggaggcaatttgggcaatgtctccgccctgggcagcggtctgttgatgatgcgtgacttgggattaatctcccgcctgccgcggattgttgtggcgcaggcccaaaaggccaatcccctgtaccgctcctttcagaaaggctttgccgagttcacgccgatccaagcggagcagaccctcgccagcgccatccaaatcggcaatccggtcagcgttcaaaaggccatccgcgtgctcaagcaatttgacggcgtggtggaggaagcctcggaagaagagctggccgacgccgcggcgcttggagaccggaccggcatgtttaactgcccccacacaggggtggcgttggcggccctgatcaagttggtgaagcgtggtatcatccaaaagcagcatcgggtggtggtcatcagcaccgcccacgggctcaagttcaccgacttcaaagtgcgctaccacgaaaaatcgctcaactttccgtgtcagcacgccaatccgcccatcgagctgccaccgagcgtggacgccgtgaaggcggcgctggacaaggcgctgcgtgagcgcgtggtttagcaccaagacagcgagctagcgtccgctgcgggcctcctgccagatggccttgatggtatcctcttgattgaacccttgaggataatggcgctgcatgttggcgtaataccaataacgtttgccttggggcgtatccacggggtcatgcaacacgcggctaccaggcatctgcaaccaaccgtttggatcggtgtcccggacccatttccaggcgtagcgcagccattcattccggtactcctccggctggcgggcaaaccatgagatttcatcgtatccccatgtccaataggacaggccgggggtgccgcccttgccgctgctcccccagttgtcgaactccaccaaatacggcaggctttcgcagcgccaacccgccggcgtgatgcctccgcgactgcgcccaaacaaactgtccagataccccttctccaacacgcctttttgtggctggcctgccacttctttgatgcgtagtggaaatgagtggaaatcgaacaacaaatgttctccgcggcgggggcctccatcgggcgtgtgggcgtcgcataaaacccagtgacggcgggcatggcgggcggcgtattgacgaacgcggctgagcatgtcccaccatgcctcccaattcttgtcattgcgtccgatgagcgccacctgcccgaaatgaatggcctccatgcctgcgctgatgtacgtggtggccacatggtaaaaccacattcgcgtttccagctttgtcatgtctgggacgctggagtcgcggccccaatgattgtgaaacacccctttgtcaaacaacatggcgtcatagcggaaatggcgcgattccaccggcaatccaaacgccgcaaatacctcgggcgggatgggcaccgtctccacctgtcgcgtgacgatttcgaagacgcatccctgcaaaatgatgtccggcatcacttgatgcgtgcggctggcaatttgccgggcgcgctggacacgattggaaaactggttttcacgtccccacatgtagagtgttcgtccggcaaatcgcgccccgatgttttgcaacatgcgcaggttgtcctccggattgccctgtccggtacaataatccatcatggtgatggcgcggcttaaataacgctccagtaccggccgcgacatcggaccgtcaaaggccagttcgttggtggctcccaccaaagaggacgccagcgccatcagaatgccgaaaatcccaatgcgtttcatgcattcacagtcttgctctccccaaccactgtcaagcttggtgtgactgctgcagccgctgccattttgtatcatggcattgccggaaacatatcgcctcgttattctacgccgccatgagcgacttccagaaagcggacggcatgatgtacgcgcccaagggcaaaccgaatgtggtatgtgcgccgggtgaatttcgctttgcggccatcgggcttgaccatggtcacatttatggaatgtgcaacgggctgctggaggcgggtggcagcctcgtcgcagtgtttgatccggactcagaaaaaatcaaacgcttctgccaaacctaccccgacgtacgggtggccgcttcggaaacggaggttttggaggatccttccctgcaattaatcgccgccgcgcccatcccgtgcgagcgcaccccgttggggttgcgggtcatggatcacggcaaggattatttcgccgacaaaccggccttcaccactttggagcaactcgccgcagcgcggcagaaaacaaaacaaactggacgcatttttgccgtctattacgccgagcgccttcattgcgaagccgccatctacgccggccaattgattcaagaagggcgcattggccgagttctgcacgtggccggttttggcccgcaccgtctcaacgctccgacacgtcctccctggtttttcgaccgacacaaaactggtggaattctctgcgatgtcggcagccatcaattcgaacaattcctggccttcgcgggcgtgcgcagtgcgcgcattcttcacagcaaggtcaccaactacctggccgacaaatacccggactttgaagattttggagacgccaccgcgctggccgacaacggcgccacgttctactgccgggtagattggtatacgcccgatgggcttggcgcatggggcgatggacgcaccttcatcatcggcacacgcggaaccattgagttgcgcaaatacctcgacgtagcccgcgaacggaccagcgaccatgtttatttggtggatgcacaaggtgagcaccacctgcccgtccaaggacaggtggggtttccttatttcggagcgctcatccgtgactgtctggaccgcaccgaaaccgcgatgacacaggaacatacttttttggccgctgaactcagcctgcaagcccaagcccaggccctccgcttctaaacatgactcccgaccaatggaatacccttcgccgctgcgcccgcggcgaatccctccccgccgtccctgtggcgttgatagtggacagtccgtggattcccggttacttgggcatatccacattggattatctgtttgccccggacgtctggcttgagtccaacctgcgggtcatccgggaatttccaaacattaactttattcctggtttttgggcggaaattggcatgggggccgagccgagcgcctttggttgcaaaactcttttttaccccgacaaaactccccaggtcctgccgttggtagaaacgtgggaaaatttgcccgaattgaatgaacccaatccgcaaaccgacggatttctgccttatttgttgaccctttatcggcgcgcacggccgcgattgaacgatgccggtcatgatgtgcgcattgtggccgcacgcggaccgctgacgttggccacccatttggtgggcgtcagtgagtttctcatgggcatcaaaacggaccccgccaaagcccatcggttgctcagtgtcctgtcgcgtttcatcactcaatggcttgaagcccaagccgaggctgccggccccaccgtgcaggggatcatggtgttggatgacatcaccggttttttatctccggcggattttcaaacctttgccctgccatatttgcagcaaattttccgcgcttttcctgaggcgctgaaaatttttcacaatgacaccaacaacgtcgtcccctaccgctttttgcgggacatccctgtggacattttcaacttcactcatctgcaatccttggcccgcgtgcgcgagttatgcgggccggagatctgcctgatggggaacatcccgccgttggacattttggcgcagggtaccccggaacaagtagccgaggcggtgacgacggcaaaaagctcgttgcccgacacaactcgctggctgctgtcagccggcggtggcgtttcgccgggcacccccggcgccaacatccgtgcgttctcagatgcagccgcaacacttgggcctgcagaagccaagtaacagacgtttttttcgctttaagaaacgcaaacggttgtcaagccaacgctaaatccctatataaaaaacatgcaattcgacatgcgtgtctcgtcggtcgccttgttggcggccactgcaattctggccttggctgcccctgaaccctcttgtcgcctggaagtagatgttcaccggcccacggcgcgggtgagtcctgtcatgtggggggtgttttttgaagacatcaattttggggccgatggtggtctatacggggagcttgtaaaaaatcgttcctttgagttcaaccaacccttgatgggttggcaaatcgtgaagcccccgggcggcacggccttggtgggtatcagctccaaagacccgcttcatcccaataatccgcaatacttggatgtcaccttcggtggacgcgggcaagaagtgggccttattaacgaaggttttcgcggcatgggcatccgcggaggtgaaaggtatgatttttcagttttcgccagacaggtaagcggcgggcctgtaacggtgcgggtggaattgttgaattcccaaggagaagtcatcggccagacacaaatcaaaggcttctccggcgcgtggcaacgcctcaccgcctctcttgccgcacgcgccactgaggccaaggccagcttgaggctcacttttgaaggccagggccgccttcatctggacatgatctcccttttccctcgcaagacctggaaaaaccgcccggacggacttcgcgccgacttggtgcaaaagctggctgacctcaaaccagcttttattcgcttccccggcggttgcatcgtggaaggcttcaatctggacaaccgctaccagtggaaaaacacgattggccgtcccgaagagaggcggctcatcatcaaccggtggaacatggagttcaaacaccgtcccacacccgactactaccaaagttttggggtgggattttttgaatattttctgctttgcgaagaccttggggcggagcccctgcccatcatcaattgcggcatggcgtgccagtttaacaccggcgaattggtgccgctcgatcaattagacccattcattcaagatgcattggatttgatagaatttgccaacggcccgactaacacggtttggggggcgcggcgcgcagccatgggacattcccgcccgttcaacttgaaactgcttggcattgggaatgaacaatgggggccccaatacattgaacgctacgaacggtttgcgcgcgtgctgcagcaacgccatcctgaaattcggttgattagcagcgcgggcccggaccctgatggtcctaagtttgatttcctctggccgcgcctgcgccaattgcgcgcagatttggtggacgaacattattatcgtccgccccagtggttcctcgacaacgcacatcgctacgaccgctacgaccggcggggcccccgtgtgtttgccggcgagtacgccgcccaaagcgtgcgcaccgtcagcccggacaaccgcaacaattgggaatgtgccctggccgaagccgccttcatgacgggcctcgaacgcaacggcgacgtggtgcgtatggcgtcctacgctcccttgtttgcccacgaagaagcctggcaatggcggcccaacttgatttggttcgacaatctgcgtgtttatggcacacccaattattacgtccaacaagcctttgcccgaaaccgcggggacttgattctgcccgcacggctcagcggtgatgtgggccagccggaacgcgtttatgcctccgccaccttggacgaaaaaaacggggaaatcatcatcaagctggtcaatgcaactactgagccgcgcatggtcaattttagcctcaatggcgcagtccccaccggccgtgccgggcgcgccatcgtcctggccgcagggttgaaggaggagaattccatctcccatcccacgcgggttgcgccacagagcttgcgcctgcctgctgtgggttcagccgtggcgcatcttgcgccggcacattcattgaatgtccttcgggtgccggtaaaaacaaccggccgctaattcccaagcccgcgtcatcgttgcttacaaacaatgaaccggcaaatcgtccggtggaacaaccggttcggcgggcagcgtctcggaaattttttgggcgggcacgctgtctgccgcagcactggaagttgattgaacacgacgcaccctcggtgccttgacttccttgcgataaatcagattggcggcactcgtccacgctcccatgtgcagacgtgccgccacccatcgcagactggccgccgtctccgcacgcaagcgtttcgcaattcttaccttttcggggtctcctttgggtcgccgcgataattcggcctccgtccatccgagccgtgccaactcctccttcaccaacaaatcggcttgttcccgcgcaaacatacgtcccggctgggctgagttcccctgggtttgccgcaagcgctggacaaggccggcacgaaaagcatcgctgcccatccgccaccctcgtcgcaacaaggcccacatttgagccggtggcgcaccagccaccgaacgcagccgggctgcataccgagcccggccggcatcatcctcacttaaatgcagatactcaaaaattggccttacgttcaaccaacccggacgttctacgggaggcgatacataatagcgaaggctgcaccatgaattttgggcttccggtttctcgggcatgcccgttttggcgacattcaaatgcacaaaatctaccgctgccggcaaatacggcgcagcgtcttccaccaatactgaacggtaccgtcccgccaggagatgtccgcgccgttgatgctttcggttgtatttaatggtaaatgcgcccaagagccacttcattcccgtcaccagattgggctccggtgtgcgcaccaccaactcaaaacgccgtggttccaaccggaaagcaagcacctcccaatgcaaacgcaggcaagcctgttccacggtgtcgagaaacaacctccgatcctcgtcgctccggaacaccgtttccccgccattcccctcggaggcgaggtaataaacggcacccggatattcaaggcgcagtggccgtgccatgggatgcatggttgcggaggaaacgcctccctgtcaatgccgcggacgcggccaggcgtcttcttttcactccccatccatctttaccgcgcaagttacacccattagagtattgctcattccatcatgaaaccgcatgtattctggaccctgctcgttctgtggtgcgtaataaccggctctgttgaaagcgccataccgggtgaggaggcgggctacctggcattgaccgcgcgccatcgcacaccgcccacgcttgaaagtgtgcgattaacgcgcgggccggacgagcgcatcggacgccaaactgccggatggtggcaaattgaattccgcacacacccgcgttatgaggagtcgcccgtgtgtgtggtgcgctggctggcattgggcgatctgctgctgcgctccaatcaatgcgttgttttgcgttaccaattgcgcgtcccggccacgggggaatgttatgagtacgttgagcgtttcagcggattggcattattgccctcatggggccagttccaacgtcactttttccctcatgcctcgcccggcagcggcctgcaaagggctttgcctgaatcccttgagttgctcggccacgtctggacgatgcatcacagccgtaccaatgcgcagtggcaaccgtggacggacgccaagcggctggtcttggaccgcgagctcctcatcggcaacagccgccccttcaaagaccgtgaaggcgcacgcctgccacaaactccaaaacgtcaggattatcaatacatcccttacacggcagaagacattcagacgatgatacaagccggattcaaccttttcaccatccagctggcgcaggagccttggatgcgcagcgagcccgtgttctatcaccgtcgtgtggatgccaaggcgccgttgaattttcccgcggatttataccgcgccaattatttgggcccggtcatgttcatggatgaaccctccattttgatggtgggcgacaccaacatccaccgcaccttgcgttacttttccgacgcagccgcgctcatcgaaaagcgcacccgcaccacctatgaaagcaccgggccctatggctcgtggcatctgcaccaagccctggaaaacaccggtatcaacctcggggacctccggattcaacaagtggattatccctcctgggaaacgttgtacgaaactacgttctaccaaatgcgaggtggtggtgccgggttggtccacgagggacgctatcaattgggcgaatttaatcgggcggtgcaaaaattcaccgggcaatcccggactcataccgcccgccaaatgcttgagtactactatgccttcttgagaggtggcacccggccttttggcaaacactgggggactgccatctatggccagtgcgataccaatctggcccctctggccctcacactagcttatgatatgggtgcgcgttacctgtggttttggtcatccgatcatgatcaccatgtcccttggccggagcaactcgccctcgcccggcaccttcgcttgcatgaacaaaaacaaccgcgtggcagcatctttgccaacccacccaaagcccgagtcgcgattgccatccccgatggatactttctttccttcgaaaacctttggtgggttagagtcatggacccggagggaaaaaatgaggcttctcaacgctatcaacggctgatgcgtcgcgccttaaaggctattcaagaatgttgggaccgcggctggagctttgatgtggtggtggatgacggacaaagcacaaaaaattattccaaaattattcgagttaacgataacccctgaaggccatcctcagcctccacacgcacgcataatctccccaccgacatacatccggctctttattttacgatttccgttatttcattgatgcctttgtctccttttccggctttccgctaaggacaaatactgacggatattccgcaataaaacgctaaattttctttttgggttgccgatgaatactcagagcagtttgggcaacccccttttaaggggggaggggcccttcccataggccatgcgttgcgtctttcgcgcatgtcgcacaaaagcgatgagcaggcgtacatacgagatatatgaaattaaatctagcgtccaaaatcggtagcggcttcgccgcggtggtcctgcttggtgtgttggttgggggcttgggatatctcaacctctcccgaacatcctcggcattggaggatattgctaaaaacagaatggagggcatgaaaatcttgggggaaatggtcaaggaaatgggtcaaattgacaccgcattggcggaactcctgaatgcagacatttcatctgcggatgccaaagtcgctttggaaaccattacagccgcccaaaaccggctggctgagggacaaaagcgtttttccgccctgcctcgtactgccgaggaggagaacctctggcgtcaatggcaggaaaaatcaaaagcatgggagaaggatgttgctgaatgcctgactttggcccggagctgggtggctcttgatttgggcaacccccacattcttcgtggaaacattaaccgctttattggtgaccattatactgtggaaatgaagctgttggagcaaatgtatgaagagcatcatttcaccggtgggacagaccacaccgcatgcaattttgccaagtggatgactggttataaatcgtccaatcctgaaatccaaaaaatccttgctgccgccgcccaaccccaccaaaaatttcatgaaaccgttaaaaaaattctggaatttttgaaagccaaggatgaggccaacgccttgagcatacgcgcgtacgaaatggaaaagcatgtcgctgcaacttttgaacaattcggccgtttggaaaaactggccgaccaggccgtggaccttcagagcaaattggcaaccgccttcaacacccgctgtcaacccagccaaaccgccgcgattgaatcattggagcaactgaaaacactcaaccaaaaactcggggacgatgccgcccaggccgccatggccaaggcatccttggcaaaaaaaatcatgatcgcggcccttctgattgcatcggcagtaggtgcggtgctggcatgggccatcacccgcatggtgactcgccccttgcggcaaggggtgcaactggccagccggatggccaacggtgacctgacgcagacgctctccgtgcaacgctctgatgaattgggcacttgggctcaggcgatgaattccatggtcatcgggttgcgcaagtccatcaagcaagtggcggaacattccgttgctgtggccaatacggcccaggagcttagcgccacgaatcaacaggtcagtgccaacgcagaggaaacctccactcaagcccaggtcgtggccagcgcctccgaacaaatcagcaagagcgtttccaccgtggccacggcggcggaggaaatgagctccagcatcaaggaaattgcacgccaggctgtggaagctgccaaagtggccagcgaagccgcccgcatggctgatgaaaccaatcaaaccatcaaccgattgggggccagcagcacggatattcaggaagtggtcaaggtcatcaattcgatcgccggccagaccaatctgctcgcactcaacgccaccatcgaagctgcccgtgctggtgaagccggcaagggatttgccgtcgtcgccaatgaggtcaaggaattggcccgccaaaccgcgcaggccaccgaggaaatcagccggaaaattgccgccatccaaacggacaccaccgcggcggtgcaggccatccaaaacatcagcgaggtcatcaagaaaattgaccagattcaaacggtcatcgccagcgctgtggaggaacaggccgccaccaccaacgaaatcacacgcaatgctggtgaggccgcccaaggcagtcaggaaattgcgcgcaatatcaccggtgtttcccaagcggctcgcgacacctctcaagcggtgaccggcactgccgccgccaccatggagttggcacgactcgccggtcagttgcagcaagtggtccagcgattcaaactggattcagccaccgcccacgcggaggttgaggaagaatccattaccaccgctgagtccgctgcccagccgcaaaccgcctacctcgtctgggacccaaaaaccatgtcaaccggtgtccccgaagtggacgctcaacatcaagagttgattgcccgtttgaacggtctgcatcaagccattcaacaatgcgccggccccgaggaaatccagcccatgctccaattccttggtgactatgccaaacggcattttgccgaagaggagagtatcatggagaaacgccgctgcccggcccatcaaatcaataaaacagctcaccaacgattcctcgaacaatactcacgtctggttaaagaatatgaaagcaaaggcgccagcctctccgtgttgaaacagttgcgggaaatgaccgagagctggctggttaatcatattctgaaagtggacacccagcttcgcaaatgcccgggcaaaggagcttgcggcggaaatggtcaccacaaacatgaaccagacgttatgacagccggtgtgcggcattaaattcgcttgcccgccgcctgccttgcaccgggcagctcatggtgtgccagccaagtcaggcgcaatccttccaaggtgagattgggaaaaacagattcgatttccggcaggcccttggcaatcaaggccgcgtagccgccggtggccaccacacgcagttgcttggaattgagctcagcacgcaattcgcggaggagctcgcgcaccagcccgcgatagccatgcaccgccccaatccgcatggcttccaccgtgcttttgcccaccacgctttggacatcgcgaatggtaattcgcggcaatagagcggtcttttcgtgcaaatactccgtcatcgcggccagtcccggggcaatgatgccgcccacataattccccgccttgttcaccacatcaaaagtcactgccgtgccgaagtccaccaccaccaccggcgcacccaccaacaccttggccgccactgcgtttgccaaacggtcaggcccgatgctcgatggacgtggatattcaatacccaccccgcgcaaggtccgatggtccaattccagagggcggggtaatcccaacccagccgccagctctcgcatctggagggtggccttgggcaccacgctgcagaggcacaggccacacaccggatggttgcccacaagtcttttcaatgccagcggggtggaaggcttgcttaatgcgtcggtgcgcacatccctggcttgcaacacccgctccacgctggccagaccaaaatgggtatgggtgttgccgatgtcggccaacaaaatgaggggggacgaagctttcatgaatcgagcatcacatcgccgccaatgatccgttccagccgaccccgtgcattccgcagcaacaaggcgccatcctggtccaggctctcggcccggccctcgatccgcctttctccttgcaagatggtcactttttgtcccagcgtccggcaatggctgctccattcttcggccacctcttcaaaacgcccgctgcaaactcgcgcgtaatccacgtccaactcacgcaataatgccgccgccaattccggccggtggatgggccgtcccaaggcctgccggagcgatgtcgccacgcggcgcaactcgggcggaaaatctgtggtctccaaattgacattcaccccgatgccgatgatgacatacttgattttgtccagctcggcccccatttccgttaaaatccctgcagtttttcgtccctccaaaagcaaatcgttgggccatttgatatccggctccagactggtgatttgatgaatcgcccggcgcaccgctgtggccgcagcgatggtcagttgcgtcgctgcctggggcgcgagtcgaggccgcaaaaccacagacaaccataatcccagccccgcgggcgacgcccacatccgccccatccgcccccgcccacggttttgtttttcggcgaataccaccgttccttccgccacgccatcccgtgccagccggtcggcaaggtcgttggtggaattggtttcttgaaacacccgaatctcccgccccacaaccgctgtgtcgcccaggcgcgatttcaaatcatcggcgtacagacgatccggactgctcagcaagcggtaaccgtgatgcggactggcttcgatttcaaaaccaagcgcccgcagggcttctatgcgtgcccatacagcggcacgggtgacttgcaaacgttgcgccaaatcggcgccggacaccgagccttcctcggcctgacgcaaagcagtcaggatggcggtgtccaatgcggattcactgcggctcatgttgggttggccggccgttccaaccggcgtgcgtgcttgttaaactccgccggggtctcaaagtcaagcgccacatccaccgcacgcgccgaatgagtcaaagcccctacgctgatgaaatccacccctgtctttgccattgcacggactgttttcagagtaactccaccgctggcctcggttttggccctgccggccacgagtttcaccgcctcgcgcaacatcttcggcggcatgttgtccaacaaaataaaatccgcaccggccgacacagcctccttcacttgagccaaggtatcggcctcaacttccaccttcaggcgcgggtaccgtgagcgtgcacgttgcacggcacgggcgatggcgccaggcccctcctgctgcagggctgccaaatgattgtccttgatgagcaccatgtcatacaagcccatgcgatgattcacccccccgccgcaagccacagcgtacttttccaacacacgcaaaccgggcgtggtcttgcgggtgtccaaaatttgcgcccccgtgccttgcaccgcccgcacaaaggccgccgtcaaggtcgccacgccgctgagacgctggacaaaatttagagccacccgctcagccgtgagcaacgcctgcgccggcccttccaccaccatcaagatggccccgcgtttgaccgcctggccatcgcgggccaaggaggtgatgcgtatgccgctgccctgcaactcgaaggccaaccgcgctgcttccaagccgcaaaccaccagcggttcgcgggccaccaacctggcccgcgcctgcaatttgggcggcaccaccgcccggctggtaacgtcccccgcgcctacgtcctcgcgcagagcgcggcgtaccgcctccaaccacacctttctaggcacccgtatcatgcagccatcttgcgacagctaccccccaccgaaaagcgcaaaaactgcgcaagtcccccttttaccggtgtccttcagttccggggccttcggctgccattttttcaaaaaaaccacttgtcaaagaccggtttcatggtaggttcacgggctctatttgaatttgaatatgaagtcggaaattcatccgaagtatgtggacgcggaaatccgttgcgcttgcggcaacgtgatcaagacccgctcaaccaagccgaccatcatcatcggcatctgcaacaagtgccatccgttttacaccggacaacagaagtttgtggataccgccggtcgcgtggacaagttccagcaacgtctggccaagacccaggccgcccaggctgccgcagcggccgtcaagaagaagcgtaagtagctttgttccagcgtcacgcccgcatggctgaggccttgcgggcgtggtgtttttaccggccatggatttgcggccatatattgaaaagtttggtcgccggctggcggaggtggaggcgcaactcagtgacccgcgggtttttgaacagcctcaacgcgcccaagagttggcccgtgaacatgcccgcctcaaagaattgaccgccgccggggatgcttggttgaaggccaccaccgatttggcggccagccaggaattgttgcgccatgaaccgccgggctccgagctggcgctcatggcacaggaggaggccacccgtcttcaaagcgaggtcgagcgcttgacgctccaaatccaacgtggactgctgccccctcatcctgccgattcgcgcaataccatcatggaaatccgcgctggcgccggcggcgctgagtctgcactctttgcggcggacctgttccgcatgtactcacgttatgccgaggcgcgcggctggaaggtggagtccctcgactccaatccctccgatttgggcggttttaaggaaatcatcttcagcgtcagtggcaccgacgtttttcaacgcctcaaattcgaaagcggcgtccaccgtgtccagcgcgttcccgccaccgaggcgcaagggcgcatccacaccagtacggtcaccgtcgctgttttgcccgaagcccaggaggtggacattgaaatcaagccggaggagctcgaaatcaacgtctgccgtgcctccggcaagggtggtcaaggcgtgaacaccaccgacagcgcggtgcaaatcattcacaaacccaccgggctgatagtccgttgcgcggatgagcgctcgcagcaaaaaaacaaggccaaggccctcaccgtcctgcgctcacgcctgctggaacgcaaaattgctgaggaaaacgccaagtacgccgcccaacgcaaggaacaggtgggcactggcgaacgcagcgaaaaaattcgcacctacaatttccctcaaaaccgcgtcaccgaccaccgaattgatctgacgatctacaacttgcaggtcatcatggacggggaattggatgtcttgattgacgccctcctgcgggatgaagtccaacgcaagctggcagccttagaccattccctcaccaccgcctgaaccatcaatcaaaccattcatccgtgggatcaaaggcggggatgggaatgttgagcagggtcagctttcccacggcgcgatgacggcagccgggtttgatatagacggcggtcaatggtttaaccggatacatctgcccgtccaactcgatgtgcccttcgccttccaacaccacgtagatttccgtcatcttcttgtggtagtgcgtgcgtgaatccacttcaatgtgaaccacgtgcacgctggcggcgttccccggttctgcaaaggcacgccgggcatgaccgcacggacagcggacggcctccaaggtgtcgagttgggcaatttcaaagttggccatgcctaggacttggggttggagttgttttgccgcaacaaaccatctacgtggcgtgctacatccaagagttctcgtgaatcaatagccccggccacatagtgggctgctgcattgcgcaagatggtggcctccaaagagggaagcttgcgacacaccggctccaatatcttggccatgacgcgcgcaaaagtgtttccattgaaaaaagcgaaaggcgtagctccgtggcaacggcggcataaatctaaaaactcacggaaggtcatcttttcgttccgcgccttttcccaccattgacgggtattgtcgtggccaggaccgggccggtggggtgtttcgggtttggcacagagttcgcggttgatttccacgaccgattcccacgggcaatccgccagccaagattctttggtattcagttccacggcaaatctttaagcaattcaattcccctatggcaaccgccggggtcggcgctaagttaagggcggtgcccatgcgggtcaatacgctttcgtttgacaaatgaatgtctgttggggacattcgtcaaacttttagcatgaacatgaaactatcagtcgcaggaatgagatggaaggctccggcggccctgtcggcatgcctgatgcttggcggtgtgcttttcgccgccaatactccggtgtgggtctatgaaaacaaatatgaattggtggtaaacggggactttgacggggacggccgccaggatgtggccctggtggaccggccgacgggtaattaccgcatcggctaccaattgcaggagggtaaaattacctgggccatggcgcgcccgagccgcattctttatgtcaccggcttgagcgccggtcacttgctggatcccaaaaaggatgccttggtcttttccagtgcggatggcgcggtggtgcatgtggtggacgccgctgatctcaaggtggccggtcgcatgaccgttttgaagccggactgcctagggcccgcgactgtcgtggctgtggatattggtggtgcaggcaacaccccggaagccgatttgtatctcaacagtatttataatgtggacccggtcaacctctccactctctaccggaacaccggtgggacgttcaaacaaatcgaggaagtcgaggctcccggcgccctcagtggtgcccagcgcgtaactctgcaggacggcggccccgagtgggttgtggccgtcgttcaaggcaaggaaaagtcctccctcatctttatgtccctggcctccggcaaaccggaaatcgcgagcaaggccgatgatcttccgggcggggccgcgttcgtgatgggccgattcagcggcaactcactgggtgccttggtgtacaaacccggtgaggcagccctacaataccgtcccgttgaaatcgcaggtgggaaaccagctcttggcaaggcaacctctttcaatctgccccgtgccgtccagcaaatcttcgcagcaggccaacatttgctcgtagttcatggcaccaatgacccggcggcgatttatgcctttgatgggaccaaggctcccgtcgaagcccttaccattcaacccaaacctggcgaaatggtcaccggcggttttgtggccggccaaaccattggagccttgttccgcatcgaaaagagccgtttcaagtattccacccgctatgaattgtatcaccaaaccgcaggcaagttcagtcctgccggtggcggtgagctgcctccttgtgaagtgactgacgccttcctggtgcctgaattgcaccggctgattaccagttcgctggaggtcaatgatgaggcggcgatggccccctacaccaacaacattccgggcactcccgtaaaatacgtcatgctcccgattaagagcggtgaatttctcatgggcagcccggccacggaaaaaggccgcaaacctgatgagtctccacaacacaaggtcaaagtggacgctttctggatgggcaaatttgaagtcacatggaatgagtacgaattgttcatgtacccggatgacgagaaaaagctccgcaacgatttccccaccaacccggaacgcgaccgtttgtcggatcaaatcacacgcccgtccaagccgtatgttgaaatgagtttcggcatgggcaaggacgggttcccggccattgcgatgacgcagcacggcgcgaacaaatactgcatgtggctgagctccaagaccggccattattaccgcctgcccacagaggccgaatgggagtacgcctgccgtgcgggcaccaccactgcctattcatttggggatgacgaaacgaaattggaagagtatgcgtggtttgagaaaaacagcgaggagggcggcgattggaaataccacaaggtgggtctgaaaaagcccaatccgtggggactccatgacatgcatggcaacgtggccgagtggtgccttgaccaatacctgccggattactcggcacgcgccaacggcgccgtcaatccgtgggtggtggccaccaagccttatccacatgtcgcccgcggcggcagctatgattttgaggccgccgcctgccgcagcgctgcacgtattgcttccacgccggattggaaggcacaggacccgcagttgcccaagagcgtctggtacctcaccgatgccaaattcatcggtttccgtctggttcgtccgctcaaggtgccgccgccggaagtgatggagaaaacttggattagcggcgtggaaaaagactgaggcccaagcctcgcgctttgaacaaaacaaaccggccccgacggcaagagtttgcgcagttggggccggttaagttttttcgacccattttcggagcgcctttaccaatccttcgatggtgtgctcctgagcctcaacggtgggtgcgacattcaatcgctgcaaagccttggaagtctccggtccgatggatgccgtcttcaagcgcggaaactgcgccagccgtgccggcaaatcaaatcgagcgtgaaaatgctcaaccgttgagctgctggtgaaggtaatccaatctgcaccttcttccttgaaacgttcaccggcaccggtgaggtcctcggtttcggccaccgtccggtaacacgccacatcgtccacaatcgcccccatttcggacagcagacgtggcagctcagggtttgccgtttcggcgcgtaacaacagaattttcaagttttccacgctgccatgctcgcggatggcctcggccacacgcgtggcgagatactgcggcggcattgcgtccacccgcaggtgcagctcctgcaatttggcggcggtggcggggccaatggccgccaaacgcacattgcccaaggcacgcacatccccaaaggctttgaagaaataatcaaagaaagaggtgaccccgttgggactggtgaacacaagccagtcgtaggaaccaatgccttccaaggcatcctttaaatcggtgagttgctggcggtccgtcaacggtgcaatcttgatggtggggatttccagtacatccgcccccaattccaacaattgccgggaaagctggctggcctgttcgcgcgtgcgcgtcacaacaatgcgctgaccaaacaagggccggtgctcaaaccaattcagtcgatcccggagttggaccacatcgccaatgaccgtcaccgccggcgcagcaaatccgcgttctgccgccaagtcagcaatcgtggccagtgtgcccaccaaggactcttgtcggcccgtcgtgccccagcgcaccatgcccacaggggtggcaccgtccatcccatgccgcatcagctccgatgcaatttcacgaatccgctccacacccatgagaatcacctttgtccccggcgtgcgcgccagttgagcataatccaaggtgctgcccggtttggtggggtcttcatggccggtgaatacggtaaaggaagaacagcagctccggtgtgtcagcgggatgccggcgtagttgggcgcggcataaatggatgaaatgcccggcacgacttcaaagggaatattcgccgcggccagttcttcggcctcttcgccgccgcgtccaaacaagtaagggtcgcctcctttcaggcgcacaacagtcttgccctgccgcgccttttccaccaacaacgcattcagtttctcctgcggaatggcatgggctttggctcgtttgccgccgtagataatctccgctccacgcggggccagccggaggagttccggattgaccaacgcatcataaaccaccacgtcggcccgccccaacaactccgcgccccgcaaggtcagcaggccggcatcccccggccctgcgcccaccagataaactgtgcccaccgatttcacaacgtcagtttaggcgcccgcgggcgtgtgcgcaacgtcggcctttgttaatcccacggtttgcagcaagtcaattccttcgacttttccgcgtgacaactgtggtcactcatgctctaaacgcgggccatgacgctggcaactgactttgtgcaagcagcagagccggattcccggtggctgatggttgttctccatggcttgggtgacagcatggaaggttaccggtggctgccggaggagatgggattgccgtggctgaattacctgctcgtcaacgcacctgatccctatttcaccggctactcctggtttgattttcccggcgatccgatgcccggagttcgccgcagttatcaactgctctcccaactcctcgacgaccagcggcaggcaggcttccccacccaccagacctttatgtttggcttcagccagggctgccttatgacgtgggtcaccggcgtcaaatatcctcaccggctggcggggtgcattggcatcagcgggtttttgccggaccccgaggcgctgcttagggaacgctcctccatggcccagcatcaacattttctcattacccacggaacgatggatcccctgctgcctttcgccgccgccaaggcccaagtccagaaaatgcaggccgctgggctgcaaatcgagtggcatgaatttgacaagcctcataccattgccggcagcctcgaaatggcggtcatccgtcgtttcgtccaacgacgccgcaccgcgccctcctaaacggggcttgcgggaatcggggaagccggtattttgagcaaggggaggcgcccagtgcgcgctggacaaaacgtccgccgttggcgcaagccgccccgtcatcattaacctattggcatcatggaatcattatcgggaaagactggaattgtctttggtgtggccaacaagcgctccatcgcgtgggccattgcgcaggcctggcatcgcgccggcgcgcgcctggcttttacctaccaaggcgaacgcttgaaagagaacgtgaccgaactggcagccacccttggctccgacacgttggtgttgccatgcgatgtgacccgcgatgaggaaatccagcaagtgtttgccaccctggaaaaacagtttggccgcttggacctgctcctgcactccatcgcctatgccccgaaggacgccttggaggggcaatttgtcaacacatcgcgcgaggccttccgcattgctcacgatgtcagcgcctattcgttggtggcactttctcgcgccgccgcgccgttgatgaaagagggcggcagcatcctggcgctcagttactatggcgctgaaaaagtcgtgccccactacaatgtgatgggagtggccaaggcggcattggaagcctgcacgcgctatttggcctacgacctgggtccgcaaaaaatccgcgtcaactgcatcagcgccggtccggtcaacaccttggccgcacgcggcatcggcggctttaccgacatgttgcggcactacgagctcaatgcgcccttgcgtcgcaatgtgaccttggatgagcttggggccaccggccttttccttgccagcgacggcgctgcagccatcaccggccaggtcatttatgtggactgcggctattgcatcatgggcatgcaaacggccgcttccgagacatgaacccctcctcgcccatttcttcaagactggctgctgtgcgcgatcacaaccgcgtctttgcggaatatctttacgtctatcccgtgatttcgcgccgctcccgcggcctgtccctgggcgtcaatctcaaccccgacaaacgttgcaatttcgattgcatctattgtgaagtggaccgccgcacaccgccgcgcacaacgcggctggatgtccggcgcttgcacgatgaattgctggacctcgttcgccgcgtcaaaaatggggaattattggccacgcagcgtttttccgaggcccctgagctggtgtcggaaatcaaggacatcgccttcagcggcgacggcgagcccaccatgatccccaacttctgcgaatgtgtggaagccgtggtcgaggtcaagttggcagaaaacctcaccaacaccaagctggtattgatcaccgatgccgccggtctcgacaaggccgatgtccgccgcggtctggcactgatggatcagcatcaaggggaaatctggggcaaactcgatgccggcaccgatgcctattaccgcctcgtcaaccgctcgcacgtgcagtttgggcgcattctgaaaaacttgttggaaaccgcacgcgtgcgtcccatcgtaatccaaagcctctttctacgtgttcacggccaacccatgcccgcgggagaattggaagcgtattgtgtgcgcttaaacgagatgttgcagcaaggcgcccaaatcaaggaagtacacgcttataccgtggcccgccccactcctgaaccatacgccactgccctcttgcctgcggaattggaggcgatggccgaagttattcgaaagcgcaccggtttgccggtgcatacctttgtttgatcatcctctcacgagccttcgcaaaaaaccgtccggctcggcaatgccctgctgcacaatgacagcggcacgctccggcgtgtcggccactgcataaatgcgcaactcgtccgcgttgccggagggccgcacatgcgccacatcgccgttggcaaaatacaggcgcaaaccgtcaaggtaattaatcttcaccaaggttccaaaaccggcctgagacgaaaagatggcactcaattgcgagcgcacttgttccaaatgcgcctgcaaaccgggtgaaacaggcaggtcttcacctgcagcattccgtgtggcaaggtggccggtgctccaatcggcctcaatgacttgtgaatcctccggctgcagaggtttcaatgcagccaaactcgccgaccgcggtacattgggcagcagaccggcctgactgtaacgccgcggcaaccggtcaaataattcacacaaagttaagccctgatcacgggcggcaaacaggcagcacaacaagggtaagaaggcatcccgcgtggggagggcgctcaacaccttgcccccccgctcaatatcggttgccgtcaaaaaaccgccgttggcttcccagccgcatacacgggatttgccccgggccaccgcctgctgcaaaccggcaatgacatacggcgagccgatgcgggtcttgggttgcaacaacccgcgcaacggcccgcgatccacggcgtcgttgcacgtaatcggaaccactacggcatccgcacgcagaaattcagcggtaatcatgccgagcaggtcgccgccgaagaagcgcacacgtccctccggcgtcacccccaacatcaagggccggtcactgtctccgtccaatgacaacaccgcatccacccggccgtgattggccactgtttcatccaacagcctttgaatgttttgcagcaatcccgggtgcacattttccgtgtccacggccacaaagttttcgcttcgtcccgcggtcaccaccgtggcacccaatgcctgcaggacctccaccaataaatcccgccccacggcggagtgctgatacaccaacaaccgcaggccctgcaggttgccacccgcaaaaaaattaacgtaccggcgtgcatacgcccggcggcctgcgggactttccagcggcagctccacatggccacgcttgaacatgccgctttcattgaacaaggattcatggaaaacctggcggtacaagcgctcccgttcatgcgccacccgctgaaggatgggtccctcatcgcttttacgcaattcgccccggctggaataggtcttgtatccattgcggtcaaaaggaatgtggctgccggtgaccatcacgcagcccttttgatgatgcaaggcgtgggcagccagcgccggcgtgggaatggcacccagattaagcggtgtcatgcccgcgtcctccgccgcctgcaccaccgcctgcgcaatttctccgcgcccgcccaattccggcacaaaccgcgtgctgctggggcgcaaatcataggcgaaatagaactggtccccgcgtttgattccaccctcggccacaggcagattctggagataattcaactcggccaaaacgttgaggtagatttcgagctgggtcaaatccaccacccgtccgcgccgtccactggtgccaaactgcaagggcaccggctcgtaatttagaaaagcccgcagggaagtcgggggataatcgtttacgctcatgacttgtccggtggataaggtgaaagtcgcaagggcgccatcggtgtaccgtccggtttcacaagccgcgcacaaaaaccccaaccggaggtccactgggtaatttttaacatcagtgcattccaacccgcacgcaaagcaacattggcctgaaattcgccgggtttcacatcacccccgcggttggcactcacgaccacctgcccattgacccaggctttgatgccgtcatcggcgcccagttccaaccgggcctgctgggcagtctcactatacacccacacccgcgcatacgccacgcgatggtcgcccggaaaaagccccgcaaggttgatttgccacggccggtctttcagcgtccccaccggcgccatttgccaggtaacgcttgaaggctcgggattttgctctggaggaaacacctggtcaaacaatgcctgtccatccttgccctccattgtatatggcccggccacctgccaaccaagcaggaacccgcctgctttttcaagtgtggacaacaattctgcagcggcctttccagcggctggcgatgcagacaatttggaaagcacccgccgcgatgtttcgggccatgcaccggccacgcgaggggccagccgcaacactgcctgcccggcttccgcacttaccgccgggttgtccagcagaggctccaataacagcaacgcctgctcgtgctgcagtccggaaagtgcgctgatgacgagtttcttctccgcatcacttcgcgcaagagacattgcctcggtaaaccgggccgccgcccatgcgggcgttgcgctgccttgccccaggagccgggacgctccccgcaacgccagtacgcgctcggtgttttgtgtggcttgccgtgcttccgccaacaacaaatccaccgcactcacatccggccattccaccaatgcgcggagggctgcgtcgcgcaatgctggttgtgtttgacggcgctcgttctgcaaaactttcaaggcttcggcccccccacaagccggcaacaatcgcaacaaggacacgcgcgtatccacggcatctgctggtacacgctccatggcttcacgcaccactgccacgcgccgcgccgcgtccggctcgcgttccaagactcttaggattgtcgtctcggcctcttcgcgggctgccgccgcgcgcatccttgtcgattccgtgatcagagcgggcaaatccgctggaccggccaaccgtcccaaagcgcgaaaggcagcccgagcaatggacgggttttcacttgaagctgcttgaagcaaggccggcatggccgacttgacgccgcgccgtcccaccgcattcatcaagccgggaagcgccgctggcgggctgttgccgatggcctgcaccagcgcttcatccacccgtgcccctcccggcaagctggccagcgccatctccactgtttgttgttccgcgctggtggtgtaagtggccagcgctttcaccagcaccggcaccgccgactcgtcacccacttgggccaacgccttcaccgcggcctgccgtactgcggcggccggcgccatcgtggcacttttgagagcttctattgcatcggtatcctttcgcgccgcaagggagtccagcaacaaaacctgttccactgttgccagccgggccatctccgctgcaaacactgccgagactccgcgccccggcataaatcgcacctgatggatggcagatggtttaagacctgcatccgtgccacgcaaaaccgtcaaggcccgttgctgtcctccatcagcatccagtcgcatcaacccctccagcgcagcccgccgcacatacaggggttgattggccgccagcaattcatcataaatggcagtcgccgcccggacattgcgcgcacgggcagcatgatccgccgccaccagcgatgcctgcaccgccacaggagccacaccggcatctccattgcgccgcaaaccggccaatgcctcgagcgcctgtgggttggcaatcttgcccaaggcgccaatggccgcctcgcgcagcgcgggcggggcttcctgcgcaagcgaaatcaatgctttcacagcggccggagcgcgcctgtcacccaatgtgaccacaatctgctcgcgcgccgccggctcggcattatccaatgcctttaataaaacgtccgtggctttggccgatggattggaggctaaagccaggctcgccatgcccactgtgttggagcttttcaacatctcgcccaacgtactgagcgcgctgtcgctgcccaaaatggccaattgcgtgcaggcaaaacggcgtgcttcataagtggcctgctcggacagcaaccgcaccagtgcattctcaaccgcgctgcgtcgcgagcgattggccacagcctcacgcacggcagcctcgatttgacgcaaaggctcggcactgcgccctgattgatattgcatggcctccgccacggcctgctccaagttgatttgaggtgtgggcgccggcgcggccgtcaacgtcagacacaccaacggcagcattccccaacggaaagtcgcaaaggcctttcgtcccacgctcaaaaaaccggccaaatgggttgaaatcataatttccaaatcaatcattcaggttccgcttccacaaagcaccaatccaaaaccggcctcgtcctgcccgttacacccgccatggcgcacgcggctggcggtacaacatccggttggcggcttcgtcatcgaagacttccttcaccggatcccagcggagctttttgcccaatcgcgcactgatggtggtggcctcgcaaatggtttgtgcgcggtgggcaacctccggattgcacaacggctgctggcggctcttgatgcaatcgaggaaattgcgcacatgcgcgccggcattggcccaactcacccagccgctggttttggcatcgagaatggaagccggttgtgcggtgaccacatcggtctcgtcgtccacttgaatccatccctcatcgccaatgtaccggatgtacctgtctttgaaggctcctcgttgatacaaaatcccttgaacaccgttggcatatcggaatttgaaagtgccggagatggcggtctcgctcatgaatttttgcgggtcgggccacaccaaatccgtggcttcaaactccaccggccctgtgtcatcggtccccaacacccattgcatttggtcggtgtaatgcgtgcccatgtccgtatgcatgccttcacctgtgtcccaaaaataggcccatccaaatacgcgcccgggcacaaatggccgccactgcaccggccccagccacatgtcgtaattccaacccggcggcaccggcttgggctcttcatgcggcactgtgccccctgtccaaacctgcatctccacggtgtggacacgcccaatccgcccccgacgcaccatctccctcgcgaattgataagattcggtggaacgccgttgcgtgccggcctgataaatggtgccgtactggcggcacatgttcacaagctcgcgcccctcgcggatggtcaagctgatgggcttctcgcaatagatgtccttgcccgcccgcgctgcaaacatggaagctgtggcatgccagcggttgccggtggctatcaacaccgcatcaatgtccggccgcgccagcagatcccggaaatccggcatgtctgcgcagtccttgttcccatagaattggtctacgtgattcttggccacctgtcggcggtccgcccgtgcatcggacaccgctacaaatttcacgtctggaaaattcaaaaaattgggcaggatgaacatggcccggttgcccatgccaatgcctccaaaaacgatccggttgctgggtgccaccgcgccgttgagaccgagcacggagccggaaacaaccaggggagccgccagcgcgcccagactggataaaaagccccgacgggtgcatttcattccatgatgtgtagtggccgtcataaaattgcctgcgagtttttcaagggaacttgctgtctccctttatcctccggccatcccgcccggtcaagcccgcatccgcgccccccaccttctccggccacacctccggcacccctaaatgatggtgccgtccggaatgattgcgtttttcggaataatcacaattccatcgcggatgtaatagaggggatggtccaccttgtccggtttgccgctggggctgatgaccacgttgtcaccaatgcgggcattcttatcaatgatgcagttttcaatgcgcgtgttttttccaatccccatcgggggttgtccacgcgcctgatgctccgcaatggattcggccgactcgtaaaagtcgcatcccatcaacaccgtgcgatgcaaataactgcccgagccgatgatgctgcgcaggccgatgaccgagtaggcgatggcggcgcggttgatgatgcagccatcggcaatgatggcatggtcaatggacgccccgttgaccttgctgggcggcagatagcgcggacggctgtaaatcaccgcgtgcatgtcaaagaaattgaagcgcggcagctcgctggtgcagtccagattggcttcgaaaaagttgcgaatggttccaatgtcttcccagtacccgagaaacacatccgcaaacacgcgatgcgagtgaatcaggcctgggatgatgtgtttgccaaaatcggtgtggggcgtgtccatcgcctcccgcaaggttgagcgattgaacacataaatccccatcgaggccaaaaacaattcttcggagcttttaattccgtagcggctgtaagaggcagggtccaatctcaaaccgtcctgcaccgccggatcagtcggtttctccacaaaattcacgatgcgcgactccgcatcaatctgcatgatgcccaggccgccgacatcccgccgtggcaccggcgtggtggccaccgtcacgtccgctttgtgctccacgtgccgccgcaaaatatcctgaaaattcatccggtagagctgatcgccccccaggatgatcatgtattcccacggatggttgtcaaaatgcgtccagttctttcggatggcatccgccgtcccttgataccatgaggtattggtcaacgtctgctccgcggcgaggatttccacaaatcccccgctgaagtggtcaaacttgtagctgccattgatgtgccggtgcagggaggccgtgttgaactgcgtcaaaacataaatccgccacaaacctgagttgatgcagttggaaatgggaatgtccaccaaccggtattttcccgccagcggcactgccggctttgaacggtcgcgcgtcagcggaaacaagcgggtgccctgccccccgcccaagaccactgcaagcacgttccgggttccgatgggttgttgaattggcgcttcaggcatatggttgattgcagccgtttctgattggcagtctcagtgtaaaacaaccctccccccttttcaagcgagattgagttattatcctctaaaatatccgccgttgcttcctatgcctccacttttcaagccgggagcagaagacattggacaaatccggccctgccacttactttatgggagatgcggttgcttcgagtcatcgccttttggctgctggcgctctacctgccggcaaccaaccattgccttttggaaacggctacggggctcgaagtacttcaaagctgctgcgagcgctccgacacacagcaggccaattcctgcgaaacagatgcctgctccgttgtagaatccggggcttatcgttctgaagagaatccgccgttgctgcaacccccgtgtccggtgtacttaactctcgtctgcaacacgccggatttcctccttgcagaccaagcccagtttgcagcttgtgccatttctgcgtcgctgttcctaccaaaaccatgccatttggcatggcccgtatctgcccagccacgggcgccttcctcaatctgatgcagtagctccgcacggagctgactctttcgtttcccccaagggaacatgaagggggtgtggtgtcgttggacacccgcccaaaaaccatcgcataaaaaatttttcaaacagcaacgtttgcatgattactgaccacgcaccattgcatcagaaaaaaagaaacagccgaaagctttggctgattacaggctgtctcgtgggctgttcgttgtatgccgccgagcgcgagcccatcccacccctcacggtggagcgggcagtacaactcagcttggcccatcaccctcaattgcgagtcgccgaagcacggcggcaggccgcccacgggcgcatgattcaagccggccgttggtccaaccctgaattggagttgaaagccgaggaatggcctgtcagtggaggaggaaatttttctgacgccaagcataccatcggcatttctcaaaccgtgccctatcccggtaaaaaacgctgggaccgtcaacttgccctgggcgacattcagaatgagtccgctcaattggccctggtcaaaaccgacattgaacgtcaaacccgtgctgccttttacaaagccctggccgccaccaacctcgtcattgtctcggctgaattgcttgcgcttgccgaaacttcctcggcttccgtccgccggcagatggaagccggtgcggccacgcgtcaagaattgctgcgggttgaattatacgaggaacaaacacgcgccgaacacgcagctctgcaacaagaatgcgtggccgcccgccaggccttggacacgtggctgcaggatgtgcaatggcagcaggcacctctgtcgggaaatctcgaggaaacgcctgcggaggacctccttcaaataccctttgagcaagctctgacgcgccatccggcatggttggccgcgcagcttgcggaaactcaggcccaacattttcaacgccgcgctcggttggaaccttatcccgatgtccggttcagcctcgcaggaggccggactggccccgctggagaatccatcttggaactgggcattactttgcccctgcctttatgggaccgcagcaaaggccgacaactcgaagctgaagctcagtcccgcgctgcggcagccagcgtgctggttgttcggcaggaacttcatcgcacatggctggccgcctgccaacggtatcgtaccgccattgaacaagtccgactccatcgcgagcgggtcctcaccaaagccgaagccgctttggaggccgtgcgcaccgcccaccaagaaggcaaaatccccttgatggatttgctggacacccagcgcacggtggcccaaacacgcctgctttatcaacaaaagctgctcgaacttgccctggtgcaaaacgaactccgagccctccttttcccccactcactgtccaaacctgctcaaccaagtattgatgtttatgaaaaataatccctcccggctcttgtcatccctggccctggccgtgttggttatgattggcgccatggcttgccgcaaagccgactccggcggtgatacccacgaccaccaaggccactcccataaatcagcagcctcctcatcgcacaccgacgacggcgcatcgcccatgtgtgaagaacatcgggtggcggaggccgaatgtgccatctgtcaaccccaggccattgccaaattgaaacctggacaagccctcaagctgcgtctcccttcgacctcatcggcggatttaatcggcctccaaacaggccagccctccattggcacagtcgaagaaggcatcgaatgtctgggcgaaatgcaatacaaccaaaaccagcttgcccgcattgttgcaccgttggggggaattttggagttggtggaggttgaccagggaacacgcgtgcaacaagggcaaaccgttgccaccctctggtcagccacccttgcggaggcggtggccaaagcagtgctcacccatcaaactttggaacgggaacaaaaactgaacgcccagcagctttccaccgccaaagacttgcaggaagccgaagcggcgcaccgtgcggcctgtcaatcgctgcgtctgctgggtttcactgaggcccggattgatgaattggcccgtcagcctcaggaacgcgttttgctgcctgttcaaaccccgttggagggcgaaatcgtggagcgttttgccgtccggggggagcaagtcgaagcgggacgtccgctgtttaccgtggtgaaccggtccaccatgtgggccatcttgcatgtcccggaagccagtgcatcggaactccaatcgggccagacggtggaactgcgttccgaggctctgcccgatcgcgtgttccgggggcaattgacatggattagccctgccgtggacgaccgcacacgtttagtgcgtgtgcgcgccgaagttcccaataccgatggactgctcagacatcaaatgtttgtgcgggcgcgcatcctcacccgccagcgccaaaacgccttgctgctgccagccgccgccattcagcgcgtggacggccgacccctcgtcttcgtcaaactcgccgaggacctgtacgaaacccgccttgtaaccctgggccccatgaacggtccgcaaatcgaaataaccgtcggcctgaaaaaggacgacaccgtcgccatcacccgcaccttcgccctgaaaaacgcgatgttgatgtctcgcttgggagccggttgcgcagatgattaattccctaaacagaggaattttcatgttggatcgtctcattcgttttgccctcgacaaccgcctgatcatcggcgttctgacggcggtcatcgttttcaccggcgtttgggccgtccggattttgcctgtggacgcttttccggacaccacgcctgtgcaagtccaaatcaacacctcagccccggcgctgaatccggaggagatcgaagcgcaaatcaccatccccatcgaacaagccatcaacggcctgcccgggctcatcaacgtgcgctcactttccaaattcggcttgtcccaagtcgtcgcgacttttgaagaccgtgtgagcatccttcaggcccgccaactcatcacggaacggttgcaaagtgttgaattgccggagggtttggagcgacctcaactcggtcccatcgccaccggattgggtgaagtatttcattacatcgttcgctctacggacaccaatcgcaccctgacggacttgcgattgattcaggattggatcgtgaaaccccagttgcgccaggtgcgcggtgtggcggaaatcaacacgtggggtggttttgaaaaacagtttcatgtcatcgtggaaaccgggcgtctcatccagtacggtctaaccttggagaacctctttgacgccctgcaggccaataatcaaaacgtgggtgggggccagatagtgcgcaacggcgaatcgcttctggttcacggcatcggcctggccaccaacgccgctgcagttgcggagattgttcttgccacccatgacggcataccggtgcgtgtgcgcgatgtggccaccgttcgcgaagatcacgaaatccgccgtggcgcggtcaccgccgacggccggggagaggccgtcctcgggttgggcttcatgctgatgggcgaaaacagcgcggtggtcacccgcgccctcaaagccaaactggccgaagtccaaaaatcactgccgaacgacatccgcctggaagtgctctacgaccgtaccgaactggtggatcaagtcattcgcacggtccaacacaacctgctggccggcgcgctgcttgtggtggccgtgttgttcgccatgctgggcagcctccgcgccggcctcatagtggcctcggctattccgctgtccatgttgtttgccggaaacctcatgttgcaaacgggcatcgccgcaagcctgttgagtctcggagccattgattttggactgttggtggacggtgccgtggtgatggtggaaaacgccatgcgccggctggccgaacaacaggagcgcctgggccgtccgctcaccaaggaagagcgcgatgctgtgctgcgcttggccccgctggaggtggtgcgccccgtggcctatggcgtagccattatcctgttggtattcctgcccattttaactttggaaggcatcgagggcaaaatgttcaaacccatggcgctgacctttattttcgctttgctcgggtcctttttgttgacgctcacatggacgccagtcctggcgtacacttgcctgcccaagcagttgaaaaagggggaacctttgttggtgcggtgggcgcgccgtctttacacacctgcactggacatggccttgcattttcgcaaattgacactggcagcggccaccctgttggtccttggcgccgtcctgctcgccacccgcatggggggcgaattcctgccccgcctgggcgagggggccatcgtcggcaccactgtccgcctggccggtatttcagttgaggaagcagtcgagcaaaaccaccttttggagcaggctttgttgcgtgagtttcccgatgaaatcgcacacatctggacgcgtttgggaacagccgaggtggccaccgatccgatgggcgttgagctggccgatttctttctggccctcaaacctcgctcccaatggacaaaagcccgcacgcaatcggaattgacacaaaagatgggcgcgctgttggcccaggtgccgggtctcaaaacggctttcagccagcccatcgaaatgcgaatgaacgagctggtggccggcattcgcggcgatttgggtgtgaaaatttatggggatgaccttgaagttctgcgtcggctgggtcaggaagttcaacaagctttggcccgtgtgccgggggctgctgagattagtctggaacagttgaccggtcagggcgttctgcaagtgcaagtggacaccgaatccctctcacgccacggtcttgcggcgcgggatgtgttgaatgtcgttcaagctgtgggctcgcatcgtgtgggagacgtgcgggaaggccagcgaaggtttcctttggtggtgcgcctgccggatcgtcagcgcagagatcccgttgcgttagcggccaccctggtgccgaccgccggcggaccggtattgcctttgtcgcagttggccctcataaccgaaacggaggggccggccaccatcaaccgggaatggggccgccgccgcattaccgtccaatgcaacgttcaggggcgcgacgtcaaaagttttgtcgaggaagccaggacggcgatcgccaatcaaatccaactgccggaaggttacaccatcgcctggggcggtcagtttgagaacatggaacgcgccaatgcacgcttgaaatgggtggtgccgatggccctgacactcattttgatcatgttgtttttcagcctcaaatctttgcgcgatgttttcatcgtcgcttccggcattcctctgggcgcggtgggcggcattattgcgctgtggtggcgcgacatgcccttcacggtgagcgctgccgtggggtttgtggcgctgagcggcgtcgccatcctcaacggcctggtgctggtgactttcatccaacaacgtctggcggctggaatgccgctgccgcaggccgtgcgtgaaggttgtctcacccgcctgcggccggtgttgatgacggccgccgtggtggcgctcggttttttgccgatggccgtcaatgttggagtgggaggcgaggtacagaggccgctggccaccgtggtcatagggggcatcttcaccaacacccttctcaccttggtggtattgccagccttgtacgtctggaggggctccaagtctccttctgcaacttgaggcccgtgtttaggccagtgtcccgcaaacggggcattggggcgagcggcgtgtgcgcacttttttgaatgtcatggtgcgcaaatcgcaaagcaacaattcattcttcaacggctccgccacaccggtgatgactttgaatacctcgacggctgccaggcatcccgccactcccgacacggcgcccaccacgggaaactggcgtttccaatcgggcggtttctccgggcacaaacaggccagacacgccgtttggccgggcaggatggtggtgatttgagcggtcatgtcatacatcgcgcactcaatcatcggcttgcgctgccgcacggcctcgcgattcatcaagaagcgctcttcaaacaacggcgccgcatccaccacgacatcggcctgccccaccaatgccgcggcgttgtgctcccgcacattttccggcaccgcaataatttccacctgcggatttaattcacgcaaacgccgcgcagcacattccacccgcggcttgcccaaccaatcgtgggtcatcaaaagttgccggttcaaatccggaagccgcaccacaccgccgtgggcaagcaccaaccgccccacgccggcggcggccagttggtaggcgacttgcccgcccacaccaccgatacgcgagatgagcacggtggccgccttgaggcgtcgttgtccctcctcaccccagccgggaatccaaagttgccactcgtagcgctgccgctcttcttcggtaagtcgtgagggattggacatgctgaacatccttaactttcaacctctacaatggccccattttccaaacggaaaacgcggtcggccagttgctgggcgtcctccggatgatgggtcacatgcagggtggtgaccttggtacgggcgcggactgttttaagcaattcgtacatctcgctgcgagtctcctcgtccaacgcgctcagcggctcatcgaggcacaaaatccgcggctgtatggccagggcacgccccaaagccacccgctgggactcgcctccactcaacccctgcggtcggcgatgcagcagatgctcaatgcccagccattgggagaggctgtgcacccgctccttgatttccgccgccggcactttcctcagtgtcaggccaaaggccaggttcgcctccaccgtcatggtttgaaacaaagccctgtcttgcggcacatacccaatcccgcgccatgccgggtcccagtctgtgacatcttcaccatcgagccagatgcgcccgctttccacctgccgcaagccgcacaaagcctccaacaaggttgtcttgccgcaaccggtccgccccatcaacaccgcatagctcccctccggcagttcaaagttcaactgcgacaaccgaaaggcgcctgcacgcacgcacatgttttccacgcgaatcataagggttggccctgatggaaacttgtgcccgagccaaaccagcgcaccaccaccaacaccgccaccgccgccccaatcatcagcagagacacggccaccgccgcctccagcgcgcccacgctcaattcaagaaacaccgatgtggacaacacttccgtcttcatccgcgtggccccggaaaaaacgaggatgggcccaaattcccccagagagcgcgcccacgccagcgtaccggcggtcagcacgccacgacgggcctccggcaatgtgaccctccagaaggcttgatggcgcgtgcatcccaaagtccgtgccacctgttcgccgcggggactgatttggtcaaaagccacacgcatggtctgcacggcaaaagcacatgccacggcaaactgggccagaatcacactcggcaccgcataggtcaccggcaagtaacgttccacccagcgccccggggcggtttgaaacaaaatcagcaggcttaacccaatcaccaggggcggcaaaacaattggaatgtccagcaacgcctccaacaaacccttgccgcgaaattgataccgcgaaagcaggtagcccagcggcactcccacccaaatacaaagtaatgcagtgatgctgcaggaaaggagactcagccggatggcgtattgaatgttttcgctgcgcaaggcattcatcaaatgcccaggcgaggtataagacaaatcggccaccagcatggccacaatcaacaccacgtaaacgcccccaatcaaagccagcccgatgacaaacggtgtgtcggaccgcgtccgcaaccgccggcttgagcctgaatgcgccgtggatgatgtcatgcggcctcagtatagggcttgagctgccaaacttccacaaacaagcgcataccatgaaatgaaaagctgcctccgattcaaacattgtgccgaccctgcattctgcacttgcagctttcggccggacagctaatgctttgcgccgaataaacttatgaactatcacatttcacaacgcgccgcttcactgtcgccctcgctcacgctggccattgatgccaaggccaagcaaatgaaggccgaaggccaggacgtcgtgggctttggcgcaggagagccagactttgacaccccgcaacacatcaaggacgccgccgccgaggcgctggccaagggtttcaccaaatacacccccagcagcggcatccccgagctgcggcaggccgtggccgacaaattcaaacgcgacaacggcctgacatacaaaccctctcaaatcatcatttcctgcggcggcaaacattcttgctacaacgtgatccttgccacgtgtcaggaaggcgacgaagtcatcattcccgccccctactggctgagctatccggaaatggtcaagctcgcaggcgccaagccggtgattctgcccaccaccgacaagaccgagttcaaggtcaccccggatcaattgcgggcagccatcacgccgcgcacgcgcctgttcatcctcaattccccgagcaaccccacaggcaccatttatgaacctgaggaaatcaaggcgctgggcgatgtgtgcgtggaaaaaggcgtgctcatcatgagcgatgaaatctacgaaaaacttgtctatgacggggcgcggcacgtgagcgtggccactttcagccaggcgcattacgagcacaccatcatcgtccacggtctggccaaggcctactccatgactggttggcggttgggttatctggcggcgccggaacccatcgccaaagccattgatgccatccaaagccacagcacaagtaaccccacgtccttcgcccaaaaaggcggcgtcgctgcgctcaatggtccccaggatcacttggcggcatggctcgccgaatactccaaacggcgcctcttcgcctggcaaaaactcaactccatcccgggggtctcctgtgtcaacgcccgcggcgccttttatctcttccccaacatctccggcaccggcttgaagagcaccgagttctgcgcccggctgctggagcaggaaaaagtcgccgccgtgccgggtatcgctttcggtgccgatgactacatacgcatcagttacgccacgagcatggccaacattgaaaagggcttggagcggatggagcgtttctgccgcagtttggtgaaggcttgagcgtacgcacagcgtctcaaccgaattcattgttgggcctccaacagcatcggaccttgggagttttgctcccaaaggtccgaatcttttttgaggaagactgacgccttattcaacgcttggcgcgtcgcggccatcccggcggaatggccaccgaggccacggtgttcaacaaaaacaccgccaccgccacaccattcaagatagccccccactggcgggcccaaaagatatcggccaagtcgcctgttacccgtaaaaccagcgcaccgtgtaataacaccacgtgcagatacaacacgggccgatatgttgccgtaaaattcaaaatggccggaaagatgacaggggcatgcccgaaaatcatggaaaacacaaacccgacaaaaaaactgtgcaacacggcatcgtagggaaacggcccgctctccaagggactgtagcgaatcatccaaatcccgctgaggcccatccaaacataccctgtgagcagacagacagccatgaaacgtggcaagcccggatgccggatggtgcggcgcgccaaatcaaaccatccgagccagcaggccaacgccagcatgccggtgcctgtcaggcgctcacccggcacctgccaccacacgctcatcaccacgccggtcatgaacaacgccagcgcgccgtaaaacagaggacgtgaccactttgagggccgcgtgaagcggttcaaatccagccgctcccccacaatggtcaaccccagaaaagcgatccaccaggggacaatgcgattgaagctccagccctgtgtccacagtccattacccaccacccaacaaagggcagccacggccatcaacaccgtgaaaagtgccttctgaatggccaccacacgccacgccaccactgcaaacacggcgctgccagacgcaaccaaccatacgggatgcggctgggtcactccgccggcaattgcaatggacccggcagccgttaaaatgggcggaagatacgtccaccaggaacccaacccgacggcgcgctccagaccgatgaccgtccccaaaaatccgcataccatgagcggtccgtgaaatgttatccaattggctccgtgctcgggcgtgggcaggttcacacccaaccgcaacaaacctccccaaatgccggagaccagacatgccatggccagcaccacccacggcgcgcgcccggcacgttgccagcgttgattgattgcctttctgtcctgcataagagctggcggggccatcagcactccgcggcccgccaccatcaaaatacaaaatcaccagccggcaggtttgacctgcgccaattttatcggttttttgggcgctccgctaaaaggcgctaaaagagggtgccaacggccatgcccaacacactgagcggtccctggtcctccaagccttccgttgctttgtcgagtttttggagggtgagcttggcgtttttgaacagactttcgtcattgacgagccgccctaccgaaccttggccgcggttgattttttgcatgatctcgcggaggttggtcatggcggtcgaggtctccttgtaaagctggtcgtctttgagcaacaagcccaacgtccctttgccggcctgaaccccttcaatcatttcgttggcgcgcgtcagcgcaaggttgagattggtggtgatggttttggcgttggcaatgaccgcgcggccctcttcaatggcactgcgcacctccaccgccgtggcttcaaaatttgaaagcgtgtttaccgccgttgtatgcagggtgtcttcccgaatcaaccggcccaccgtaccgcggccttgggcaatttggtccgaaatgctccgcaaattgccgatggtcaatgtcagtggctcgcggttttgcttgagaaaatccgttagcggccccaacaggttgtcaatgcgatcaccgctgaagctgcgggtgatgttttcaatgcctgccgccacgttgtccatcttggccatcatctcgctcaaatcggcgccctccactgtctcaataaattttccggcttccagcgggaggcctttttcagagccgaagtccaacgccacaaagttttggcccattaatccggcgaatttgatgcgggcctttgaatcggtgcgcaccaccacatcgcggcgcagaagcagtgtcacctgcaccatgttattggtcagaatcagccgctccacacgtcccacgggcacgccggccaatttcacagggtcgcccaccttgagttcgtggacgtttttgaagagggcatgcaagggataggttttgaggaaaaactccttgctgccggcgagttccaggatgatgacggccacgacgaccgccaaggctgcaaagatgcccaaccgggtttcaagtgtattgcgcataagcctcaagtttggggtttgaatcgaaagtccgtcgtcaaaaacttttgcacttcaggatcggcgcagcgccggacctctgccggcgtgcctatcgcccggagctgcccgcccaacaagatggccaacctgtccgcgatgccgaatgccaaatcacgatcgtgcgtaacgacgatggaagtagcccccatcctatcgttcaaccgcacaatctcctccgcaatcgtcactgcaatcagcgggtccagctcgctggtgggttcatcataaagtatgagctgcggctccaccaccaacgcccgcgcaatggccacgcgctttttcatgccgcccgagagttcgcccggcagcttgtcctccgtccccgccattcccaccaattcgagtttttcccgtacaatccgctgtatttccgccggtggtttgagccggtgctcgctcaagtacaaacccacattttcgcccacggtcaaagaattgagcaatgcgccgctttgaaacaccatcgccatgcggtagtggtccatgatttgaccgccatccaacggctgaccattaatgtggatttccccggcgtccggtgtctccaggccaatcaaatgccgcaagagcacgcttttgccgctgccgctcggccccatgatgacaaacaactccccgggcgccacctcaaaggtcagcccttgcaacaccgtctgcgaaccgtaagccttttgcagacccttgacggtcaccttgacccctgcgcgtttgttttcgggggtgttcattcttcaaaatacaacaaaagccgcgtcaggaaataatccagaattaaaatcaagacgatggaattgaccaccgccttggtcaccgagcggccaatgccccgcggaccgccaatggtcaccaacccctgatgacaggaaaccaatcccaccacgaccgcaaaacaaaaggtcttgaacaagccgtgcgccaaatctcccagctccaccacttcctcaagattattgaaatatgttgcaaaggaaatggcgatgctctggttgtaatgcgccaccaccgccccccccagccagccggtcaacaccgcaaacaacagcaacgtgggcagcgccaccgcaatggccgtcatccgcggcaagaccaaatagtggactggattgatgttgagcgtgcgcagggcgtccagctcctgataaactttcatcgagccgatttcagccgccatcgccgaaccaatgcgcccggcaatcaaaatggacatcatcacaggcgccagctccttgcacagactgatgcccacaactcccccaagcagaccgctcaatccccgctctgccaacaccggccccgtctgcaaagccagcacaccaccgatgaaaaaagacaggatgcacgccatcaacaaactggcgttgcctatctcaaacatctggtccatgaccttctggcgatggcgcagcaccaacggcagcgcctgcaaggtgcgccagaacaatatcagcatctcgcctatgttttgaaacatggtgccgtggccgctgcaggggacatacctgcggctccctctccataacgcggattctacaaaaattcaaaagtattttaacccggctcggatgaa
